United States Patent Application Publication US 2024/0327476 A1 - sequence listing, part 12

SEQ ID NO: 12793 - DNA, 4170 bp, Homo sapiens
  source 1..4170: mol_type = unassigned DNA
aagtctccgggctcctttcacatctgcaggagcagccagcctgggaccgcgcggcgcggggcgcgctctcgcctctcctgcaccctcagccggcgcgcttctcttatgggcgtctgctgcagtctggctgcggtcgaactgaaagcggcggcgggagaccaaacttagaccccgctgtggactagagaactcagagaaggcagagggagagggagagagagagagagaagggacccgaggaggaggcttccatcacgtcattgcaggatgttctggaagctttccctgtccttgttcctggtggcggtgctggtgaaggtggcggaagcccggaagaaccggccggcgggcgccatcccctcgccttacaaggacggcagcagcaacaactcggagagatggcagcaccagatcaaggaggtgctggcctccagccaggaggccctggtggtcaccgagcgcaagtacctcaagagtgactggtgcaagacgcagccgctgcggcagacggtgagcgaggagggctgccggagccgcaccatcctcaaccgcttctgctacggccagtgcaactccttctacatcccgcggcacgtgaagaaggaggaggagtccttccagtcctgcgccttctgcaagccccagcgcgtcacctccgtcctcgtggagctcgagtgccccggcctggacccacccttccgactcaagaaaatccagaaggtgaagcagtgccggtgcatgtccgtgaacctgagcgactcggacaagcagtgagcgccgggccggacgcagctcagccccgcgcgcgcccggccgctgggtggcgccgccgccgcctctgtccctgccctccgagcccactgtcacgctgcctggtgttccccctcagcagcaagcacttctcttagggctgacggtgtccttgtcacagacgtggatcgcaagtggagcttttgctgatgtgttcctgaccgaccccgggtcccacctgtgccccctaaaccaggcggtggatcaggcccgaaggaaaatgctggaaaaccaccaccgccacccagcagtcagagaggacctttcgaggtgatgcactgtaaatccggcattgatgtttccaccatgtggaaaagcaaggatttccctggccccgccctgcactccagctcgcccctttcccgcgcgaagtgaaggatgcgtcacttttctgagcggcccctcagacctctcctgctggtccctggacctctggctgggagcgctcattcttgtgactggcaggctgccctcggtcgctgctgtgatgaggatatgtgcaacctccataaatatgtcggtggacggggcgtctcctaataaacctgataccaagaagacaacttgagccacttggatcccgaagtgggcttcccgggaaacctcgagcagagcaggctacacaatcccccatcctcaagtccccaccgcctcttcttcctcactgtccccgccccctatttgtggactaaagatgaactctggtgtgcatgctattattgctgcaattagaatattatcacacacaaaggtctctatattaacgctggttttataagtgaccgtatattgtaaagagctgttaaaaagtattatagacctattcatgtattatttcacatgttttgactctggcttgcagcaccattcggagtaaggatgacagcaggcccagaaggtgtcttactcagaaaaaaaaatgcctggtcagcaattcactgtcatgcacctatttttagattgggcagggagatgggaggagtcgtgatttttactttgaatactatttcactgacgttactaagcattgcagcacaatgtagaaattggcttgggatggataggtatagggaagggcattcgttgggaaattgatgaccggaaactagaaagcccctataatgtggaatatgcatatgtggggtgaaaccgtatactactttcactgccatgacactaggcaaaaaatatttcctgttaaaagaaagagaaaaagagagggatattgaaaaatataaggagttgagtcgctttgtggtatagaagggagtaaggaataaaagatatagaatagtaatctagttgaactgttctgcacaaaacatgcttccttttcaaagaatagacttcaaaagggacgaacaaacattaggtcaccttttgtgtttataatgaattgttgacgtttccatgctgtggtctcttgatatacggaagtagacgtaacttattttccagcgaaattatatacttcttctgggctcctttgctcagttgccccaggaaggcttccctgtgagtaatgcttatggaatctgacaaatgtgaatgagctgccattggtgggaatcagtaaactttgaaaacctttcactgatgattccctggtaagtgctcctgtgaggggccacttccctagtatgtgagagagaccctctgcaagccgctgtggggacttagcttcctgatactaggtagtgatggtggatctagagacattcacttgaagagcaaggattggggtggggtgggttggtgaatctatctcaggccactgcactgcaaggtgcatttctgtcatttctgcaacaccatgagacctgagcaagaatgtgctgtggcagagggggtcttggtttcataaatgggtatatacagcctgaactcaggaggcagaaatcaaaagaaatccttgagggctggaacctgaggatagagcgaaaatggagagaagggtgttcaaggtcaggagtgatttttgcatttggtggaaaacctcaagtcagactcagtggcagaacatgcagcagaaaagctgtgaaggaaggaaatttacgtgattgtaatggaggctaggggtggattgggaggtgagtggaggagagtctctgaccagctgcagagccaacccctatcattttattaacatggaacccacacagataggggagggattaagctaagaacttacagaatgcaaacacgagcacactctcttcgaacccaattgtgggtgtagcaatgaaagcaatatgatatgctgcagtgtgaagctccttctggggttatcgtatgtacaaagtttaccttataatggctcaaattgtatttaatttttttgttttgtttataaatgaagaaaagctataagtataatgtaattattttataggtatactattaaattatagaacaaataaagataatctaggattatatgtgatcccggtgtgacgtgccataaaagtggaatttttgacttgttgcagtgagctgtgaagcagcactatgcgttcagagagtttttgttcaaccatggtgagttcaacctctagcttatgtcacatgatctcctttggggtctggaatcttctaagagaaatagaatcaggcatccaaggagcagaagtgatggaggtggccctcaatcctggtctttggaagcttccaagcctcttccacatcccctgccagctgaagacagagtattctcactgtgctggctgaaggagaaacactaaacaaggaaaccttgagaaactgcagcaatggaagtccactgttagtctctccgttagcaccagggacacacttgttctgagttttgttcattttcacatttactcctcatgagttccaacatttcttaatttaaatatttcttagtttatagcatctccatttttctattaattgacttaatctgccatttaagaaaactccgtaatcaataaaaaataaaatccacaatcaaactgcacatggttgatccactgtgtaggcttcaaaggaattaaactcaacttcctaggaaataattcatcttagtttattaaatgggacagaatatttcactgctaacgtattctaactcacttgtttttgaaattggccagatgatttttaagttataaagtcaatgaaaatgacttttgctattgtgtgaacaacttagaatgtatatattcccagaaggcttatttaatgattgacctatcaccactgattattaatgtctgcatgaatgataacaataagaccaagtcatcaataatgcaatgaaaattttttaagtgaaagcaagtttattaagaaagtaaaggaataaagaatgcctacttcataggcagagcagcctaa

SEQ ID NO: 12794 - DNA, 6666 bp, Homo sapiens
  source 1..6666: mol_type = unassigned DNA
agtgcccgcggcgcatgtgccaggcacaccccacccccaaccggccctggattccacttccgttccaccatcgctgctggagcagctgccttcaggccctgcgccgcctccggagtccatggccggcacgcgctgggtactcggggcgctgctccggggctgcggctgtaactgcagcagctgccggcgcaccggcgccgcctgcctgcccttctactccgccgctggctctatcccgtcgggcgtctcgggccgccgccgcctgctgctgctgctcggggccgccgcggccgctgcctcccagacgcgtggcctccagaccgggcctgtgcctcccgggaggctggcggggcctcccgctgtggccacctctgccgcggccgcggccgccgcgtcctactctgccctccgtgcctctctgctgccgcagtcgctggcggcggcggccgccgtcccgacgcgcagctacagccaggagtccaaaactacttacctggaagaccttccaccaccccctgagtatgaattggccccgtccaagttagaagaggaagtggatgatgtctttctcattcgagctcaaggactgccctggtcatgcactatggaagatgtgcttaactttttttcagactgcagaatccgcaacggtgagaatggaatacattttctcctaaacagagatgggaaacgaaggggtgatgccttaattgaaatggagtcagagcaggatgtgcagaaagccttagagaagcaccgcatgtacatgggccagcggtatgtggaagtatatgagataaacaatgaagatgtggatgccttaatgaagagcttgcaggtcaaatcttcgcctgtggtaaatgatggtgtggttcgtttgagaggacttccttatagttgcaatgagaaagacattgtagacttctttgcaggactgaatatagttgacattacttttgtgatggactatagagggaggcgaaaaacaggggaagcctatgtgcaatttgaagaaccagaaatggccaaccaagccctgttgaaacacagggaagaaattggtaatcgatacatcgagatatttccaagcagaaggaatgaagttcgaacacatgtcggttcttataagggaaagaaaatcgcatcttttcctactgctaagtatataactgagccagaaatggtctttgaagaacatgaagtaaatgaggatattcaacccatgacagcttttgaaagtgagaaggaaatagaattgcctaaggaggtgccagaaaagcttccagaggctgctgattttggaactacgtcttctctgcattttgtccacatgagaggattacctttccaagccaatgcccaagacattataaacttttttgctccactcaagcctgttagaatcaccatggaatacagctccagtgggaaggccactggagaagctgatgtgcactttgagacccatgaggatgctgttgcagcgatgctcaaggatcggtcccacgttcatcataggtatattgaactgttcctgaattcatgtccaaaaggaaaataagactctaggggctccagataataagggtgaagcaagaagcatttcatttgcacatctttcttggacttgggatatacagttccagtttattagcagcaactgctagggaaatgattttggtgttttgggttaattgcttctaagaaaagtttcatagtggactgtttagaagaagaaatgaaagatccagtttgggattatgaaataaaccacaaattaaaatttttgtttaaactgtccaggatctgatttaaaaatatggtctttgttttatatgattaaatggtttgttttcatagatgatatgttactcattgtaaagaccacatatttttattcagcagtgttctttaaacggtttcatttaaaaagtaactttttttttttgcctgtgaattgagtgctctgatgtaaaacttctcatggagtgaaacagtgatttattttaaccaaacattcaccaaagcaaagaacggtttcagacctttgaactggtatggtttggcagaatagttttaaattttgctgtatttgattacttagagataggaatttttaaaaatcaaaacaaaaaataccacagcttagtgtaaatgacaatttggcggttttatgtctttagaaatgttttgcctttctaagccttgtgctaaaggcgtataacggtggtgcctatctacttaagggggcattctagtcttaacttaaaagttgtctaaactgtccctccctggctttttttggtttggggtagacctaagggtgtttgttagtctcaaaactgtgaagtgacatgtcagaacagtccagactggtaagaaaattaatggcttcacttgaatttaaaccagctctagataggaaaaaaatcagtctcctcatttgctttttaaatggagtagtacatcccatattttagaacaagtaggggtgccttgcttaaataaaaatagcatttaatgtataattgtgtgaagggtttatggataaagctgtacttctgtcacaatgtggcagtactttctgctttaatattaaacagcttgttatttaaatattggacaaaatggctggcttcaaaatatagtcattaataaactaactttatgtgcacctgtgtaggagaatcaaaatcctgtatgctttctttgccttgttcctgttctcagggtgacgactgccaccaggagatgcagttctagttcttaaaattaaatttgcccaggtttctgacaggtgatacctggaagagagactatgtcttctcttacttaatacataaccatctttgattaccagctaagatgcgaaatcactgtactgtagtcaataaatgaagacttgtttcaggctgaagattacctaagagtatttattattggagtctgtgagtcaactgaatatattattacctcaagtcctgctatattaatataagtagtaagggttaattttcgtgtgtgtgttctctaaaatcctgtgaacatgacttaaccagcttaacatcatcagtagtactgcctagatggaaatgcgttttcatatatggttgaatatgccaagctatgagaactggtatctgtagttgtacgaactattagaatgtgatctttgttgctctttcacatttggtatctgatttgctgtggaaaagatctgtggggcctactgtgaggaattcatctgcaattgatttaagctaatgagttttatttgcacatctctggaaaaagaatgcaagcaaagcattaaaatgctatatgatggatgggtaaggttgaaaggatatatcttcttggcacgctacaggctgagttttctgtacaaaatgtggccattattgggaaatcattttatgtatttgaatgctcccttttgtttttgttcatgatctaggctagtacgtaagtgattgctaaggtggatgtagttatgggaaaggaagagaagcacataatacagtaaaagtaatcttatttccatgcaagtggaagacggtaccgtctccccacatttgagaagactgttttgcatcactctttgctattgaaggaagcagtgatggtgaatttccttctgtttgggttccttgtgtctataacttcctttgtggtaaagccatcaggaagaatagtgggagtggggcatatggtcagggtgctcatatcctgctttagcctagctgctgcttacggagtgcaagggagaactctgagaagcagtatgtaaataccagggagctgattgctgaatattgtggtctcatctgaatattgtggtctcatctaaatattgacaccaggcaatgaagcagaaatagagtatgtgtccctttatgcgtgggtaacttaagcttctgtcatgtgggaagggggaccgaatcttccctgggaggaaggctccaaattctcactacttctgtgttacttgaagggggaagcataaggaacccagtttgaaggcaacattgtgtgccatgaatctgcttattaatcaacatgccttgttaatgtcctctgccctgaacagcccttactcagttctcatttggaaagttattttttggggttacatcctgtttgtttcagaatttaaaaccctccatggtgggtcacttgaggtcaggagttcaagattagcctggccaacttagtgaaactccggctctactgaaaatgcaaaaattagccaggtgtggcacacgcctgtaatcccagttacttgggaggccaaggcaggagaatcgcttgaacctgggaggcagaggttgtagcgagccaagatcacaccattgcactccagcctgggcaacagagtgagactctgtcaaaatcaaaaaaaccaaaatacaaaaaactccattgttctgagagtttcccctaaattatcggaagacactcacattgaattggtaggacctatagtatagaggagaatggtatgtatgtcagcagtagagttccaatccaaattgcgctatcgcattagaaatacattaccctcccactccccaagttcagcaaattagaagagaatctgaagtttgtaggaagggaataaagctgctataaacatttatgtgcaggtttttgtgtagactcgttttcagctcctttgggtaaataccaaggaaccaggttgctggattgtaagttaagagtatgtttagttttggaagaaactgccaaactgttccaacatgactattttgaattcccattgacaatgaataagagttcctgtagctcctcaccctcattagtatttggtgatgtcactcttgcattttagctaatgggtgaatagtggtctcatcgttttaattcccaatcccatagtgatgtggagcaccttttcatatacttaatctgccatccttatatcatcattggtgaggtgtctggattttctgtccagaattttagttctagtggttttcttatttttagaaaggaagtataggaaggaaggtttaatctgtcttaagcctgattatatgaaaatcaagaataggctaggtgtggtggctgacatctgtaatccccgcactttgtgaggctgaagtgggaggactgcttgagcctgggaagtcaagcctgcagtgagccatgactgttgctgcactccagcctgagtgacagagtgagaccctgtctcagaaaaaaaaaaagcaggctcattttaaagttgtttatattttattttttgaaggaaataaacttgaagagatacaaacggtagtgaagattctccttcccctcctgtaattcagctgtttagtttctattctcgcacagccctgttatcagtttctagtgtaagcttgcagtgacttttactttatttataagcaagtgttagtgggtgttgtcatttcttttaaaaatataaattatactgtacatgctattttgtattttggcttttctcccacctaaacaccctaaagatcattttctgtcagtatataaaatcttggtgatgccaatacccatcccttagattgtacaagcagcattttgccatgctttatcccatagcctgcctcctgcagtctcatctttttttctatatgcatgtccaagtaagttgtagacatttttcacttttaatcctttcagcatacatgtcatgggaatttgtttttgtttttgttttttgtgtttgagacagtcgctctgtcacccaggctggagttatagtgacgtgatcccagctcattacagcctccacctcccagtttcaagcaattctcatgcctcagattcccgagtagctgggattacagatgtgcaccaccacgcctgactaatttttgtatttttagtagagatggggtttcatcatgttggccaggctggtctggaactcctggcctccagtcatttgcctgcctcggcctcccaaagtgctgggattacaggcatcagccaccacacccagccgtcattggagtttttttgagggagatttgcagtaaggtgaataaatgttaagtgtatcatttgatgaggttttttctttttttttttttttttttgagatggagtcttgtatcgcccaggctagagtgcagtggcctggtcttggctcactgcaacctccacctcctgggttcaagggagtctcctgcctcagcctcccgagtagctgggattacaggtgtgagccaccatacccagactcatttgatgagttttgatgtaaaagcatgtaactcaaacccctatgtctggaacatctgtattacatctgaattttttcacctagtcaattcctgcacctctctctcctgtcccttcttccctcccctggcagtcagctactgttaggattttgttcactgtagattaattttgcctattctagaacttcatataacggactcacttatgcagtatgtattctgtaagttccttttactcagcatgtttgtatgttcatcagtgtgtttaagctttgttcctttttatggctgagcagtgttctatgtatgaatgccacattttaacgtttcacctgttaggtgaacaactaactggtgaacaatgggctgtttctagtttggggctatcatgaataaagttggtatgaacatgtacaac

SEQ ID NO: 12795 - DNA, 6462 bp, Homo sapiens
  source 1..6462: mol_type = unassigned DNA
gcggccgccgtcccgacgcgcagctacagccaggtacgtgggcgccgtgagggacctggcgcgagatccctcccgggccgcgtgcacgcgcccccgcgcccctccgtccctccgtgtgcgcctcgcgggcacgcccggggatccgcgacactcgccgcacacccgcccccgtccaccctgtgctcctattgggccctggaacaagggaagctctcccaggcgtcgggtcttctgcttgttttgttctcgcctcgagtctctggtcggttgggcagtgagtccaaaactacttacctggaagaccttccaccaccccctgagtatgaattggccccgtccaagttagaagaggaagtggatgatgtctttctcattcgagctcaaggactgccctggtcatgcactatggaagatgtgcttaactttttttcagactgcagaatccgcaacggtgagaatggaatacattttctcctaaacagagatgggaaacgaaggggtgatgccttaattgaaatggagtcagagcaggatgtgcagaaagccttagagaagcaccgcatgtacatgggccagcggtatgtggaagtatatgagataaacaatgaagatgtggatgccttaatgaagagcttgcaggtcaaatcttcgcctgtggtaaatgatggtgtggttcgtttgagaggacttccttatagttgcaatgagaaagacattgtagacttctttgcaggactgaatatagttgacattacttttgtgatggactatagagggaggcgaaaaacaggggaagcctatgtgcaatttgaagaaccagaaatggccaaccaagccctgttgaaacacagggaagaaattggtaatcgatacatcgagatatttccaagcagaaggaatgaagttcgaacacatgtcggttcttataagggaaagaaaatcgcatcttttcctactgctaagtatataactgagccagaaatggtctttgaagaacatgaagtaaatgaggatattcaacccatgacagcttttgaaagtgagaaggaaatagaattgcctaaggaggtgccagaaaagcttccagaggctgctgattttggaactacgtcttctctgcattttgtccacatgagaggattacctttccaagccaatgcccaagacattataaacttttttgctccactcaagcctgttagaatcaccatggaatacagctccagtgggaaggccactggagaagctgatgtgcactttgagacccatgaggatgctgttgcagcgatgctcaaggatcggtcccacgttcatcataggtatattgaactgttcctgaattcatgtccaaaaggaaaataagactctaggggctccagataataagggtgaagcaagaagcatttcatttgcacatctttcttggacttgggatatacagttccagtttattagcagcaactgctagggaaatgattttggtgttttgggttaattgcttctaagaaaagtttcatagtggactgtttagaagaagaaatgaaagatccagtttgggattatgaaataaaccacaaattaaaatttttgtttaaactgtccaggatctgatttaaaaatatggtctttgttttatatgattaaatggtttgttttcatagatgatatgttactcattgtaaagaccacatatttttattcagcagtgttctttaaacggtttcatttaaaaagtaactttttttttttgcctgtgaattgagtgctctgatgtaaaacttctcatggagtgaaacagtgatttattttaaccaaacattcaccaaagcaaagaacggtttcagacctttgaactggtatggtttggcagaatagttttaaattttgctgtatttgattacttagagataggaatttttaaaaatcaaaacaaaaaataccacagcttagtgtaaatgacaatttggcggttttatgtctttagaaatgttttgcctttctaagccttgtgctaaaggcgtataacggtggtgcctatctacttaagggggcattctagtcttaacttaaaagttgtctaaactgtccctccctggctttttttggtttggggtagacctaagggtgtttgttagtctcaaaactgtgaagtgacatgtcagaacagtccagactggtaagaaaattaatggcttcacttgaatttaaaccagctctagataggaaaaaaatcagtctcctcatttgctttttaaatggagtagtacatcccatattttagaacaagtaggggtgccttgcttaaataaaaatagcatttaatgtataattgtgtgaagggtttatggataaagctgtacttctgtcacaatgtggcagtactttctgctttaatattaaacagcttgttatttaaatattggacaaaatggctggcttcaaaatatagtcattaataaactaactttatgtgcacctgtgtaggagaatcaaaatcctgtatgctttctttgccttgttcctgttctcagggtgacgactgccaccaggagatgcagttctagttcttaaaattaaatttgcccaggtttctgacaggtgatacctggaagagagactatgtcttctcttacttaatacataaccatctttgattaccagctaagatgcgaaatcactgtactgtagtcaataaatgaagacttgtttcaggctgaagattacctaagagtatttattattggagtctgtgagtcaactgaatatattattacctcaagtcctgctatattaatataagtagtaagggttaattttcgtgtgtgtgttctctaaaatcctgtgaacatgacttaaccagcttaacatcatcagtagtactgcctagatggaaatgcgttttcatatatggttgaatatgccaagctatgagaactggtatctgtagttgtacgaactattagaatgtgatctttgttgctctttcacatttggtatctgatttgctgtggaaaagatctgtggggcctactgtgaggaattcatctgcaattgatttaagctaatgagttttatttgcacatctctggaaaaagaatgcaagcaaagcattaaaatgctatatgatggatgggtaaggttgaaaggatatatcttcttggcacgctacaggctgagttttctgtacaaaatgtggccattattgggaaatcattttatgtatttgaatgctcccttttgtttttgttcatgatctaggctagtacgtaagtgattgctaaggtggatgtagttatgggaaaggaagagaagcacataatacagtaaaagtaatcttatttccatgcaagtggaagacggtaccgtctccccacatttgagaagactgttttgcatcactctttgctattgaaggaagcagtgatggtgaatttccttctgtttgggttccttgtgtctataacttcctttgtggtaaagccatcaggaagaatagtgggagtggggcatatggtcagggtgctcatatcctgctttagcctagctgctgcttacggagtgcaagggagaactctgagaagcagtatgtaaataccagggagctgattgctgaatattgtggtctcatctgaatattgtggtctcatctaaatattgacaccaggcaatgaagcagaaatagagtatgtgtccctttatgcgtgggtaacttaagcttctgtcatgtgggaagggggaccgaatcttccctgggaggaaggctccaaattctcactacttctgtgttacttgaagggggaagcataaggaacccagtttgaaggcaacattgtgtgccatgaatctgcttattaatcaacatgccttgttaatgtcctctgccctgaacagcccttactcagttctcatttggaaagttattttttggggttacatcctgtttgtttcagaatttaaaaccctccatggtgggtcacttgaggtcaggagttcaagattagcctggccaacttagtgaaactccggctctactgaaaatgcaaaaattagccaggtgtggcacacgcctgtaatcccagttacttgggaggccaaggcaggagaatcgcttgaacctgggaggcagaggttgtagcgagccaagatcacaccattgcactccagcctgggcaacagagtgagactctgtcaaaatcaaaaaaaccaaaatacaaaaaactccattgttctgagagtttcccctaaattatcggaagacactcacattgaattggtaggacctatagtatagaggagaatggtatgtatgtcagcagtagagttccaatccaaattgcgctatcgcattagaaatacattaccctcccactccccaagttcagcaaattagaagagaatctgaagtttgtaggaagggaataaagctgctataaacatttatgtgcaggtttttgtgtagactcgttttcagctcctttgggtaaataccaaggaaccaggttgctggattgtaagttaagagtatgtttagttttggaagaaactgccaaactgttccaacatgactattttgaattcccattgacaatgaataagagttcctgtagctcctcaccctcattagtatttggtgatgtcactcttgcattttagctaatgggtgaatagtggtctcatcgttttaattcccaatcccatagtgatgtggagcaccttttcatatacttaatctgccatccttatatcatcattggtgaggtgtctggattttctgtccagaattttagttctagtggttttcttatttttagaaaggaagtataggaaggaaggtttaatctgtcttaagcctgattatatgaaaatcaagaataggctaggtgtggtggctgacatctgtaatccccgcactttgtgaggctgaagtgggaggactgcttgagcctgggaagtcaagcctgcagtgagccatgactgttgctgcactccagcctgagtgacagagtgagaccctgtctcagaaaaaaaaaaagcaggctcattttaaagttgtttatattttattttttgaaggaaataaacttgaagagatacaaacggtagtgaagattctccttcccctcctgtaattcagctgtttagtttctattctcgcacagccctgttatcagtttctagtgtaagcttgcagtgacttttactttatttataagcaagtgttagtgggtgttgtcatttcttttaaaaatataaattatactgtacatgctattttgtattttggcttttctcccacctaaacaccctaaagatcattttctgtcagtatataaaatcttggtgatgccaatacccatcccttagattgtacaagcagcattttgccatgctttatcccatagcctgcctcctgcagtctcatctttttttctatatgcatgtccaagtaagttgtagacatttttcacttttaatcctttcagcatacatgtcatgggaatttgtttttgtttttgttttttgtgtttgagacagtcgctctgtcacccaggctggagttatagtgacgtgatcccagctcattacagcctccacctcccagtttcaagcaattctcatgcctcagattcccgagtagctgggattacagatgtgcaccaccacgcctgactaatttttgtatttttagtagagatggggtttcatcatgttggccaggctggtctggaactcctggcctccagtcatttgcctgcctcggcctcccaaagtgctgggattacaggcatcagccaccacacccagccgtcattggagtttttttgagggagatttgcagtaaggtgaataaatgttaagtgtatcatttgatgaggttttttctttttttttttttttttttgagatggagtcttgtatcgcccaggctagagtgcagtggcctggtcttggctcactgcaacctccacctcctgggttcaagggagtctcctgcctcagcctcccgagtagctgggattacaggtgtgagccaccatacccagactcatttgatgagttttgatgtaaaagcatgtaactcaaacccctatgtctggaacatctgtattacatctgaattttttcacctagtcaattcctgcacctctctctcctgtcccttcttccctcccctggcagtcagctactgttaggattttgttcactgtagattaattttgcctattctagaacttcatataacggactcacttatgcagtatgtattctgtaagttccttttactcagcatgtttgtatgttcatcagtgtgtttaagctttgttcctttttatggctgagcagtgttctatgtatgaatgccacattttaacgtttcacctgttaggtgaacaactaactggtgaacaatgggctgtttctagtttggggctatcatgaataaagttggtatgaacatgt

SEQ ID NO: 12796 - DNA, 2491 bp, Homo sapiens
  source 1..2491: mol_type = unassigned DNA
gcggccgccgtcccgacgcgcagctacagccaggtacgtgggcgccgtgagggacctggcgcgagatccctcccgggccgcgtgcacgcgcccccgcgcccctccgtccctccgtgtgcgcctcgcgggcacgcccggggatccgcgacactcgccgcacacccgcccccgtccaccctgtgctcctattgggccctggaacaagggaagctctcccaggcgtcgggtcttctgcttgttttgttctcgcctcgagtctctggtcggttgggcagtgagtccaaaactacttacctggaagaccttccaccaccccctgagtatgaattggccccgtccaagttagaagaggaagtggatgatgtctttctcattcgagctcaaggactgccctggtcatgcactatggaagatgtgcttaactttttttcagactgcagaatccgcaacggtgagaatggaatacattttctcctaaacagagatgggaaacgaaggggtgatgccttaattgaaatggagtcagagcaggatgtgcagaaagccttagagaagcaccgcatgtacatgggccagcggtatgtggaagtatatgagataaacaatgaagatgtggatgccttaatgaagagcttgcaggtcaaatcttcgcctgtggtaaatgatggtgtggttcgtttgagaggacttccttatagttgcaatgagaaagacattgtagacttctttgcaggactgaatatagttgacattacttttgtgatggactatagagggaggcgaaaaacaggggaagcctatgtgcaatttgaagaaccagaaatggccaaccaagccctgttgaaacacagggaagaaattggtaatcgatacatcgagatatttccaagcagaaggaatgaagttcgaacacatgtcggttcttataagggaaagaaaatcgcatcttttcctactgctaagtatataactgagccagaaatggtctttgaagaacatgaagtaaatgaggatattcaacccatgacagcttttgaaagtgagaaggaaatagaattgcctaaggaggtgccagaaaagcttccagaggctgctgattttggaactacgtcttctctgcattttgtccacatgagaggattacctttccaagccaatgcccaagacattataaacttttttgctccactcaagcctgttagaatcaccatggaatacagctccagtgggaaggccactggagaagctgatgtgcactttgagacccatgaggatgctgttgcagcgatgctcaaggatcggtcccacgttcatcataggtatattgaactgttcctgaattcatgtccaaaaggaaaataagactctaggggctccagataataagggtgaagcaagaagcatttcatttgcacatctttcttggacttgggatatacagttccagtttattagcagcaactgctagggaaatgattttggtgttttgggttaattgcttctaagaaaagtttcatagtggactgtttagaagaagaaatgaaagatccagtttgggattatgaaataaaccacaaattaaaatttttgtttaaactgtccaggatctgatttaaaaatatggtctttgttttatatgattaaatggtttgttttcatagatgatatgttactcattgtaaagaccacatatttttattcagcagtgttctttaaacggtttcatttaaaaagtaactttttttttttgcctgtgaattgagtgctctgatgtaaaacttctcatggagtgaaacagtgatttattttaaccaaacattcaccaaagcaaagaacggtttcagacctttgaactggtatggtttggcagaatagttttaaattttgctgtatttgattacttagagataggaatttttaaaaatcaaaacaaaaaataccacagcttagtgtaaatgacaatttggcggttttatgtctttagaaatgttttgcctttctaagccttgtgctaaaggcgtataacggtggtgcctatctacttaagggggcattctagtcttaacttaaaagttgtctaaactgtccctccctggctttttttggtttggggtagacctaagggtgtttgttagtctcaaaactgtgaagtgacatgtcagaacagtccagactggtaagaaaattaatggcttcacttgaatttaaaccagctctagataggaaaaaaatcagtctcctcatttgctttttaaatggagtagtacatcccatattttagaacaagtaggggtgccttgcttaaataaaaatagcatttaatgtataattgtgtgaagggtttatggataaagctgtacttctgtcacaatgtggcagtactttctgctttaatattaaacagcttgttatttaaatattggacaaaatggctggcttcaaaatatagtcattaataaactaactttatgtgcacctgtgtaggagaatc

SEQ ID NO: 12797 - DNA, 1794 bp, Homo sapiens
  source 1..1794: mol_type = unassigned DNA
gcacacagttgcgtgggctggcttgtagggaaggagcctgtccccatcgcgccgttccctctcctgtccccagggaaagacgagctgtcccggtttactgaaggtcacctctgcaactccactcatacagaaggagtccaaaactacttacctggaagaccttccaccaccccctgagtatgaattggccccgtccaagttagaagaggaagtggatgatgtctttctcattcgagctcaaggactgccctggtcatgcactatggaagatgtgcttaactttttttcagactgcagaatccgcaacggtgagaatggaatacattttctcctaaacagagatgggaaacgaaggggtgatgccttaattgaaatggagtcagagcaggatgtgcagaaagccttagagaagcaccgcatgtacatgggccagcggtatgtggaagtatatgagataaacaatgaagatgtggatgccttaatgaagagcttgcaggtcaaatcttcgcctgtggtaaatgatggtgtggttcgtttgagaggacttccttatagttgcaatgagaaagacattgtagacttctttgcaggactgaatatagttgacattacttttgtgatggactatagagggaggcgaaaaacaggggaagcctatgtgcaatttgaagaaccagaaatggccaaccaagccctgttgaaacacagggaagaaattggtaatcgatacatcgagatatttccaagcagaaggaatgaagttcgaacacatgtcggttcttataagggaaagaaaatcgcatcttttcctactgctaagtatataactgagccagaaatggtctttgaagaacatgaagtaaatgaggatattcaacccatgacagcttttgaaagtgagaaggaaatagaattgcctaaggaggtgccagaaaagcttccagaggctgctgattttggaactacgtcttctctgcattttgtccacatgagaggattacctttccaagccaatgcccaagacattataaacttttttgctccactcaagcctgttagaatcaccatggaatacagctccagtgggaaggccactggagaagctgatgtgcactttgagacccatgaggatgctgttgcagcgatgctcaaggatcggtcccacgttcatcataggtatattgaactgttcctgaattcatgtccaaaaggaaaataagactctaggggctccagataataagggtgaagcaagaagcatttcatttgcacatctttcttggacttgggatatacagttccagtttattagcagcaactgctagggaaatgattttggtgttttgggttaattgcttctaagaaaagtttcatagtggactgtttagaagaagaaatgaaagatccagtttgggattatgaaataaaccacaaattaaaatttttgtttaaactgtccaggatctgatttaaaaatatggtctttgttttatatgattaaatggtttgttttcatagatgatatgttactcattgtaaagaccacatatttttattcagcagtgttctttaaacggtttcatttaaaaagtaactttttttttttgcctgtgaattgagtgctctgatgtaaaacttctcatggagtgaaacagtgatttattttaaccaaacattcaccaaagcaaagaacggtttcagacctttgaactggtatggtttggcagaatagttttaaattttgctgtatttgattacttagagataggaatttttaaaaatcaaaacaaaaaa

SEQ ID NO: 12798 - DNA, 1765 bp, Homo sapiens
  source 1..1765: mol_type = unassigned DNA
acccgcccccgtccaccctgtgctcctattgggccctggaacaagggaagctctcccaggcgtcgggtcttctgcttgttttgttctcgcctcgagtctctggtcggttgggcagtgtaagtgtggctggggtgaatgttgaggccttgttccccgcctggcccatggagtccaaaactacttacctggaagaccttccaccaccccctgagtatgaattggccccgtccaagttagaagaggaagtggatgatgtctttctcattcgagctcaaggactgccctggtcatgcactatggaagatgtgcttaactttttttcagactgcagaatccgcaacggtgagaatggaatacattttctcctaaacagagatgggaaacgaaggggtgatgccttaattgaaatggagtcagagcaggatgtgcagaaagccttagagaagcaccgcatgtacatgggccagcggtatgtggaagtatatgagataaacaatgaagatgtggatgccttaatgaagagcttgcaggtcaaatcttcgcctgtggtaaatgatggtgtggttcgtttgagaggacttccttatagttgcaatgagaaagacattgtagacttctttgcaggactgaatatagttgacattacttttgtgatggactatagagggaggcgaaaaacaggggaagcctatgtgcaatttgaagaaccagaaatggccaaccaagccctgttgaaacacagggaagaaattggtaatcgatacatcgagatatttccaagcagaaggaatgaagttcgaacacatgtcggttcttataagggaaagaaaatcgcatcttttcctactgctaagtatataactgagccagaaatggtctttgaagaacatgaagtaaatgaggatattcaacccatgacagcttttgaaagtgagaaggaaatagaattgcctaaggaggtgccagaaaagcttccagaggctgctgattttggaactacgtcttctctgcattttgtccacatgagaggattacctttccaagccaatgcccaagacattataaacttttttgctccactcaagcctgttagaatcaccatggaatacagctccagtgggaaggccactggagaagctgatgtgcactttgagacccatgaggatgctgttgcagcgatgctcaaggatcggtcccacgttcatcataggtatattgaactgttcctgaattcatgtccaaaaggaaaataagactctaggggctccagataataagggtgaagcaagaagcatttcatttgcacatctttcttggacttgggatatacagttccagtttattagcagcaactgctagggaaatgattttggtgttttgggttaattgcttctaagaaaagtttcatagtggactgtttagaagaagaaatgaaagatccagtttgggattatgaaataaaccacaaattaaaatttttgtttaaactgtccaggatctgatttaaaaatatggtctttgttttatatgattaaatggtttgttttcatagatgatatgttactcattgtaaagaccacatatttttattcagcagtgttctttaaacggtttcatttaaaaagtaactttttttttttgcctgtgaattgagtgctctgatgtaaaacttctcatggagtgaaacagtgatttattttaaccaaacattcaccaaagcaaagaacggtttcagacctttgaactggtatggtttggcagaata

SEQ ID NO: 12799 - DNA, 2656 bp, Homo sapiens
  source 1..2656: mol_type = unassigned DNA
acttccgttccaccatcgctgctggagcagctgccttcaggccctgcgccgcctccggagtccatggccggcacgcgctgggtactcggggcgctgctccggggctgcggctgtaactgcagcagctgccggcgcaccggcgccgcctgcctgcccttctactccgccgctggctctatcccggcggccgccgtcccgacgcgcagctacagccaggagtccaaaactacttacctggaagaccttccaccaccccctgagtatgaattggccccgtccaagttagaagaggaagtggatgatgtctttctcattcgagctcaaggactgccctggtcatgcactatggaagatgtgcttaactttttttcagactgcagaatccgcaacggtgagaatggaatacattttctcctaaacagagatgggaaacgaaggggtgatgccttaattgaaatggagtcagagcaggatgtgcagaaagccttagagaagcaccgcatgtacatgggccagcggtatgtggaagtatatgagataaacaatgaagatgtggatgccttaatgaagagcttgcaggtcaaatcttcgcctgtggtaaatgatggtgtggttcgtttgagaggacttccttatagttgcaatgagaaagacattgtagacttctttgcaggactgaatatagttgacattacttttgtgatggactatagagggaggcgaaaaacaggggaagcctatgtgcaatttgaagaaccagaaatggccaaccaagccctgttgaaacacagggaagaaattggtaatcgatacatcgagatatttccaagcagaaggaatgaagttcgaacacatgtcggttcttataagggaaagaaaatcgcatcttttcctactgctaagtatataactgagccagaaatggtctttgaagaacatgaagtaaatgaggatattcaacccatgacagcttttgaaagtgagaaggaaatagaattgcctaaggaggtgccagaaaagcttccagaggctgctgattttggaactacgtcttctctgcattttgtccacatgagaggattacctttccaagccaatgcccaagacattataaacttttttgctccactcaagcctgttagaatcaccatggaatacagctccagtgggaaggccactggagaagctgatgtgcactttgagacccatgaggatgctgttgcagcgatgctcaaggatcggtcccacgttcatcataggtatattgaactgttcctgaattcatgtccaaaaggaaaataagactctaggggctccagataataagggtgaagcaagaagcatttcatttgcacatctttcttggacttgggatatacagttccagtttattagcagcaactgctagggaaatgattttggtgttttgggttaattgcttctaagaaaagtttcatagtggactgtttagaagaagaaatgaaagatccagtttgggattatgaaataaaccacaaattaaaatttttgtttaaactgtccaggatctgatttaaaaatatggtctttgttttatatgattaaatggtttgttttcatagatgatatgttactcattgtaaagaccacatatttttattcagcagtgttctttaaacggtttcatttaaaaagtaactttttttttttgcctgtgaattgagtgctctgatgtaaaacttctcatggagtgaaacagtgatttattttaaccaaacattcaccaaagcaaagaacggtttcagacctttgaactggtatggtttggcagaatagttttaaattttgctgtatttgattacttagagataggaatttttaaaaatcaaaacaaaaaataccacagcttagtgtaaatgacaatttggcggttttatgtctttagaaatgttttgcctttctaagccttgtgctaaaggcgtataacggtggtgcctatctacttaagggggcattctagtcttaacttaaaagttgtctaaactgtccctccctggctttttttggtttggggtagacctaagggtgtttgttagtctcaaaactgtgaagtgacatgtcagaacagtccagactggtaagaaaattaatggcttcacttgaatttaaaccagctctagataggaaaaaaatcagtctcctcatttgctttttaaatggagtagtacatcccatattttagaacaagtaggggtgccttgcttaaataaaaatagcatttaatgtataattgtgtgaagggtttatggataaagctgtacttctgtcacaatgtggcagtactttctgctttaatattaaacagcttgttatttaaatattggacaaaatggctggcttcaaaatatagtcattaataaactaactttatgtgcacctgtgtaggagaatcaaaatcctgtatgctttctttgccttgttcctgttctcagggtgacgactgccaccaggagatgcagttctagttcttaaaattaaatttgcccaggtttctgacaggtgatacctggaagagagactatgtcttctcttacttaatacataaccatctttgattaccagctaagatgcgaaatcactgtactgtagtcaataaatgaagacttgtttcaggctg

SEQ ID NO: 12800 - DNA, 1738 bp, Homo sapiens
  source 1..1738: mol_type = unassigned DNA
attgggccctggaacaagggaagctctcccaggcgtcgggtcttctgcttgttttgttctcgcctcgagtctctggtcggttgggcagtgtaagtgtggctggggtgaatgttgaggccttgttccccgcctggcccatggagtccaaaactacttacctggaagaccttccaccaccccctgagtatgaattggccccgtccaagttagaagaggaagtggatgatgtctttctcattcgagctcaaggactgccctggtcatgcactatggaagatgtgcttaactttttttcagactgcagaatccgcaacggtgagaatggaatacattttctcctaaacagagatgggaaacgaaggggtgatgccttaattgaaatggagtcagagcaggatgtgcagaaagccttagagaagcaccgcatgtacatgggccagcggtatgtggaagtatatgagataaacaatgaagatgtggatgccttaatgaagagcttgcaggtcaaatcttcgcctgtggtaaatgatggtgtggttcgtttgagaggacttccttatagttgcaatgagaaagacattgtagacttctttgcaggactgaatatagttgacattacttttgtgatggactatagagggaggcgaaaaacaggggaagcctatgtgcaatttgaagaaccagaaatggccaaccaagccctgttgaaacacagggaagaaattggtaatcgatacatcgagatatttccaagcagaaggaatgaagttcgaacacatgtcggttcttataagggaaagaaaatcgcatcttttcctactgctaagtatataactgagccagaaatggtctttgaagaacatgaagtaaatgaggatattcaacccatgacagcttttgaaagtgagaaggaaatagaattgcctaaggaggtgccagaaaagcttccagaggctgctgattttggaactacgtcttctctgcattttgtccacatgagaggattacctttccaagccaatgcccaagacattataaacttttttgctccactcaagcctgttagaatcaccatggaatacagctccagtgggaaggccactggagaagctgatgtgcactttgagacccatgaggatgctgttgcagcgatgctcaaggatcggtcccacgttcatcataggtatattgaactgttcctgaattcatgtccaaaaggaaaataagactctaggggctccagataataagggtgaagcaagaagcatttcatttgcacatctttcttggacttgggatatacagttccagtttattagcagcaactgctagggaaatgattttggtgttttgggttaattgcttctaagaaaagtttcatagtggactgtttagaagaagaaatgaaagatccagtttgggattatgaaataaaccacaaattaaaatttttgtttaaactgtccaggatctgatttaaaaatatggtctttgttttatatgattaaatggtttgttttcatagatgatatgttactcattgtaaagaccacatatttttattcagcagtgttctttaaacggtttcatttaaaaagtaactttttttttttgcctgtgaattgagtgctctgatgtaaaacttctcatggagtgaaacagtgatttattttaaccaaacattcaccaaagcaaagaacggtttcagacctttgaactggtatggtttggcagaata

SEQ ID NO: 12801 - DNA, 2361 bp, Homo sapiens
  source 1..2361: mol_type = unassigned DNA
gtcccgcgtcgcccccgcgcagggcgggccccgcacgcttattctgcccgggaggaacgccggcgtccagcccgctaccgaccgccgctgcgggatgctgcgctccacgtccacggtcaccctgctctcgggcggcgccgccaggacgcccggggcgcccagcaggagggcaaatgtttgcagactacggctgaccgtacctcctgagagtccagttcctgagcaatgtgaaaagaagattgagagaaaagagcagcttcttgacctgagcaatggagaacctaccaggaaacttcctcagggtgttgtttatggtgtggtgcgaagatcagatcaaaatcagcagaaagaaatggtggtgtatgggtggtccaccagtcagctgaaagaagagatgaactacatcaaagatgtgagagccactttggaaaaggtgagaaagcgaatgtatggagactatgatgagatgagacagaagattcgacagctcacccaggaactatcagtttcccatgctcagcaggagtatctggagaatcacatccaaacccagtcgtctgccctggatcgttttaatgccatgaactcagccttggcatcagattccattggcctgcaaaaaaccctcgtggatgtgactttggaaaacagcaacattaaggatcaaatcagaaatctgcagcagacgtatgaagcatccatggacaagctgagggaaaagcagaggcagttggaggtagcgcaagttgaaaaccagctgctaaaaatgaaggtggaatcgtcccaagaagccaatgctgaggtgatgcgagagatgaccaagaagctgtacagccagtatgaggagaagctgcaggaagaacagaggaagcacagtgctgagaaggaggctcttttggaagaaaccaatagttttctgaaagcgattgaagaagccaataaaaagatgcaagcagcagagatcagcctagaggagaaagaccagaggatcggggagctggacaggctgattgagcgcatggaaaaggaacgtcatcaactgcaacttcaactcctagaacatgaaacagaaatgtctggggagttaactgattctgacaaggaaaggtatcagcagttggaggaggcatcagccagcctccgtgagcggatcagacacctagatgacatggtgcattgccagcagaagaaagtcaagcagatggtcgaggagattgaatcattaaagaaaaagttgcaacagaaacagctcttaatactgcagcttttagaaaagatatctttcttagaaggagagaataatgaactacaaagcaggttggactatttaacagaaacccaggccaagactgaagtggaaaccagagagataggagtgggctgtgatcttctacccagccaaacaggcaggactcgtgaaattgtgatgccttctaggaactacaccccatacacaagagtcctggagttaaccatgaagaaaactctgacttaggcactcagaggcatacactttttacagatggacaaaagctctggaaccctgtggcttcaaatcctttgggaagggtgactgttgtttcccctacacacagtgtaagccggaatgggaatcgctgaggctctgatccacttctaagacaggaaggaaagtgaaggcagagtgagcaggtaagagagggatatacaaggtcacatttcagacacccactcggcataccctgccgtactgcatcatcatttgttttctttgtagacactgaaatcctatcaggaggattccttcacaatgtattttatttgctagactttggttgggagggaaaaggacattaatttgaagtttcatgttattcatgccaggattgtttgatagagcatgaaggttttgtttacccataaaagtattagaggcagcgtttctctgatacagagaggcctgtccacaagaagcatgggcacccagccaaacttgaacctggaagggagggttcccggcctgcaggtgctctttcctcttggtcccaagcatctgtgcagggtcgtgggagccacactgagagacttgtgtgggccagacaagcttcattctgatgcgctagtcccttggtttaatttgtgccttatgctttcattggaccagctgaaatcactgtatttattcaactagtgatttttttttctttctcactttaacttaaagagaattttatatgtcttggaaatttaataatttagtgttctcagtatcaattggtgtttttgttaaacgaatgaatcatctgttcatgcatgctctactttgatattataacctatgtcacatgtgtttaataaataccatatattttgttctactaa

SEQ ID NO: 12802 - DNA, 1313 bp, Homo sapiens
  source 1..1313: mol_type = unassigned DNA
gctgaggctgcaagtagccggcgccgtcccgcgtcgcccccgcgcagggcgggccccgcacgcttattctgcccgggaggaacgccggcgtccagcccgctaccgaccgccgctgcgggatgctgcgctccacgtccacggtcaccctgctctcgggcggcgccgccaggacgcccggggcgcccagcaggagggcaaatgtttgcagactacggctgaccgtacctcctgagagtccagttcctgagcaatgtgaaaagaagattgagagaaaagagcagcttcttgacctgagcaatggagaacctaccaggaaacttcctcagggtgttgtttatggtgtggtgcgaagatcagatcaaaatcagcagaaagaaatggtggtgtatgggtggtccaccagtcagctgaaagaagagatgaactacatcaaagataaaaccctcgtggatgtgactttggaaaacagcaacattaaggatcaaatcagaaatctgcagcagacgtatgaagcatccatggacaagctgagggaaaagcagaggcagttggaggtagcgcaagttgaaaaccagctgctaaaaatgaaggtggaatcgtcccaagaagccaatgctgaggtgatgcgagagatgaccaagaagctgtacagccagtatgaggagaagctgcaggaagaacagaggaagcacagtgctgagaaggaggctcttttggaagaaaccaatagttttctgaaagcgattgaagaagccaataaaaagatgcaagcagcagagatcagcctagaggagaaagaccagaggatcggggagctggacaggctgattgagcgcatggaaaaggaacgtcatcaactgcaacttcaactcctagaacatgaaacagaaatgtctggggagttaactgattctgacaaggaaaggtatcagcagttggaggaggcatcagccagcctccgtgagcggatcagacacctagatgacatggtgcattgccagcagaagaaagtcaagcagatggtcgaggagattgaatcattaaagaaaaagttgcaacagaaacagctcttaatactgcagcttttagaaaagatatctttcttagaaggagagaataatgaactacaaagcaggttggactatttaacagaaacccaggccaagactgaagtggaaaccagagagataggagtgggctgtgatcttctacccagccaaacaggcaggactcgtgaaattgtgatgccttctaggaactacaccccatacacaagagtcctggagttaaccatgaagaaaactctgacttag

SEQ ID NO: 12803 - DNA, 1367 bp, Homo sapiens
  source 1..1367: mol_type = unassigned DNA
gctgaggctgcaagtagccggcgccgtcccgcgtcgcccccgcgcagggcgggccccgcacgcttattctgcccgggaggaacgccggcgtccagcccgctaccgaccgccgctgcgggatgctgcgctccacgtccacggtcaccctgctctcgggcggcgccgccaggacgcccggggcgcccagcaggagggcaaatgtttgcagactacggctgaccgtacctcctgagagtccagttcctgagcaatgtgaaaagaagattgagagaaaagagcagcttcttgacctgagcaatggagaacctaccaggaaacttcctcagggtgttgtttatggtgtggtgcgaagatcagatcaaaatcagcagaaagaaatggtggtgtatgggtggtccaccagtcagctgaaagaagagatgaactacatcaaagatgtttcccatgctcagcaggagtatctggagaatcacatccaaacccagtcgtctgccctggatcgttttaatgccatgaactcagccttggcatcagattccattggcctgcaaaaaaccctcgtggatgtgactttggaaaacagcaacattaaggatcaaatcagaaatctgcagcagacgtatgaagcatccatggacaagctgagggaaaagcagaggcagttggaggtagcgcaagttgaaaaccagctgctaaaaatgaaggtggaatcgtcccaagaagccaatgctgaggtgatgcgagagatgaccaagaagctgtacagccagtatgaggagaagctgcaggaagaacagaggaagcacagtgctgagaaggaggctcttttggaagaaaccaatagttttctgaaagcgattgaagaagccaataaaaagatgcaagcagcagagatcagcctagaggagaaagaccagaggatcggggagctggacaggctgattgagcgcatggaaaaggaacgtcatcaactgcaacttcaactcctagaacatgaaacagaaatgtctggggagttaactgattctgacaaggaaaggtatcagcagttggaggaggcatcagccagcctccgtgagcggatcagacacctagatgacatggtgcattgccagcagaagaaagtcaagcagatggtcgaggagaataatgaactacaaagcaggttggactatttaacagaaacccaggccaagactgaagtggaaaccagagagataggagtgggctgtgatcttctacccaggcaaagtagaaaattcgaaaaggtcctcaacgagtttgtacagctgctcccactccctcatcacctcttgtgggcctttggaaatgtatgttggaggagacattttggattgttgcaatga

SEQ ID NO: 12804 - DNA, 2181 bp, Homo sapiens
  source 1..2181: mol_type = unassigned DNA
ggatgctgcgctccacgtccacggtcaccctgctctcgggcggcgccgccaggacgcccggggcgcccagcaggagggcaaatgtttgcagactacggctgaccgtacctcctgagagtccagttcctgagcaatgtgaaaagaagattgagagaaaagagcagcttcttgacctgagcaatggagaacctaccaggaaacttcctcagggtgttgtttatggtgtggtgcgaagatcagatcaaaatcagcagaaagaaatggtggtgtatgggtggtccaccagtcagctgaaagaagagatgaactacatcaaagatgtgagagccactttggaaaaggtgagaaagcgaatgtatggagactatgatgagatgagacagaagattcgacagctcacccaggaactatcagtttcccatgctcagcaggagtatctggagaatcacatccaaacccagtcgtctgccctggatcgttttaatgccatgaactcagccttggcatcagattccattggcctgcaaaaaaccctcgtggatgtgactttggaaaacagcaacattaaggatcaaatcagaaatctgcagcagacgtatgaagcatccatggacaagctgagggaaaagcagaggcagttggaggtagcgcaagttgaaaaccagctgctaaaaatgaaggtggaatcgtcccaagaagccaatgctgaggtgatgcgagagatgaccaagaagctgtacagccagtatgaggagaagctgcaggaagaacagaggaagcacagtgctgagaaggaggctcttttggaagaaaccaatagttttctgaaagcgattgaagaagccaataaaaagatgcaagcagcagagatcagcctagaggagaaagaccagaggatcggggagctggacaggctgattgagcgcatggaaaaggaacgtcatcaactgcaacttcaactcctagaacatgaaacagaaatgtctggggagttaactgattctgacaaggaaaggtatcagcagttggaggaggcatcagccagcctccgtgagcggatcagacacctagatgacatggtgcattgccagcagaagaaagtcaagcagatggtcgaggagaataatgaactacaaagcaggttggactatttaacagaaacccaggccaagactgaagtggaaaccagagagataggagtgggctgtgatcttctacccagccaaacaggcaggactcgtgaaattgtgatgccttctaggaactacaccccatacacaagagtcctggagttaaccatgaagaaaactctgacttaggcactcagaggcatacactttttacagatggacaaaagctctggaaccctgtggcttcaaatcctttgggaagggtgactgttgtttcccctacacacagtgtaagccggaatgggaatcgctgaggctctgatccacttctaagacaggaaggaaagtgaaggcagagtgagcaggtaagagagggatatacaaggtcacatttcagacacccactcggcataccctgccgtactgcatcatcatttgttttctttgtagacactgaaatcctatcaggaggattccttcacaatgtattttatttgctagactttggttgggagggaaaaggacattaatttgaagtttcatgttattcatgccaggattgtttgatagagcatgaaggttttgtttacccataaaagtattagaggcagcgtttctctgatacagagaggcctgtccacaagaagcatgggcacccagccaaacttgaacctggaagggagggttcccggcctgcaggtgctctttcctcttggtcccaagcatctgtgcagggtcgtgggagccacactgagagacttgtgtgggccagacaagcttcattctgatgcgctagtcccttggtttaatttgtgccttatgctttcattggaccagctgaaatcactgtatttattcaactagtgatttttttttctttctcactttaacttaaagagaattttatatgtcttggaaatttaataatttagtgttctcagtatcaattggtgtttttgttaaacgaatgaatcatctgttcatgcatgctctactttgatattataacctatgtcacatgtgtttaataaataccatatattttgttcta

SEQ ID NO: 12805 - DNA, 1516 bp, Homo sapiens
  source 1..1516: mol_type = unassigned DNA
ggatgctgcgctccacgtccacggtcaccctgctctcgggcggcgccgccaggacgcccggggcgcccagcaggagggcaaatgtttgcagactacggctgaccgtacctcctgagagtccagttcctgagcaatgtgaaaagaagattgagagaaaagagcagcttcttgacctgagcaatggagaacctaccaggaaacttcctcagggtgttgtttatggtgtggtgcgaagatcagatcaaaatcagcagaaagaaatggtggtgtatgggtggtccaccagtcagctgaaagaagagatgaactacatcaaagatgtgagagccactttggaaaaggtgagaaagcgaatgtatggagactatgatgagatgagacagaagattcgacagctcacccaggaactatcagtttcccatgctcagcaggagtatctggagaatcacatccaaacccagtcgtctgccctggatcgttttaatgccatgaactcagccttggcatcagattccattggcctgcaaaaaaccctcgtggatgtgactttggaaaacagcaacattaaggatcaaatcagaaatctgcagcagacgtatgaagcatccatggacaagctgagggaaaagcagaggcagttggaggtagcgcaagttgaaaaccagctgctaaaaatgaaggtggaatcgtcccaagaagccaatgctgaggtgatgcgagagatgaccaagaagctgtacagccagtatgaggagaagctgcaggaagaacagaggaagcacagtgctgagaaggaggctcttttggaagaaaccaatagttttctgaaagcgattgaagaagccaataaaaagatgcaagcagcagagatcagcctagaggagaaagaccagaggatcggggagctggacaggctgattgagcgcatggaaaaggaacgtcatcaactgcaacttcaactcctagaacatgaaacagaaatgtctggggagttaactgattctgacaaggaaaggtatcagcagttggaggaggcatcagccagcctccgtgagcggatcagacacctagatgacatggtgcattgccagcagaagaaagtcaagcagatggtcgaggagattgaatcattaaagaaaaagttgcaacagaaacagctcttaatactgcagcttttagaaaagatatctttcttagaaggagagaataatgaactacaaagcaggttggactatttaacagaaacccaggccaagactgaagtggaaaccagagagataggagtgggctgtgatcttctacccaggagatgcaagcaaagctcgcagcgcaaaaattagctgaaagactgaatattaaaatgcggagttataatccagaaggggagtcttcagggagataccgagaagtaagggatgaagatgacgattggtcctctgatgaattctgaagataatctcctaaatcactgacgttgagatgtcatcatcttacatcagactttctaactagtatc

SEQ ID NO: 12806 - DNA, 1846 bp, Homo sapiens
  source 1..1846: mol_type = unassigned DNA
gcggtgcagctgaggctgcaagtagccggcgccgtcccgcgtcgcccccgcgcagggcgggccccgcacgcttattctgcccgggaggaacgccggcgtccagcccgctaccgaccgccgctgcgggatgctgcgctccacgtccacggtcaccctgctctcgggcggcgccgccaggacgcccggggcgcccagcaggagggcaaatgtttgcagactacggctgaccgtacctcctgagagtccagttcctgagcaatgtgaaaagaagattgagagaaaagagcagcttcttgacctgagcaatggagaacctaccaggaaacttcctcagggtgttgtttatggtgtggtgcgaagatcagatcaaaatcagcagaaagaaatggtggtgtatgggtggtccaccagtcagctgaaagaagagatgaactacatcaaagatgtgagagccactttggaaaaggtgagaaagcgaatgtatggagactatgatgagatgagacagaagattcgacagctcacccaggaactatcagtttcccatgctcagcaggagtatctggagaatcacatccaaacccagtcgtctgccctggatcgttttaatgccatgaactcagccttggcatcagattccattggcctgcaaaaaaccctcgtggatgtgactttggaaaacagcaacattaaggatcaaatcagaaatctgcagcagacgtatgaagcatccatggacaagctgagggaaaagcagaggcagttggaggtagcgcaagttgaaaaccagctgctaaaaatgaaggtggaatcgtcccaagaagccaatgctgaggtgatgcgagagatgaccaagaagctgtacagccagtatgaggagaagctgcaggaagaacagaggaagcacagtgctgagaaggaggctcttttggaagaaaccaatagttttctgaaagcgattgaagaagccaataaaaagatgcaagcagcagagatcagcctagaggagaaagaccagaggatcggggagctggacaggctgattgagcgcatggaaaaggaacgtcatcaactgcaacttcaactcctagaacatgaaacagaaatgtctggggagttaactgattctgacaaggaaaggtatcagcagttggaggaggcatcagccagcctccgtgagcggatcagacacctagatgacatggtgcattgccagcagaagaaagtcaagcagatggtcgaggagattgaatcattaaagaaaaagttgcaacagaaacagctcttaatactgcagcttttagaaaagatatctttcttagaaggagagaataatgaactacaaagcaggttggactatttaacagaaacccaggccaagactgaagtggaaaccagagagataggagtgggctgtgatcttctacccaggttaccttttcgacaaaatgattcatctagtcattgccagaagagtgggtctcctatttcctcagaagagcggcggcgcagggataagcagcatcttgatgacatcacagcagctcggcttctaccacttcaccatatgcccacgcagctgctctccatagaagaatccttggcacttcagaaacagcagaaacagaattatgaggagatgcaagcaaagctcgcagcgcaaaaattagctgaaagactgaatattaaaatgcggagttataatccagaaggggagtcttcagggagataccgagaagtaagggatgaagatgacgattggtcctctgatgaattctgaagataatctcctaaatcactgacgttgagatgtcatcatcttacatcagactttctaactagtatc

SEQ ID NO: 12807 - DNA, 1427 bp, Homo sapiens
  source 1..1427: mol_type = unassigned DNA
gctgaggctgcaagtagccggcgccgtcccgcgtcgcccccgcgcagggcgggccccgcacgcttattctgcccgggaggaacgccggcgtccagcccgctaccgaccgccgctgcgggatgctgcgctccacgtccacggtcaccctgctctcgggcggcgccgccaggacgcccggggcgcccagcaggagggcaaatgtttgcagactacggctgaccgtacctcctgagagtccagttcctgagcaatgtgaaaagaagattgagagaaaagagcagcttcttgacctgagcaatggagaacctaccaggaaacttcctcagggtgttgtttatggtgtggtgcgaagatcagatcaaaatcagcagaaagaaatggtggtgtatgggtggtccaccagtcagctgaaagaagagatgaactacatcaaagatgtttcccatgctcagcaggagtatctggagaatcacatccaaacccagtcgtctgccctggatcgttttaatgccatgaactcagccttggcatcagattccattggcctgcaaaaaaccctcgtggatgtgactttggaaaacagcaacattaaggatcaaatcagaaatctgcagcagacgtatgaagcatccatggacaagctgagggaaaagcagaggcagttggaggtagcgcaagttgaaaaccagctgctaaaaatgaaggtggaatcgtcccaagaagccaatgctgaggtgatgcgagagatgaccaagaagctgtacagccagtatgaggagaagctgcaggaagaacagaggaagcacagtgctgagaaggaggctcttttggaagaaaccaatagttttctgaaagcgattgaagaagccaataaaaagatgcaagcagcagagatcagcctagaggagaaagaccagaggatcggggagctggacaggctgattgagcgcatggaaaaggaacgtcatcaactgcaacttcaactcctagaacatgaaacagaaatgtctggggagttaactgattctgacaaggaaaggtatcagcagttggaggaggcatcagccagcctccgtgagcggatcagacacctagatgacatggtgcattgccagcagaagaaagtcaagcagatggtcgaggagattgaatcattaaagaaaaagttgcaacagaaacagctcttaatactgcagcttttagaaaagatatctttcttagaaggagagaataatgaactacaaagcaggttggactatttaacagaaacccaggccaagactgaagtggaaaccagagagataggagtgggctgtgatcttctacccagccaaacaggcaggactcgtgaaattgtgatgccttctaggaactacaccccatacacaagagtcctggagttaaccatgaagaaaactctgacttag

SEQ ID NO: 12808 - DNA, 2601 bp, Homo sapiens
  source 1..2601: mol_type = unassigned DNA
ggatgctgcgctccacgtccacggtcaccctgctctcgggcggcgccgccaggacgcccggggcgcccagcaggagggcaaatgtttgcagactacggctgaccgtacctcctgagagtccagttcctgagcaatgtgaaaagaagattgagagaaaagagcagcttcttgacctgagcaatggagaacctaccaggaaacttcctcagggtgttgtttatggtgtggtgcgaagatcagatcaaaatcagcagaaagaaatggtggtgtatgggtggtccaccagtcagctgaaagaagagatgaactacatcaaagatgtgagagccactttggaaaaggtgagaaagcgaatgtatggagactatgatgagatgagacagaagattcgacagctcacccaggaactatcagtttcccatgctcagcaggagtatctggagaatcacatccaaacccagtcgtctgccctggatcgttttaatgccatgaactcagccttggcatcagattccattggcctgcaaaaaaccctcgtggatgtgactttggaaaacagcaacattaaggatcaaatcagaaatctgcagcagacgtatgaagcatccatggacaagctgagggaaaagcagaggcagttggaggtagcgcaagttgaaaaccagctgctaaaaatgaaggtggaatcgtcccaagaagccaatgctgaggtgatgcgagagatgaccaagaagctgtacagccagtatgaggagaagctgcaggaagaacagaggaagcacagtgctgagaaggaggctcttttggaagaaaccaatagttttctgaaagcgattgaagaagccaataaaaagatgcaagcagcagagatcagcctagaggagaaagaccagaggatcggggagctggacaggctgattgagcgcatggaaaaggaacgtcatcaactgcaacttcaactcctagaacatgaaacagaaatgtctggggagttaactgattctgacaaggaaaggtatcagcagttggaggaggcatcagccagcctccgtgagcggatcagacacctagatgacatggtgcattgccagcagaagaaagtcaagcagatggtcgaggagattgaatcattaaagaaaaagttgcaacagaaacagctcttaatactgcagcttttagaaaagatatctttcttagaaggagagaataatgaactacaaagcaggttggactatttaacagaaacccaggccaagactgaagtggaaaccagagagataggagtgggctgtgatcttctacccagccaaacaggcaggactcgtgaaattgtgatgccttctaggaactacaccccatacacaagagtcctggagttaaccatgaagaaaactctgacttaggcactcagaggcatacactttttacagatggacaaaagctctggaaccctgtggcttcaaatcctttgggaagggtgactgttgtttcccctacacacagtgtaagccggaatgggaatcgctgaggctctgatccacttctaagacaggaaggaaagtgaaggcagagtgagcaggcaaagtagaaaattcgaaaaggtcctcaacgagtttgtacagctgctcccactccctcatcacctcttgtgggcctttggaaatgtatgttggaggagacattttggattgttgcaatgacttgggagtgccatagcacctagcaggcagaagccagaaacaccaaatgtcttaacaatgcttgaggcggtgctacaaatgaagtccttctccaaatgcattgagccccaagaaaaatcgctgattctgaggaaccttccaactttaacaatttcaggacgtccctaagctgagctaggaggcaccacgcacaggccggaggcaccacgcacaggccagagtctcccaaatcctgtcccgcactctctcccaccttattaatggccagctcatctttcaagtttcgacttgaaccacttctcagagatatcttcccaggtgcccatcccaacgttactattatatcataatttgattctccctccccccatccccccgccaactctgtaaaccccaagtataacacaggacgttgctatttgttgactgacacatagtgcttggtgaggtcacgctggcgctgaatactttttgtataaaccgacgaacagctgatgaccgcatgaatgctcacacaaggggaaagggcgccaagccaaggagccggcgtcatccgacgtaacttccgccctttaacgctcctgcggacgcccccttctcccagtccgtgtttgtttccggaatttcaataaagctcgattcggctcgaagaagaccccgttcttccgggaaaatggcgactcccgctcgtgccccggagtcaccgccgtccgcggatccggcgctagtagcggggcctgccgaggaagccgagtgcccgccgccgcgccagcctcagcccgcgcagaatgtgctcgctgccccgcggcttcgagccccaagctcccgaggacttggcgcagcggagtttggtggagctgcgggaaatgttgaagcgccaggagagacttttgcgcaacga

SEQ ID NO: 12809 - DNA, 2300 bp, Homo sapiens
  source 1..2300: mol_type = unassigned DNA
gctgaggctgcaagtagccggcgccgtcccgcgtcgcccccgcgcagggcgggccccgcacgcttattctgcccgggaggaacgccggcgtccagcccgctaccgaccgccgctgcgggatgctgcgctccacgtccacggtcaccctgctctcgggcggcgccgccaggacgcccggggcgcccagcaggagggcaaatgtttgcagactacggctgaccgtacctcctgagagtccagttcctgagcaatgtgaaaagaagattgagagaaaagagcagcttcttgacctgagcaatggagaacctaccaggaaacttcctcagggtgttgtttatggtgtggtgcgaagatcagatcaaaatcagcagaaagaaatggtggtgtatgggtggtccaccagtcagctgaaagaagagatgaactacatcaaagatgtgagagccactttggaaaaggtgagaaagcgaatgtatggagactatgatgagatgagacagaagattcgacagctcacccaggaactatcagtttcccatgctcagcaggagtatctggagaatcacatccaaacccagtcgtctgccctggatcgttttaatgccatgaactcagccttggcatcagattccattggcctgcaaaaaaccctcgtggatgtgactttggaaaacagcaacattaaggatcaaatcagaaatctgcagcagacgtatgaagcatccatggacaagctgagggaaaagcagaggcagttggaggtagcgcaagttgaaaaccagctgctaaaaatgaaggtggaatcgtcccaagaagccaatgctgaggtgatgcgagagatgaccaagaagctgtacagccagtatgaggagaagctgcaggaagaacagaggaagcacagtgctgagaaggaggctcttttggaagaaaccaatagttttctgaaagcgattgaagaagccaataaaaagatgcaagcagcagagatcagcctagaggagaaagaccagaggatcggggagctggacaggctgattgagcgcatggaaaaggaacgtcatcaactgcaacttcaactcctagaacatgaaacagaaatgtctggggagttaactgattctgacaaggaaaggtatcagcagttggaggaggcatcagccagcctccgtgagcggatcagacacctagatgacatggtgcattgccagcagaagaaagtcaagcagatggtcgaggagaataatgaactacaaagcaggttggactatttaacagaaacccaggccaagactgaagtggaaaccagagagataggagtgggctgtgatcttctacccagccaaacaggcaggactcgtgaaattgtgatgccttctaggaactacaccccatacacaagagtcctggagttaaccatgaagaaaactctgacttaggcactcagaggcatacactttttacagatggacaaaagctctggaaccctgtggcttcaaatcctttgggaagggtgactgttgtttcccctacacacagtgtaagccggaatgggaatcgctgaggctctgatccacttctaagacaggaaggaaagtgaaggcagagtgagcaggtaagagagggatatacaaggtcacatttcagacacccactcggcataccctgccgtactgcatcatcatttgttttctttgtagacactgaaatcctatcaggaggattccttcacaatgtattttatttgctagactttggttgggagggaaaaggacattaatttgaagtttcatgttattcatgccaggattgtttgatagagcatgaaggttttgtttacccataaaagtattagaggcagcgtttctctgatacagagaggcctgtccacaagaagcatgggcacccagccaaacttgaacctggaagggagggttcccggcctgcaggtgctctttcctcttggtcccaagcatctgtgcagggtcgtgggagccacactgagagacttgtgtgggccagacaagcttcattctgatgcgctagtcccttggtttaatttgtgccttatgctttcattggaccagctgaaatcactgtatttattcaactagtgatttttttttctttctcactttaacttaaagagaattttatatgtcttggaaatttaataatttagtgttctcagtatcaattggtgtttttgttaaacgaatgaatcatctgttcatgcatgctctactttgatattataacctatgtcacatgtgtttaataaataccatatattttgttctact

SEQ ID NO: 12810 - DNA, 2384 bp, Homo sapiens
  source 1..2384: mol_type = unassigned DNA
gctgaggctgcaagtagccggcgccgtcccgcgtcgcccccgcgcagggcgggccccgcacgcttattctgcccgggaggaacgccggcgtccagcccgctaccgaccgccgctgcgggatgctgcgctccacgtccacggtcaccctgctctcgggcggcgccgccaggacgcccggggcgcccagcaggagggcaaatgtttgcagactacggctgaccgtacctcctgagagtccagttcctgagcaatgtgaaaagaagattgagagaaaagagcagcttcttgacctgagcaatggagaacctaccaggaaacttcctcagggtgttgtttatggtgtggtgcgaagatcagatcaaaatcagcagaaagaaatggtggtgtatgggtggtccaccagtcagctgaaagaagagatgaactacatcaaagatgtgagagccactttggaaaaggtgagaaagcgaatgtatggagactatgatgagatgagacagaagattcgacagctcacccaggaactatcagtttcccatgctcagcaggagtatctggagaatcacatccaaacccagtcgtctgccctggatcgttttaatgccatgaactcagccttggcatcagattccattggcctgcaaaaaaccctcgtggatgtgactttggaaaacagcaacattaaggatcaaatcagaaatctgcagcagacgtatgaagcatccatggacaagctgagggaaaagcagaggcagttggaggtagcgcaagttgaaaaccagctgctaaaaatgaaggtggaatcgtcccaagaagccaatgctgaggtgatgcgagagatgaccaagaagctgtacagccagtatgaggagaagctgcaggaagaacagaggaagcacagtgctgagaaggaggctcttttggaagaaaccaatagttttctgaaagcgattgaagaagccaataaaaagatgcaagcagcagagatcagcctagaggagaaagaccagaggatcggggagctggacaggctgattgagcgcatggaaaaggaacgtcatcaactgcaacttcaactcctagaacatgaaacagaaatgtctggggagttaactgattctgacaaggaaaggtatcagcagttggaggaggcatcagccagcctccgtgagcggatcagacacctagatgacatggtgcattgccagcagaagaaagtcaagcagatggtcgaggagattgaatcattaaagaaaaagttgcaacagaaacagctcttaatactgcagcttttagaaaagatatctttcttagaaggagagaataatgaactacaaagcaggttggactatttaacagaaacccaggccaagactgaagtggaaaccagagagataggagtgggctgtgatcttctacccagccaaacaggcaggactcgtgaaattgtgatgccttctaggaactacaccccatacacaagagtcctggagttaaccatgaagaaaactctgacttaggcactcagaggcatacactttttacagatggacaaaagctctggaaccctgtggcttcaaatcctttgggaagggtgactgttgtttcccctacacacagtgtaagccggaatgggaatcgctgaggctctgatccacttctaagacaggaaggaaagtgaaggcagagtgagcaggtaagagagggatatacaaggtcacatttcagacacccactcggcataccctgccgtactgcatcatcatttgttttctttgtagacactgaaatcctatcaggaggattccttcacaatgtattttatttgctagactttggttgggagggaaaaggacattaatttgaagtttcatgttattcatgccaggattgtttgatagagcatgaaggttttgtttacccataaaagtattagaggcagcgtttctctgatacagagaggcctgtccacaagaagcatgggcacccagccaaacttgaacctggaagggagggttcccggcctgcaggtgctctttcctcttggtcccaagcatctgtgcagggtcgtgggagccacactgagagacttgtgtgggccagacaagcttcattctgatgcgctagtcccttggtttaatttgtgccttatgctttcattggaccagctgaaatcactgtatttattcaactagtgatttttttttctttctcactttaacttaaagagaattttatatgtcttggaaatttaataatttagtgttctcagtatcaattggtgtttttgttaaacgaatgaatcatctgttcatgcatgctctactttgatattataacctatgtcacatgtgtttaataaataccatatattttgttctact

SEQ ID NO: 12811 - DNA, 4149 bp, Homo sapiens
  source 1..4149: mol_type = unassigned DNA
acggaagcgccgttgtcggcaggcagctttagttaggatgtcgtgatgggaccgagctcagcgtaaccctctggccgacgtgggccgagggggccggcccgggctgctgtggcccagacgagcggagagtgcggagcggcttctgggccagcgctaacgagccctggcagtgcgcacctctggtgccagtgtcgccccgcctccggggtagaatccgccccagccctccgggcctgggaccgggcggccgctttcgccagtccgtccggccgttccgcattaggtccgggataactaggtggagtaggtgtgcggcccgccgccggacagcccgctcgctgtttctttaagcccccgcctgcgtcttcacggccctctcccgttctgctggaaagctgacgtggggcaatccgttcagaccctccatggagaagtttgggatgaatttcgggggcggcccgagcaagaaggacttgctggagactatagagacccagaagaagcagcttctccagtaccaggcacggctcaaggatgtggtccgtgcctataaaagcctgctgaaggagaaagaggcattagaggccagcatcaaggtgctgtcggtatcccacgaggcagatgtgggcctcgcaggtgtccagcttccaggcctcacctttcctgactctgtggatgaccggtgctccactcacagcgaggatagcactgggaccgccactagcttggatactgcggccagtctcaccagcaccaagggtgagtttggggtagaagatgacagaccggcccgtggaccaccacctccaaagtccgaagaggccagttggtccgagagtggcgttagcagtagcagtggggatgggccatttgcaggtggggaggtggacaaaagactgcaccagctgaagactcagttggctactttgaccagttctttggctacagtcactcaggagaagtcccgcatggaggcttcttacttggctgacaagaaaaagatgaaacaggacttagaggatgccagtaacaaggcggaggaggagagggcccgcctggagggagaattgaaggggctgcaggagcaaatagcagaaaccaaagcccggcttatcacgcagcagcatgatcgggcccaagagcagagtgaccatgccttgatgctgcgtgagctccagaagctgctgcaggaggagaggacccagcgccaggacttggagcttaggttagaagagacccgagaagccttggcaggacgagcatatgcagctgaacagatggaaggatttgaactgcagaccaagcagctgacccgtgaggtggaggagctgaaaagtgaactgcaggccattcgagatgagaagaatcagccagatccccggctgcaagaacttcaggaagaggctgcccgccttaagagccatttccaggctcagttacagcaggaaatgagaaagacagctcttgcagaggatcaactccgtcagcaatctcaggtagaagaacagagggtggcagccctggagaatcaaatatccgaggtgtctgagctgctaggcacctacgagaaagccaagcagaaggaccagctggccattcagaagctgaaggagcgcattctgcagctggacctggagaacaagacactggctctagcagcctccagcaggtcccctttagacagccatggagaggagtccagtctggatgtcaatgtcctgaaagataagatggagaagctgaagaggctgctgcaggttgcggccaggaaaagccaggtgaccctggatgtggagaagctctgtgacctggagataatgcccagctcggaggctgctgatggggagaaggctactgcactctattaccaacaggagctgaaacagctgaaggaagagtttgagaggtacaagatgagagcccaggttgtcctcaaaagcaagaataccaaagatggtaacctgggaaaggagctggaggcagcccaggaacagcttgcagagctgaaggagaagtatatttccctgcggctctcctgcgaggagctggagcaccaacaccagcaggaggctgatgactggaagcaggagctggcccggctgcagcagctccaccggcaggagctggagcggtgccagctggacttcagggaccgcacactgaaactggaggaggagctgcacaagcagcgggatcgtgccctagctgtgctcaccgagaaggacttggaactggagcaactgcgttctgtggccttggcctctgggctgccaggacgcagaagtcctgtgggtggtggcggtcctggggacccagctgacacatcatcctctgatagcctgacccaagcattacaacttgcagcggccaatgagcccactttctttctgtacgctgagcaactggcccgcaaggaggtggagatcacatcactgaggaagcagaagcacaggctggaggtcgaggtgcatcagctgcaggatcggctgctggaggagggcgaacggcatcgtgaggaggttgcagccctgcagagccacatcgaaaagaacatcagggaccagagcagggagggagccaatctggagtacctcaaaaacatcatctaccgcttcctgaccttacctgactccctgggccgccagcagactctcacagccatactgactatcttgcacttcagtccagaggagaaacaagtgataatgcgactcccaaccagtgccagctggtggccttctggcaagagatgatgccattttcatgaattcctggaatttctgtgcctcttttatgtgggaaagggcaggctctggtttctgctgcctcttctcttacattgtcatttatttcttcactgtgttgagctgggaggagtcttcaatgtgggaagggattttctgccaaatgccattaatgctgctttatccttaggccctagagatactgaaagtcctggggcagtatcttctgatggtgtgcatgtgaggagaagatgaggttaggactgagaagtgcagaagttggaacagtggtaaggctgttttaaaataagatgttttgttttaataatatgctcctggcacaaagctaggagtaaatgtgactccaaagggagttcagttaatctctgaaatgcacaaaacctagctattttctccctctcatcacagtctgagtctggtccattgctaccccaattctctggggacataaaaccaggctggaaagggaccaggaagtttgaaatagtgacatatcatccactagtcccaagggctaaggaatagtgagtttattctggaaggaactgggaagcttagtctaattagtgcctggggatgacctatgcaatcacaccgcttatgaccatcctagagagggccctgagcaccagcttgatcttagggatttccaaagtaacctgctttttgcctggatagggttaaaatagacctttcttgcctatccttgccttaacctatctgcctgaggttggcctgagattgtgagtcaacgactttgctatcttttcctcagtgttgaactttcattaagaaataaagtcctagcttcttacagagaggggtccaaatggtgaatgctcatcctgcctggattcaaggaattagctcagagattggcccctagcttttctgcctttgtagggacagcaaaaggggaaaatttgctgcagaaaattccaaaagattgctgtagctctcacagggaagtggtaaagatcagctaaacctgggttggggtgctttctgcccagtgggtcttggcataagtagattaatcctgctcttttaagaaaaggcaacttattcaggcagtctggaaagggggttctcagaaaactcagtttctttattccttcttttctcccaactactgttactggttatagaggtctttggactctaaagaccaatgtttggccactaactggactaatatgtatctttctgtgatttcatcatagaggtctgttttgtgagggtttggggtgcagaaaactttgattaaatcttaatgggaggctgggtgacctggattatctacagtgagcagacttaaatggaacagaagtttatgtgtccaaatgatggaatcattaaacctgagtgacttgacctgtgtggt

SEQ ID NO: 12812 - DNA, 6512 bp, Homo sapiens
  source 1..6512: mol_type = unassigned DNA
gcagcggtggcggcggctggttgcgggccggcggcgggctggcggagatggaggatcttgttcaagatggggtggcttcaccagctacccctgggaccgggaaatctaagctggaaacattgcccaaagaagacctcatcaagtttgccaagaaacagatgatgctaatacagaaagctaaatcaaggtgtacagaattggagaaagaaattgaagaactcagatcaaaacctgttactgaaggaactggtgatattattaaggcattaactgaacgtctggatgctcttcttctggaaaaagcagagactgagcaacagtgtctttctctgaaaaaggaaaatataaaaatgaagcaagaggttgaggattctgtaacaaagatgggagatgcacataaggagttggaacaatcacatataaactatgtgaaagaaattgaaaatttgaaaaatgagttgatggcagtacgttccaaatacagtgaagacaaagctaacttacaaaagcagctggaagaagcaatgaatacgcaattagaactttcagaacaacttaaatttcagaacaactctgaagataatgttaaaaaactacaagaagagattgagaaaattaggccaggctttgaggagcaaattttatatctgcaaaagcaattagacgctaccactgatgaaaagaaggaaacagttactcaactccaaaatatcattgaggctaattctcagcattaccaaaaaaatattaatagtttgcaggaagagcttttacagttgaaagctatacaccaagaagaggtgaaagagttgatgtgccagattgaagcatcagctaaggaacatgaagcagagataaataagttgaacgagctaaaagagaacttagtaaaacaatgtgaggcaagtgaaaagaacatccagaagaaatatgaatgtgagttagaaaatttaaggaaagccacctcaaatgcaaaccaagacaatcagatatgttctattctcttgcaagaaaatacatttgtagaacaagtagtaaatgaaaaagtcaaacacttagaagataccttaaaagaacttgaatctcaacacagtatcttaaaagatgaggtaacttatatgaataatcttaagttaaaacttgaaatggatgctcaacatataaaggatgagttttttcatgaacgggaagacttagagtttaaaattaatgaattattactagctaaagaagaacagggctgtgtaattgaaaaattaaaatctgagctagcaggtttaaataaacagttttgctatactgtagaacagcataacagagaagtacagagtcttaaggaacaacatcaaaaagaaatatcagaactaaatgagacatttttgtcagattcagaaaaagaaaaattaacattaatgtttgaaatacagggtcttaaggaacagtgtgaaaacctacagcaagaaaagcaagaagcaattttaaattatgagagtttacgagagattatggaaattttacaaacagaactgggggaatctgctggaaaaataagtcaagagttcgaatcaatgaagcaacagcaagcatctgatgttcatgaactgcagcagaagctcagaactgcttttactgaaaaagatgcccttctcgaaactgtgaatcgcctccagggagaaaatgaaaagttactatctcaacaagaattggtaccagaacttgaaaataccataaagaaccttcaagaaaagaatggagtatacttacttagtctcagtcaaagagataccatgttaaaagaattagaaggaaagataaattctcttactgaggaaaaagatgattttataaataaactgaaaaattcccatgaagaaatggataatttccataagaaatgtgaaagggaagaaagattgattcttgaacttgggaagaaagtagagcaaacaatccagtacaacagtgaactagaacaaaaggtaaatgaattaacaggaggactagaggagactttaaaagaaaaggatcaaaatgaccaaaaactagaaaaacttatggttcaaatgaaagttctctctgaagacaaagaagtattgtcagctgaagtgaagtctctttatgaggaaaacaataaactcagttcagaaaaaaaacagttgagtagggatttggaggtttttttgtctcaaaaagaagatgttatccttaaagaacatattactcaattagaaaagaaacttcagttaatggttgaagagcaagataatttaaataaactgcttgaaaatgagcaagttcagaagttatttgttaaaactcagttgtatggttttcttaaagaaatgggatcagaagtttcagaagacagtgaagagaaagatgttgttaatgtcctacaggcagtcggtgaatccttggcaaaaataaatgaggaaaaatgcaacctggcttttcagcgtgatgaaaaagtattagagttagaaaaagagattaagtgccttcaagaagagagtgtagttcagtgtgaagaacttaagtctttattgagagactatgagcaagagaaagttctcttaaggaaagagttagaagaaatacagtcagaaaaagaggccctgcagtctgatcttctagaaatgaagaatgctaatgaaaaaacaaggcttgaaaatcagaatcttttaattcaagttgaagaagtatctcaaacatgtagcaaaagtgaaatccataatgaaaaagaaaaatgttttataaaggaacatgaaaacctaaagccactactagaacaaaaagaattacgagataggagagcagagttgatactattaaaggattccttagcaaaatcaccttctgtaaaaaatgatcctctgtcttcagtaaaagagttggaagaaaaaatagaaaatctggaaaaagaatgcaaagaaaaggaggagaaaataaataagataaaattagttgccgtaaaggcaaagaaagaactagattccagcagaaaagagacccagactgtgaaggaagaacttgaatctcttcgatcagaaaaggaccagttatctgcttccatgagagatctcattcaaggagcagaaagctataagaatcttttattagaatatgaaaagcagtcagagcaactggatgtggaaaaagaacgtgctaataattttgagcatcgtattgaagaccttacaagacaattaagaaattcgactttgcagtgtgaaacaataaattctgataatgaagatctcctggctcgtattgagacattacagtctaatgccaaattattagaagtacagattttagaagtccagagagccaaagcaatggtagacaaagaattagaagctgaaaaacttcagaaagaacagaagataaaggaacatgccactactgtaaatgaacttgaagaacttcaggtacaacttcaaaagcaaaagaaacagcttcagaaaaccatgcaagaattagagctggttaaaaaggatgcccaacaaaccacattgatgaatatggaaatagctgattatgaacgtttgatgaaagaactaaatcaaaagttaactaataaaaacaacaagatagaagatttggagcaagaaataaaaattcaaaaacagaaacaagaaaccctacaagaagaaataacttcattacagtcttcagtacaacaatatgaagaaaaaaacaccaaaatcaagcaattgcttgtgaaaaccaaaaaggaactggcagattcaaagcaagcagaaactgatcacttaatacttcaagcatctttaaaaggtgagctggaggcaagccagcagcaagtagaagtctataaaatacagctggctgaaataacatcagagaagcacaaaatccacgagcacctgaaaacctctgcggaacagcaccagcgtacgctaagtgcataccagcagagagtgacagcactacaggaagagtgccgtgctgccaaggcagaacaagctactgtaacctctgaattcgagagctacaaagtccgagttcataatgttctaaaacaacagaaaaataaatctatgtctcaggctgaaactgagggcgctaaacaagaaagggaacatctggaaatgctgattgaccagctaaaaatcaaattacaagatagccaaaataacttacagattaatgtatctgaacttcaaacattgcagtctgaacatgatacactgctagaaaggcacaacaagatgctgcaggaaactgtgtccaaagaggcggaactccgggaaaaattgtgttcaatacagtcagagaacatgatgatgaaatctgaacatacacagactgtgagtcagctaacatcccagaacgaggtccttcgaaatagcttccgagatcaagtgcgacatttgcaggaagaacacagaaagacagtggagacattacagcagcagctctccaagatggaagcacagctcttccagcttaagaatgaaccgaccacaagaagcccagtttcctctcaacaatctttgaagaaccttcgagaaaggagaaacacagacctcccgcttctagacatgcacactgtaacccgggaagagggagaaggcatggagacaactgatacggagtctgtgtcttccgccagcacatacacacagtctttagagcagctgcttaactctcccgaaactaaacttgagcctccattatggcatgctgaatttaccaaagaagaattggttcagaagctcagttccaccacaaaaagtgcagatcacttaaacggcctgcttcgggaaacagaagcaaccaatgcaattcttatggagcaaattaagcttctcaaaagtgaaataagaagattggaaaggaatcaagagcgagagaagtctgcagctaacctggaatacttgaagaacgtcttgctgcagttcattttcttgaaaccaggtagtgaaagagagagacttcttcctgttataaatacgatgttgcagctcagccctgaagaaaagggaaaacttgctgcggttgctcaaggtgaggaagaaaatgcttcccgttcttctggatgggcatcctatcttcatagttggtctggacttcgataggttgatggaaggaatatttttattaaccaaatagaatctatttacaaaaatggttcacgtatattaccacaattcttttgtcaaaaagtgtgtatatatgtttgcatctacatatatttgtacatctatatgacagatgtattttaaaagtttcatcttgaagtaaaagtacaacagcttgaagtgttgatagcaggccacagccctctaactcatgtgatttcccatgcatgctgccagaataaaaccaccaggaatgaattcactccccacttctctggaacctcaggacccgcccatttctcggcagtactgtgaattttgaagttaaactaaattttggtaccataccaactggaatttaggctttaaaaataatgtttcaaggccaggtgtggtgattcatgcctgaaatcccactactttgggaggctgaggctggagaattgcttgaggctagtgagctgtgactcccactgcactccagctcggggaacagagcgagaccttgtctctaaaaataatagtaataaaataaaaataacgttttatgactatttattgcaaggtcagagttacagattgttataaattgttgagaaatttttgtgattagaatatgaaggaaaaagctttgttggtaaaagtgacatgttaaggggctatgaagtaaatatgctgcagttaattatgctaagttaaaatacagtttagttatttgctttaaaataaactcttctttttttctttaaagtatactatctcaaaactcattatgttgtcagagccctagagctggctagtgtaacactgactatgagtaggtgggcccacacttgagttgaggtgatttcatggtgtctttccaggctcttgatagggtgtcactgcatgcaagccatgaatctgttttgagaatcctctccattttcccaaataaaaacctatcacaacagtgactatatcactcagcattggatctaaatataaaagtggtgctttcagtgtttttggcagatagtgttccataagctttccatcagaagggattttagacaccttagaggtccgtgctacatcgtcacagttcctccgaataaccttaggtggtagtgttacttgcctttgacacctctgcatatgttttaatgactagatccaaactgtgttgttcttaaatcaaaaattggataatttgtaatatttatgtgttaatcacacagtatgctctctgaagttctcttaagccttcagtttatactcttaatttaattttctttctgagctggagaactggctttgcactttggttacacagaacattggtttccaattcagtttaactgaaatttgctgctgatatgttgagtttgttctttaaaaaatagctcatatatctcatctttcctc

SEQ ID NO: 12813 - DNA, 2356 bp, Homo sapiens
  source 1..2356: mol_type = unassigned DNA
tgaatacgcaattagaactttcagaacaacttaaatttcagaacaactctgaagataatgttaaaaaactacaagaagagattgagaaaattaggccaggctttgaggagcaaattttatatctgcaaaagcaattagacgctaccactgatgaaaagaaggaaacagttactcaactccaaaatatcattgaggctaattctcagcattaccaaaaaaatattaatagtttgcaggaagagcttttacagttgaaagctatacaccaagaagaggtgaaagagttgatgtgccagattgaagcatcagctaaggaacatgaagcagagataaataagttgaacgagctaaaagagaacttagtaaaacaatgtgaggcaagtgaaaagaacatccagaagaaatatgaatgtgagttagaaaatttaaggaaagccacctcaaatgcaaaccaagacaatcagatatgttctattctcttgcaagaaaatacatttgtagaacaagtagtaaatgaaaaagtcaaacacttagaagataccttaaaagaacttgaatctcaacacagtatcttaaaagatgaggtaacttatatgaataatcttaagttaaaacttgaaatggatgctcaacatataaaggatgagttttttcatgaacgggaagacttagagtttaaaattaatgaattattactagctaaagaagaacagggctgtgtaattgaaaaattaaaatctgagctagcaggtttaaataaacagttttgctatactgtagaacagcataacagagaagtacagagtcttaaggaacaacatcaaaaagaaatatcagaactaaatgagacatttttgtcagattcagaaaaagaaaaattaacattaatgtttgaaatacagggtcttaaggaacagtgtgaaaacctacagcaagaaaagcaagaagcaattttaaattatgagagtttacgagagattatggaaattttacaaacagaactgggggaatctgctggaaaaataagtcaagagttcgaatcaatgaagcaacagcaagcatctgatgttcatgaactgcagcagaagctcagaactgcttttactgaaaaagatgcccttctcgaaactgtgaatcgcctccagggagaaaatgaaaagttactatctcaacaagaattggtaccagaacttgaaaataccataaagaaccttcaagaaaagaatggagtatacttacttagtctcagtcaaagagataccatgttaaaagaattagaaggaaagataaattctcttactgaggaaaaagatgattttataaataaactgaaaaattcccatgaagaaatggataatttccataagaaatgtgaaagggaagaaagattgattcttgaacttgggaagaaagtagagcaaacaatccagtacaacagtgaactagaacaaaaggtaaatgaattaacaggaggactagaggagactttaaaagaaaaggatcaaaatgaccaaaaactagaaaaacttatggttcaaatgaaagttctctctgaagacaaagaagtattgtcagctgaagtgaagtctctttatgaggaaacaataaactcagttcagaaaaaacagttgagtagggatttggaggtttttttgtctcaaaaagaagatgttatccttaaagaacatattactcaattagaaaagaaacttcagttaatggttgaagagcaagataatttaaataaactgcttgaaaatgagcaagttcagaagttatttgttaaaactcagttgtatggttttcttaaagaaatgggatcagaagtttcagaagacagtgaagagaaagatgttgttaatgtcctacaggcagtcggtgaatccttggcaaaaataaatgaggaaaaatgcaacctggcttttcagcgtgatgaaaaagtattagagttagaaaaagagattaagtgccttcaagaagagagtgtagttcagtgtgaagaacttaagtctttattgagagactatgagcaagagaaagttctcttaaggaaagagttagaagaaatacagtcagaaaaagaggccctgcagtctgatcttctagaaatgaagaatgctaatgaaaaaacaaggcttgaaaatcagaatcttttaattcaagttgaagaagtatctcaaacatgtagcaaaagtgaaatccataatgaaaaagaaaaatgttttataaaggaacatgaaaacctaaagccactactagaacaaaaagaattacgagataggagagcagagttgatactattaaaggattccttagcaaaatcaccttctaaaaaatgatcctctgtcttcagtaa

SEQ ID NO: 12814 - DNA, 2057 bp, Homo sapiens
  source 1..2057: mol_type = unassigned DNA
ccttcgggaaagggtggcctcgggccccctactctacagagtctcctcccacggctgcccagttccctggccgactatcttgcctccaccacatcaccatcagtaccgggcggctgcagggcagagctgtccagggacctcctcacagcctccagagtcaagaaatgcctcctcagggaagccctctaccgcatccctgacctgtgagtcacggagctcccgggcaccatgctggccacaaatgcctaaggagccccccggaaccagctgtgggtcccgcaggcactcgcaggctagcggacacctttggaggactgagagacctgtcctgcaatccaatgttcctcactctcacaagattttacagacgtggaaaccgaggcccgaggccccaaggggtaatcggcccgccttcccatgccaataaccggcagtggcgggacccacacctactccgtgacctgcaggcccaggggtcgagccccaggtagaacgtctagacggactccgcccttagcgccgtacggggaaccttctcccggacgcagacacggaagcggaagtgctgccgagctgtagctatggagacgtggggggcgggccgcccggagagcgcgacctttgacctgcagtagagcctacgtcagaggctggcgcaaacagaagtgcagcggtggcggcggctggttgcgggccggcggcgggctggcggagatggaggatcttgttcaagatggggtggcttcaccagctacccctgggaccgggaaatctaagctggaaacattgcccaaagaagacctcatcaagtttgccaagaaacagatgatgctaatacagaaagctaaatcaaggtgtacagaattggagaaagaaattgaagaactcagatcaaaacctgttactgaaggaactggtgatattattaaggcattaactgaacgtctggatgctcttcttctggaaaaagcagagactgagcaacagtgtctttctctgaaaaaggaaaatataaaaatgaagcaagaggttgaggattctgtaacaaagatgggagatgcacataaggagttggaacaatcacatataaactatgtgaaagaaattgaaaatttgaaaaatgagttgatggcagtacgttccaaatacagtgaagacaaagctaacttacaaaagcagctggaagaagcaatgaatacgcaattagaactttcagaacaacttaaatttcagaacaactctgaagataatgttaaaaaactacaagaagagattgagaaaattaggccaggctttgaggagcaaattttatatctgcaaaagcaattagacgctaccactgatgaaaagaaggaaacagttactcaactccaaaatatcattgaggctaattctcagcattaccaaaaaaatattaatagtttgcaggaagagcttttacagttgaaagctatacaccaagaagaggtgaaagagttgatgtgccagattgaagcatcagctaaggaacatgaagcagagataaataagttgaacgagctaaaagagaacttagtaaaacaatgtgaggcaagtgaaaagaacatccagaagaaatatgaatgtgagttagaaaatttaaggaaagccacctcaaatgcaaaccaagacaatcagatatgttctattctcttgcaagaaaatacatttgtagaacaagtagtaaatgaaaaagtcaaacacttagaagataccttaaaagaacttgaatctcaacacagtatcttaaaagatgaggtaacttatatgaataatcttaagttaaaacttgaaatggatgctcaacatataaaggatgagttttttcatgaacgggaagacttagagtttaaaattaatgaattattactagctaaagaagaacagggctgtgtaattgaaaaattaaaatctgagctagcaggtttaaataaacagttttgctatactgtagaacagcataacagagaagtacagagtcttaaggaacaacatcaaaaagaaatatcagaactaaatgagacatttttgtcagattc

SEQ ID NO: 12815 - DNA, 3255 bp, Homo sapiens
  source 1..3255: mol_type = unassigned DNA
gcagaaagctggcgggggggtggggggaggaacatggcgcaagctctgtctgaggaggagtttcagcggatgcaggctcagctcctggaactccggacaaacaactaccagctttcagatgaactacgcaagaatggtgttgaactcaccagtcttcgacagaaggtcgcctacttggataaggagttcagcaaagctcagaaggcactgagcaagagcaagaaagctcaggaagtcgaggtattgctgagtgaaaatgagatgctgcaggcaaagctgcacagccaggaggaggacttccgtttgcagaacagcacactaatggccgagttcagcaaggaacgctatgggaaagaagccgggaagttctcagctgtcagtgagggccagggggatcccccagggggcccggcccccaccgtcctggcccccatgccgttggcagaggtggagctgaaatgggaaatggagaaagaggagaagagattgctctgggaacagctgcaaggcttagagagctcaaagcaggccgaaacatccaggctgcaggaggaacttgctaagctctccgagaaactgaaaaagaaacaagaaagtttttgccgtctgcagacagaaaaggagactctgtttaatgacagcaggaacaagattgaggaattacaacaacggaaggaagctgatcacaaagcccagttggctcgaacccagaagctgcagcaggaacttgaggctgccaatcagagcttggcagagctgagagatcagcggcagggggagcgcctggaacatgcagcagctttgcgggccctacaagatcaggtatccatccagagtgcagatgcacaggaacaagtggaagggcttttggctgagaacaatgccttgaggactagcctggctgccctggagcagatccaaacagcaaagacccaagaactgaatatgctccgggaacagaccactgggctggcagctgagttgcagcagcagcaggctgagtacgaggaccttatgggacagaaagatgacctcaactcccagctccaggagtcattacgggccaatagtcgactgctggaacaacttcaagaaatagggcaggagaaggagcagttgacccaggaattacaggaggctcggaagagtgcggagaagcggaaggccatgctggatgagctagcaatggaaacgctgcaagagaagtcccagcacaaggaagagctgggagcagttcgtctacggcatgagaaggaggtgctgggggtgcgtgcccgctatgagcgtgagctccgagagctgcatgaagacaagaagcgtcaggaggaggagctccgtgggcagatccgggaggagaaggcccggacacgggagctggagactctccagcagacagtggaagaacttcaagctcaggtacattccatggatggagccaagggctggtttgaacggcgcttgaaggaagccgagggcaaggaggaggagctacaggatgtacgggatcagctcgagcaggcccaggaggagcgggactgccacctgaagaccattagcagcctgaagcaggaggtgaaggacacagtggatgggcagaggatcctggagaagaagggcagtgctgcgctcaaggacctcaagcggcagctgcatttggagcggaaacgggcagataagctgcaggagcgactgcaggacatcctcactaacagcaagagccgctcaggccttgaggagctggttctctcagagatgaactcaccaagccggacccagacaggggacagcagtagcatctcctccttcagctaccgggagatcttgcgggaaaaggagagctcggctgttccagccagggtaaggggaaaggaagaacctacagctccagcttctctcaacccaaaaatctgagaacccctccccttttctcctcacctaaacccatctcctactttgggcgcagcacacatattttcttgtcaacttttccccaagcccaccaacttggattcagattgcgacatgcaggacaggccagtcattctctctctctgactttctgtttaatcatctgtgggctaattcccccttctctggtgccataaattatgtggctcatagtaggtgcaccatccaaggagaaggtccctttttccaacttgtaatgatcactaattattattgccggctgtcatgtcagcctccttaccagccactttcctttggaaataacttttttattgttccacaaatagtatgtgctcattgtagtacattttttaaaaaccacaaatgagcaaagatttttttaaaaccttaaatgtctggccgggtgtggtggctcatccctataatcctacactttgggaggccaaggtgggcggatcacttgagctcaggagtttaagaccagcctgggaaatgtggtaaaactccgactctatttaaaaaaaaaacaaaaacaaaaaaaccttaaatgtcaaaaaaaaataatattttcaccatccagacgtcaccattataaattcttagttcagggctgggcgcggtggctcatgcctgtaaccctagcactttgggaggctgaggcgggcagatcacttgaggttaggagtttgagaactggcctggccaacatagcaaaacctcatctctactaaaatacaaaaattagccgggcgtggtggtgcgtgcctgtagtcccagctactcgaaaggttgaggcaagagaatcgcttgaacctgggaggtggaggttgcaatgagccgagatcacaccactgcactccagcctgggcaacagtgaaactccatctcaaaaaataaataaataaaataaattcttagttcatacccttccagaattctctctctttttaaaacctagatgagattaacctgttttttattcaactgttgtctctaccttcccaatttgatcaattttcatgtcattggctgggtgcggtggctcctgcctataatcccagtactttgggaggccgaggcgggcagatcacttgaggtcaggagttcaagaccagcctggccaacatggtgaaaccccatctctactaaaaatacaaaaattagctgggcgtagtggcgcgtgcctgtaattccatctactcgggaggctgaggcaggagaatcgcttgatcctgggagttggaggttgcagtgagccaagatcttgccattgcactccagcctgggcaacaagagtgaaattctgtctcaaaaaaaaaaaaaaaa

SEQ ID NO: 12816 - DNA, 2909 bp, Homo sapiens
  source 1..2909: mol_type = unassigned DNA
ggaacatggcgcaagctctgtctgaggaggagtttcagcggatgcaggctcagctcctggaactccggacaaacaactaccagctttcagatgaactacgcaagaatggtgttgaactcaccagtcttcgacagaaggtcgcctacttggataaggagttcagcaaagctcagaaggcactgagcaagagcaagaaagctcaggaagtcgaggtattgctgagtgaaaatgagatgctgcaggcaaagctgcacagccaggaggaggacttccgtttgcagaacagcacactaatggccgagttcagcaagctctgcagccagatggaacagctggagcaagagaaccagcaactgaaggagggggctgcaggagcaggggttgcccaagctgggcccctcgtggatggggagctgctgaggctacaggctgaaaacacagccttgcagaagaacgtggcagccctgcaggaacgctatgggaaagaagccgggaagttctcagctgtcagtgagggccagggggatcccccagggggcccggcccccaccgtcctggcccccatgccgttggcagaggtggagctgaaatgggaaatggagaaagaggagaagagattgctctgggaacagctgcaaggcttagagagctcaaagcaggccgaaacatccaggctgcaggaggaacttgctaagctctccgagaaactgaaaaagaaacaagaaagtttttgccgtctgcagacagaaaaggagactctgtttaatgacagcaggaacaagattgaggaattacaacaacggaaggaagctgatcacaaagcccagttggctcgaacccagaagctgcagcaggaacttgaggctgccaatcagagcttggcagagctgagagatcagcggcagggggagcgcctggaacatgcagcagctttgcgggccctacaagatcagatccaaacagcaaagacccaagaactgaatatgctccgggaacagaccactgggctggcagctgagttgcagcagcagcaggctgagtacgaggaccttatgggacagaaagatgacctcaactcccagctccaggagtcattacgggccaatagtcgactgctggaacaacttcaagaaatagggcaggagaaggagcagttgacccaggaattacaggaggctcggaagagtgcggagaagcggaaggccatgctggatgagctagcaatggaaacgctgcaagagaagtcccagcacaaggaagagctgggagcagttcgtctacggcatgagaaggaggtgctgggggtgcgtgcccgctatgagcgtgagctccgagagctgcatgaagacaagaagcgtcaggaggaggagctccgtgggcagatccgggaggagaaggcccggacacgggagctggagactctccagcagacagtggaagaacttcaagctcaggtacattccatggatggagccaagggctggtttgaacggcgcttgaaggaagccgaggaatccctgcagcagcagcagcaggaacaagaggaagccctcaagcagtgtcgggagcagcacgctgccgagctgaagggcaaggaggaggagctacaggatgtacgggatcagctcgagcaggcccaggaggagcgggactgccacctgaagaccattagcagcctgaagcaggaggtgaaggacacagtggatgggcagaggatcctggagaagaagggcagtgctgcgctcaaggacctcaagcggcagctgcatttggagcggaaacgggcagataagctgcaggagcgactgcaggacatcctcactaacagcaagagccgctcaggccttgaggagctggttctctcagagatgaactcaccaagccggacccagacaggggacagcagtagcatctcctccttcagctaccgggagatcttgcgggaaaaggagagctcggctgttccagccaggtccttatccagcagccctcaagcccagccccctcggccagcagagctgtcagatgaggaagtggctgagctctttcagcggctggcagagacacagcaggagaaatggatgctggaggagaaggtgaagcacctggaagtgagcagtgcttccatggcagaggacctctgccggaagagcgccatcattgagacctacgtcatggacagccggatcgatgtgtctgtggcagcaggccacacagaccgcagcgggctgggcagcgtcctgagagacctagtgaagccaggcgacgagaaccttcgggagatgaacaagaagctgcagaacatgctggaggagcagctcaccaagaatatgcacttgcacaaggatatggaagttctgtcccaggaaattgtgcggctcagcaaggagtgcgtggggcctcctgacccagacctagagccaggagaaaccagctaaagacctgcaggctgcacccacctcctccccttcctaccccctaggatgctattcccttgggctgtggtggaaaaatgagggctggagccaaaatcaaatagcttgggagactggacattaaaggggctagaggcctgatggttagtgttaatgatcctgtcttagggcagaggccaccagggagtggggatcctgagggaaggggcagggatttctccttcttcttggtcctggctcccaagggcttctgtcttcatctctgcatgagctctccttcccagagaccaactcttttttattttattttattttattttttaatttatgtctggagcctggctactctgcatttgggattggggatgctgggtgggtgtgtggtccatgttcagcgttctagcaacacgtgtgtgtgtgtgtgtgtaaaggctatgcagccaaaataccatctggccagacgggcccacccac

SEQ ID NO: 12817 - DNA, 3032 bp, Homo sapiens
  source 1..3032: mol_type = unassigned DNA
gcgcagaaagctggcgggggggtggggggaggaacatggcgcaagctctgtctgaggaggagtttcagcggatgcaggctcagctcctggaactccggacaaacaactaccagctttcagatgaactacgcaagaatggtgttgaactcaccagtcttcgacagaaggtcgcctacttggataaggagttcagcaaagctcagaaggcactgagcaagagcaagaaagctcaggaagtcgaggtattgctgagtgaaaatgagatgctgcaggcaaagctgcacagccaggaggaggacttccgtttgcagaacagcacactaatggccgagttcagcaagctctgcagccagatggaacagctggagcaagagaaccagcaactgaaggagggggctgcaggagcaggggttgcccaagctgggcccctcgtggatggggagctgctgaggctacaggctgaaaacacagccttgcagaagaacgtggcagccctgcaggaacgctatgggaaagaagccgggaagttctcagctgtcagtgagggccagggggatcccccagggggcccggcccccaccgtcctggcccccatgccgttggcagaggtggagctgaaatgggaaatggagaaagaggagaagagattgctctgggaacagctgcaaggcttagagagctcaaagcaggccgaaacatccaggctgcaggaggaacttgctaagctctccgagaaactgaaaaagaaacaagaaagtttttgccgtctgcagacagaaaaggagactctgtttaatgacagcaggaacaagattgaggaattacaacaacggaaggaagctgatcacaaagcccagttggctcgaacccagaagctgcagcaggaacttgaggctgccaatcagagcttggcagagctgagagatcagcggcagggggagcgcctggaacatgcagcagctttgcgggccctacaagatcaggtatccatccagagtgcagatgcacaggaacaagtggaagggcttttggctgagaacaatgccttgaggactagcctggctgccctggagcagatccaaacagcaaagacccaagaactgaatatgctccgggaacagaccactgggctggcagctgagttgcagcagcagcaggctgagtacgaggaccttatgggacagaaagatgacctcaactcccagctccaggagtcattacgggccaatagtcgactgctggaacaacttcaagaaatagggcaggagaaggagcagttgacccaggaattacaggaggctcggaagagtgcggagaagcggaaggccatgctggatgagctagcaatggaaacgctgcaagagaagtcccagcacaaggaagagctgggagcagttcgtctacggcatgagaaggaggtgctgggggtgcgtgcccgctatgagcgtgagctccgagagctgcatgaagacaagaagcgtcaggaggaggagctccgtgggcagatccgggaggagaaggcccggacacgggagctggagactctccagcagacagtggaagaacttcaagctcaggtacattccatggatggagccaagggctggtttgaacggcgcttgaaggaagccgaggaatccctgcagcagcagcagcaggaacaagaggaagccctcaagcagtgtcgggagcagcacgctgccgagctgaagggcaaggaggaggagctacaggatgtacgggatcagctcgagcaggcccaggaggagcgggactgccacctgaagaccattagcagcctgaagcaggaggtgaaggacacagtggatgggcagaggatcctggagaagaagggcagtgctgcgctcaaggacctcaagcggcagctgcatttggagcggaaacgggcagataagctgcaggagcgactgcaggacatcctcactaacagcaagagccgctcaggccttgaggagctggttctctcagagatgaactcaccaagccggacccagacaggggacagcagtagcatctcctccttcagctaccgggagatcttgcgggaaaaggagagctcggctgttccagccaggtccttatccagcagccctcaagcccagccccctcggccagcagagctgtcagatgaggaagtggctgagctctttcagcggctggcagagacacagcaggagaaatggatgctggaggagaaggtgaagcacctggaagtgagcagtgcttccatggcagaggacctctgccggaagagcgccatcattgagacctacgtcatggacagccggatcgatgtgtctgtggcagcaggccacacagaccgcagcgggctgggcagcgtcctgagagacctagtgaagccaggcgacgagaaccttcgggagatgaacaagaagctgcagaacatgctggaggagcagctcaccaagaatatgcacttgcacaaggatatggaagttctgtcccaggaaattgtgcggctcagcaaggagtgcgtggggcctcctgacccagacctagagccaggagaaaccagctaaagacctgcaggctgcacccacctcctccccttcctaccccctaggatgctattcccttgggctgtggtggaaaaatgagggctggagccaaaatcaaatagcttgggagactggacattaaaggggctagaggcctgatggttagtgttaatgatcctgtcttagggcagaggccaccagggagtggggatcctgagggaaggggcagggatttctccttcttcttggtcctggctcccaagggcttctgtcttcatctctgcatgagctctccttcccagagaccaactcttttttattttattttattttattttttaatttatgtctggagcctggctactctgcatttgggattggggatgctgggtgggtgtgtggtccatgttcagcgttctagcaacacgtgtgtgtgtgtgtgtgtaaaggctatgcagccaaaataccatctggccagacgggcccacccac

SEQ ID NO: 12818 - DNA, 2882 bp, Homo sapiens
  source 1..2882: mol_type = unassigned DNA
gggggggtggggggaggaacatggcgcaagctctgtctgaggaggagtttcagcggatgcaggctcagctcctggaactccggacaaacaactaccagctttcagatgaactacgcaagaatggtgttgaactcaccagtcttcgacagaaggtcgcctacttggataaggagttcagcaaagctcagaagctctgcagccagatggaacagctggagcaagagaaccagcaactgaaggagggggctgcaggagcaggggttgcccaagctgggcccctcgtggatggggagctgctgaggctacaggctgaaaacacagccttgcagaagaacgtggcagccctgcaggaacgctatgggaaagaagccgggaagttctcagctgtcagtgagggccagggggatcccccagggggcccggcccccaccgtcctggcccccatgccgttggcagaggtggagctgaaatgggaaatggagaaagaggagaagagattgctctgggaacagctgcaaggcttagagagctcaaagcaggccgaaacatccaggctgcaggaggaacttgctaagctctccgagaaactgaaaaagaaacaagaaagtttttgccgtctgcagacagaaaaggagactctgtttaatgacagcaggaacaagattgaggaattacaacaacggaaggaagctgatcacaaagcccagttggctcgaacccagaagctgcagcaggaacttgaggctgccaatcagagcttggcagagctgagagatcagcggcagggggagcgcctggaacatgcagcagctttgcgggccctacaagatcaggtatccatccagagtgcagatgcacaggaacaagtggaagggcttttggctgagaacaatgccttgaggactagcctggctgccctggagcagatccaaacagcaaagacccaagaactgaatatgctccgggaacagaccactgggctggcagctgagttgcagcagcagcaggctgagtacgaggaccttatgggacagaaagatgacctcaactcccagctccaggagtcattacgggccaatagtcgactgctggaacaacttcaagaaatagggcaggagaaggagcagttgacccaggaattacaggaggctcggaagagtgcggagaagcggaaggccatgctggatgagctagcaatggaaacgctgcaagagaagtcccagcacaaggaagagctgggagcagttcgtctacggcatgagaaggaggtgctgggggtgcgtgcccgctatgagcgtgagctccgagagctgcatgaagacaagaagcgtcaggaggaggagctccgtgggcagatccgggaggagaaggcccggacacgggagctggagactctccagcagacagtggaagaacttcaagctcaggtacattccatggatggagccaagggctggtttgaacggcgcttgaaggaagccgaggaatccctgcagcagcagcagcaggaacaagaggaagccctcaagcagtgtcgggagcagcacgctgccgagctgaagggcaaggaggaggagctacaggatgtacgggatcagctcgagcaggcccaggaggagcgggactgccacctgaagaccattagcagcctgaagcaggaggtgaaggacacagtggatgggcagaggatcctggagaagaagggcagtgctgcgctcaaggacctcaagcggcagctgcatttggagcggaaacgggcagataagctgcaggagcgactgcaggacatcctcactaacagcaagagccgctcaggccttgaggagctggttctctcagagatgaactcaccaagccggacccagacaggggacagcagtagcatctcctccttcagctaccgggagatcttgcgggaaaaggagagctcggctgttccagccaggtccttatccagcagccctcaagcccagccccctcggccagcagagctgtcagatgaggaagtggctgagctctttcagcggctggcagagacacagcaggagaaatggatgctggaggagaaggtgaagcacctggaagtgagcagtgcttccatggcagaggacctctgccggaagagcgccatcattgagacctacgtcatggacagccggatcgatgtgtctgtggcagcaggccacacagaccgcagcgggctgggcagcgtcctgagagacctagtgaagccaggcgacgagaaccttcgggagatgaacaagaagctgcagaacatgctggaggagcagctcaccaagaatatgcacttgcacaaggatatggaagttctgtcccaggaaattgtgcggctcagcaaggagtgcgtggggcctcctgacccagacctagagccaggagaaaccagctaaagacctgcaggctgcacccacctcctccccttcctaccccctaggatgctattcccttgggctgtggtggaaaaatgagggctggagccaaaatcaaatagcttgggagactggacattaaaggggctagaggcctgatggttagtgttaatgatcctgtcttagggcagaggccaccagggagtggggatcctgagggaaggggcagggatttctccttcttcttggtcctggctcccaagggcttctgtcttcatctctgcatgagctctccttcccagagaccaactcttttttattttattttattttattttttaatttatgtctggagcctggctactctgcatttgggattggggatgctgggtgggtgtgtggtccatgttcagcgttctagcaacacgtgtgtgtgtgtgtgtgtaaaggctatgcagccaaaataccatctggccagacgggcccacccac

SEQ ID NO: 12819 - DNA, 2939 bp, Homo sapiens
  source 1..2939: mol_type = unassigned DNA
gcgcagaaagctggcgggggggtggggggaggaacatggcgcaagctctgtctgaggaggagtttcagcggatgcaggctcagctcctggaactccggacaaacaactaccagctttcagatgaactacgcaagaatggtgttgaactcaccagtcttcgacagaaggtcgcctacttggataaggagttcagcaaagctcagaagagtcctggcccttgtctgccactgcaggaagtcgaggtattgctgagtgaaaatgagatgctgcaggcaaagctgcacagccaggaggaggacttccgtttgcagaacagcacactaatggccgagttcagcaagctctgcagccagatggaacagctggagcaagagaaccagcaactgaaggagggggctgcaggagcaggggttgcccaagctgggcccctcgtggatggggagctgctgaggctacaggctgaaaacacagccttgcagaagaacgtggcagccctgcaggaacgctatgggaaagaagccgggaagttctcagctgtcagtgagggccagggggatcccccagggggcccggcccccaccgtcctggcccccatgccgttggcagaggtggagctgaaatgggaaatggagaaagaggagaagagattgctctgggaacagctgcaaggcttagagagctcaaagcaggccgaaacatccaggctgcaggaggaacttgctaagctctccgagaaactgaaaaagaaacaagaaagtttttgccgtctgcagacagaaaaggagactctgtttaatgacagcaggaacaagattgaggaattacaacaacggaaggaagctgatcacaaagcccagttggctcgaacccagaagctgcagcaggaacttgaggctgccaatcagagcttggcagagctgagagatcagcggcagggggagcgcctggaacatgcagcagctttgcgggccctacaagatcagatccaaacagcaaagacccaagaactgaatatgctccgggaacagaccactgggctggcagctgagttgcagcagcagcaggctgagtacgaggaccttatgggacagaaagatgacctcaactcccagctccaggagtcattacgggccaatagtcgactgctggaacaacttcaagaaatagggcaggagaaggagcagttgacccaggaattacaggaggctcggaagagtgcggagaagcggaaggccatgctggatgagctagcaatggaaacgctgcaagagaagtcccagcacaaggaagagctgggagcagttcgtctacggcatgagaaggaggtgctgggggtgcgtgcccgctatgagcgtgagctccgagagctgcatgaagacaagaagcgtcaggaggaggagctccgtgggcagatccgggaggagaaggcccggacacgggagctggagactctccagcagacagtggaagaacttcaagctcaggtacattccatggatggagccaagggctggtttgaacggcgcttgaaggaagccgaggaatccctgcagcagcagcagcaggaacaagaggaagccctcaagcagtgtcgggagcagcacgctgccgagctgaagggcaaggaggaggagctacaggatgtacgggatcagctcgagcaggcccaggaggagcgggactgccacctgaagaccattagcagcctgaagcaggaggtgaaggacacagtggatgggcagaggatcctggagaagaagggcagtgctgcgctcaaggacctcaagcggcagctgcatttggagcggaaacgggcagataagctgcaggagcgactgcaggacatcctcactaacagcaagagccgctcaggccttgaggagctggttctctcagagatgaactcaccaagccggacccagacaggggacagcagtagcatctcctccttcagctaccgggagatcttgcgggaaaaggagagctcggctgttccagccaggtccttatccagcagccctcaagcccagccccctcggccagcagagctgtcagatgaggaagtggctgagctctttcagcggctggcagagacacagcaggagaaatggatgctggaggagaaggtgaagcacctggaagtgagcagtgcttccatggcagaggacctctgccggaagagcgccatcattgagacctacgtcatggacagccggatcgatgtgtctgtggcagcaggccacacagaccgcagcgggctgggcagcgtcctgagagacctagtgaagccaggcgacgagaaccttcgggagatgaacaagaagctgcagaacatgctggaggagcagctcaccaagaatatgcacttgcacaaggatatggaagttctgtcccaggaaattgtgcggctcagcaaggagtgcgtggggcctcctgacccagacctagagccaggagaaaccagctaaagacctgcaggctgcacccacctcctccccttcctaccccctaggatgctattcccttgggctgtggtggaaaaatgagggctggagccaaaatcaaatagcttgggagactggacattaaaggggctagaggcctgatggttagtgttaatgatcctgtcttagggcagaggccaccagggagtggggatcctgagggaaggggcagggatttctccttcttcttggtcctggctcccaagggcttctgtcttcatctctgcatgagctctccttcccagagaccaactcttttttattttattttattttattttttaatttatgtctggagcctggctactctgcatttgggattggggatgctgggtgggtgtgtggtccatgttcagcgttctagcaacacgtgtgtgtgtgtgtgtgtaaaggctatgcagccaaaataccatctggccagacgggcccacccac

SEQ ID NO: 12820 - DNA, 1972 bp, Homo sapiens
  source 1..1972: mol_type = unassigned DNA
atattaagtaaactttagtgaggaacagcagtggaaaataatctatataccttggctcttttgcagtttgacaaagttaatgattaaaatctcctagattttccactacagtatccccagggtgtctatttaccttgattgatattattttatctcttttgggccaaagataacagccccttgcttctgtgtttaataataattctgtgttgcttctgagattaataattgattaattcatagtcaggaatctttgtaaaaaggaaaccaattacttttggctaccacttttacatggtcacctacaggagagaggaggtgctgcaagactctctggtagaaaaatgaagagggtcctggtactactgcttgctgtggcatttggacatgctttagagagaggccgggattatgaaaagaataaagtctgcaaggaattctcccatctgggaaaggaggacttcacatctctgtcactagtcctgtacagtagaaaatttcccagtggcacgtttgaacaggtcagccaacttgtgaaggaagttgtctccttgaccgaagcctgctgtgcggaaggggctgaccctgactgctatgacaccaggacctcagcactgtctgccaagtcctgtgaaagtaattctccattccccgttcacccaggcactgctgagtgctgcaccaaagagggcctggaacgaaagctctgcatggctgctctgaaacaccagccacaggaattccctacctacgtggaacccacaaatgatgaaatctgtgaggcgttcaggaaagatccaaaggaatatgctaatcaatttatgtgggaatattccactaattacggacaagctcctctgtcacttttagtcagttacaccaagagttatctttctatggtagggtcctgctgtacctctgcaagcccaactgtatgctttttgaaagagagactccagcttaaacatttatcacttctcaccactctgtcaaatagagtctgctcacaatatgctgcttatggggagaagaaatcaaggctcagcaatctcataaagttagcccaaaaagtgcctactgctgatctggaggatgttttgccactagctgaagatattactaacatcctctccaaatgctgtgagtctgcctctgaagattgcatggccaaagagctgcctgaacacacagtaaaactctgtgacaatttatccacaaagaattctaagtttgaagactgttgtcaagaaaaaacagccatggacgtttttgtgtgcacttacttcatgccagctgcccaactccccgagcttccagatgtagagttgcccacaaacaaagatgtgtgtgatccaggaaacaccaaagtcatggataagtatacatttgaactaagcagaaggactcatcttccggaagtattcctcagtaaggtacttgagccaaccctaaaaagccttggtgaatgctgtgatgttgaagactcaactacctgttttaatgctaagggccctctactaaagaaggaactatcttctttcattgacaagggacaagaactatgtgcagattattcagaaaatacatttactgagtacaagaaaaaactggcagagcgactaaaagcaaaattgcctgatgccacacccacggaactggcaaagctggttaacaagcactcagactttgcctccaactgctgttccataaactcacctcctctttactgtgattcagagattgatgctgaattgaagaatatcctgtagtcctgaagcatgtttattaactttgaccagagttggagccacccaggggaatgatctctgatgacctaacctaagcaaaaccactgagcttctgggaagacaactaggatactttctactttttctagctacaatatcttcatacaatgacaagtatgatgatttgctatcaaaataaattgaaatataatgcaaaccataaa

SEQ ID NO: 12821 - DNA, 562 bp, Homo sapiens
  source 1..562: mol_type = unassigned DNA
atcaaaattcgtagaaaataatctgagtgtgtctttttgaatgaactaatcagaagatgacgaaatacagttgaataaaagggatacagaagagagaggaggtgctgcaagactctctggtagaaaaatgaagagggtcctggtactactgcttgctgtggcatttggacatgctttagagagaggccgggattatgaaaagaataaagtctgcaaggaattctcccatctgggaaaggaggacttcacatctctgtcactagtcctgtacagtagaaaatttcccagtggcacgtttgaacaggtcagccaacttgtgaaggaagttgtctccttgaccgaagcctgctgtgcggaaggggctgaccctgactgctatgacaccaggacctcagcactgtctgccaagtcctgtgaaagtaattctccattccccgttcacccaggcactgctgagtgctgcaccaaagagggcctggaacgaaagctctgcatggctgctctgaaacaccagccacaggaattccctacctacgtggaacccacaaatgatgaaatctgt

SEQ ID NO: 12822 - DNA, 1777 bp, Homo sapiens
  source 1..1777: mol_type = unassigned DNA
actgttttttcaaagagattgcttactccaccaggagaatgatatctacctattctaccactggtgatgatctggactagtccaactggtaggaaatgctgtggtcttggagtgaggagagaggaggtgctgcaagactctctggtagaaaaatgaagagggtcctggtactactgcttgctgtggcatttggacatgctttagagagaggccgggattatgaaaagaataaagtctgcaaggaattctcccatctgggaaaggaggacttcacatctctgtcactagtcctgtacagtagaaaatttcccagtggcacgtttgaacaggtcagccaacttgtgaaggaagttgtctccttgaccgaagcctgctgtgcggaaggggctgaccctgactgctatgacaccaggacctcagcactgtctgccaagtcctgtgaaagtaattctccattccccgttcacccaggcactgctgagtgctgcaccaaagagggcctggaacgaaagctctgcatggctgctctgaaacaccagccacaggaattccctacctacgtggaacccacaaatgatgaaatctgtgaggcgttcaggaaagatccaaaggaatatgctaatcaatttatgtgggaatattccactaattacggacaagctcctctgtcacttttagtcagttacaccaagagttatctttctatggtagggtcctgctgtacctctgcaagcccaactgtatgctttttgaaagagagactccagcttaaacatttatcacttctcaccactctgtcaaatagagtctgctcacaatatgctgcttatggggagaagaaatcaaggctcagcaatctcataaagttagcccaaaaagtgcctactgctgatctggaggatgttttgccactagctgaagatattactaacatcctctccaaatgctgtgagtctgcctctgaagattgcatggccaaagagctgcctgaacacacagtaaaactctgtgacaatttatccacaaagaattctaagtttgaagactgttgtcaagaaaaaacagccatggacgtttttgtgtgcacttacttcatgccagctgcccaactccccgagcttccagatgtagagttgcccacaaacaaagatgtgtgtgatccaggaaacaccaaagtcatggataagtatacatttgaactaagcagaaggactcatcttccggaagtattcctcagtaaggtacttgagccaaccctaaaaagccttggtgaatgctgtgatgttgaagactcaactacctgttttaatgctaagggccctctactaaagaaggaactatcttctttcattgacaagggacaagaactatgtgcagattattcagaaaatacatttactgagtacaagaaaaaactggcagagcgactaaaagcaaaattgcctgatgccacacccacggaactggcaaagctggttaacaagcactcagactttgcctccaactgctgttccataaactcacctcctctttactgtgattcagagattgatgctgaattgaagaatatcctgtagtcctgaagcatgtttattaactttgaccagagttggagccacccaggggaatgatctctgatgacctaacctaagcaaaaccactgagcttctgggaagacaactaggatactttctactttttctagctacaatatcttcatacaatgacaagtatgatgatttgctatcaaaataaattgaaatataatgcaaaccat

SEQ ID NO: 12823 - DNA, 743 bp, Homo sapiens
  source 1..743: mol_type = unassigned DNA
ctgtgaggaccccgcacagccaagatggcggcgtccgtgcgacaggcacgcagcctactaggtgtggcggcgaccctggccccgggttcccgtggctaccgggcgcggccgcccccgcgccgcaggccgggaccccggtggccagaccccgaggacctcctgaccccgcggtggcagctgggaccgcgctacgcggctaagcagttcgcgcgttacggcgccgcctccggggtggtccccggttcgttatggccgtcgccggagcagctgcgggagctggaggccgaagaacgcgaatggtacccgagcctggcgaccatgcaggagtcgctgcgggtgaagcagctggccgaagagcagaagcgtcgggagagggagcagcacatcgcagagtgcatggccaagatgccacagatgattgtgaactggcagcagcagcagcgggagaactgggagaaggcccaggctgacaaggagaggagggcccgactgcaggctgaggcccaggagctcctgggctaccaggtggacccaaggagtgcccgcttccaggagctgctccaggacctagagaagaaggagcgcaagcgcctcaaggaggaaaaacagaaacggaagaaggaggcgcgagctgctgcattggctgcagctgtggctcaagacccagcagcctctggggcacccagctcctgaggctttgtcccttcccaataaagcctgctacctggcagtacccctgaaga

SEQ ID NO: 12824 - DNA, 2826 bp, Homo sapiens
  source 1..2826: mol_type = unassigned DNA
agcagccggcacggggacagccggccgcacaacggatctgcaggcgcggagcaaaatgcacccgccgcgccgcgcggtcctgcagccccgccacggccccgcggcccgcacccccccggggcgacagtgagcctctcccgccaccaccgggggccgagcggagggctctcgggtgggagagcgggaccagatctcgacagctgttcatttccaggaagccaccgcagccagagcgaaaggggaccttctgccaccagcggggcatcagccagcggcgcgcatggatttatgaagacactcatgcaagaagtgggcaggacttggacaaacttttccaccggctccgcgtccgccgctccccgcgcctcgtctcctttcccctcctctcccggcggccgccgctgcccgcgatggtggccgcgctgctgggcggcggcggcgaggcccgcggggggacagtgccgggcgcctggctgtgcctgatggcgctgctgcagctgctgggctcggcgccgcggggatcggggctggcgcacggccgccgcctcatctgctggcaggcgctgctgcagtgccagggggagccggagtgcagctacgcctacaaccagtacgccgaggcgtgcgcgccggtgctggcgcagcacggcgggggcgacgcgcccggggccgccgccgccgctttcccggcctcggccgcctctttctcgtcgcgctggcgctgcccgagtcactgcatctcggccctcattcagctcaaccacacgcgccgcgggcccgccctggaggactgtgactgcgcgcaggacgagaactgcaagtccaccaagcgcgccattgagccgtgcctgccccggacgagcggcggcggcgcgggcggccccggcgcgggcggggtcatgggctgcaccgaggcccggcggcgctgcgaccgcgacagccgctgcaacctggcgctgagccgctacctgacctactgcggcaaagtcttcaacgggctgcgctgcacggacgaatgccgcaccgtcattgaggacatgctggctatgcccaaggcggcgctgctcaacgactgcgtgtgcgacggcctcgagcggcccatctgcgagtcggtcaaggagaacatggcccgcctgtgcttcggcgccgagctgggcaacggccccggcagcagcggctcggacgggggcctggacgactactacgatgaggactacgatgacgagcagcgcaccgggggcgcgggtggtgagcagccgctggacgacgacgacggcgtcccgcacccaccgcgcccgggcagcggcgctgctgcatcgggcggccgcggggacctgccctatgggcctgggcgcaggagcagcggcggcggcggccgcttggcgccccggggcgcctggaccccactcgcctccatcttgctgctgctgcttgggccgctcttttagccctcgcgccccccgccgttggctgcgggagagcccgcgtcccactcccgtgctcgcctcgaccccgcgccgggcacctgtggcttgggacagatagaagggatggttggggatacttcccaaaactttttccaagtcaacttggtgtagccggttccccggccacgactctgggcacttcccctgaagctcctctccggagcttgacttcttggacctcctcccccgccccaattccaagctccagaaactcccaactcgtctgccgtccagaaagctagctgcagtgttcaggacgtccgggaggaagcaagcatgtgggggacagaacagtagtcctggactcgaaagggaaggtgctgaccagtggggccttagcaatttgaagggttgggaaggaggaattatatttgcaaaggggctgtctattagcatatttcctttgagggggcaaaaaaaagtgccagtatcgacttttacagattgtggccagtgaggatattataatcctatgtaaacagaaaagtcccacttaccgattcattctttcactgtttgtatctgcgcccagaattctcagtgacgtgggggtgagggtgggtggcgattgccttagagggaacccctaaattggttttggataagtttgagcccttgaccttaatttcattgctaccactctgatctcttagcacatttcttaggattaagggtccaaaaatgctgatctaaggggttgccatggtgttgaacaatgcaactttttatttaaaaaagctctgcactgccatgtatgaaagtctctttatgatgtttgtttttttgtcatttttgttctttacatcaagaaattttatgtttaaatatgcggagaatgtatattgcctctgctcctatcagggttgctaaaccctggtacatcgtatataaaatgtattaaaactggggtttgttaccagttgctgtactttgtatatagaatttttataaattgtatgcttcagaaataatttatttttaaaaagaaattaaaagttttaaactcacatccatattacacctttcccccctgaaatgtatagaatccatttgtcatcaggaatcaaaacccacagtccattgtgaagtgtgctatatttagaacagtcttaaaatgtacagtgtattttatagaattgaagttaacattcttattttcaagagaatttatggacgttgtagaaatgtacaaatgcatttccaaactgccttaaacgttgtatttttatagacatgttttttaaaaatcctaagtttttaaataactatggatttgtgtattttttttggttatttgttttattaaaacatgtacatcagtaaagagttttaaacaatg

SEQ ID NO: 12825 - DNA, 2170 bp, Homo sapiens
  source 1..2170: mol_type = unassigned DNA
gagattcacagaggcaaggcagagaacaagacctgtgcttctttactccaaactcttagcagtgtggacactgattaactgcagctggggtctgatttgcccagcctgtctttgatattgatcaatgaactccttctcaaggaatgctttcctctaactgcggtgaaggtggtggctctggtggttctctccaacatgggtgtctgggttttgactgcctaagagaaggtattacaagtggataaataatgtgcactgctctgagcccaaaggtacgcagtggacctggcctctctgatatgcatcagtatagccaatggctagccagcagacatgaagctaatttgctaccaatgaaagaagatctggccttgtggttaaccaatctattagggaaggagattacagcagaaacttttatggagaagttggacaatggtgccttgctctgtcaacttgcagaaactatgcaggagaaattcaaggagagcatggatgctaacaagcccacaaagaatctaccgttgaagaagatcccatgcaaaaccagtgcaccctcgggctccttttttgccagagacaatacagcaaatttcttatcctggtgccgagatttaggggtggatgaaacgtgtctatttgaatcggaaggtttggtcctccacaagcaacccagagaagtgtgtctctgtctgctagagcttggccggattgcagccaggtatggtgtggagcctcctggtttgataaagctggaaaaagagattgaacaagaagaaacactttctgccccttctccttcaccttctccttcatcaaagtcttctggaaaaaagagtacaggaaacttactggatgatgcagtgaaacgaatttctgaagatcctccttgcaaatgcccaaacaagttctgtgtggagcggctctcccaaggaagataccgagtgggagaaaagatcctcttcattaggatgctgcacaacaaacatgtcatggtccgtgtgggaggaggctgggaaacttttgcagggtatttgttgaaacacgacccctgccgaatgctgcagatctcccgtgtggatggcaaaacatcccctatccaaagcaaatctccaactctaaaggacatgaatccagataactacttggtggtctctgccagttataaggctaagaaggaaattaagtgaaacaaattggtcatgacaaggggaccctcataatggcctgtatccacttctccagtatagtcagtttagttcatatgttctgaaaactgttttggagaaagatagacagaaaaatgtcatcatattgaaaaatgttcaaagagtagcactatttatttttaatgcttctgtagaatatgacctattaaaagaaaatctaaactcaaatttaaattatccaaattttaggcaaattattatttctcaatatgcgaacacagtatttagaacacaatattagaaacacaattctaactaaagataaataaggagaaaacatttaggatttgcagataagtcaacagaaagtgcctgctttacactcatgagtaaaagcactccagacatttttataattgcaagatttttatgcttttttttttttttttttacaaaatgatgattagtgtgataatgtgctgcaaaaaatatccaacagcactacacataagtacagagtattcacaatagtaatatgttactggaaaggccacttccgaaaagtttacattcacttggaaggctgccttaaagtatatctcttatctatgaccaaatatctggggtacttttagaagttttcagtacacccccttagagaatagcttatgagttatttcacacattcctgagcacatggctgtgtttagaatgatctagtgtaattcatacatgagctgacatacgttgatactttgacgagtaaattgtacagtcaaatgttcattgatttcatgttatttcaaagcattttcttattaaaaatatatctttagttaatcctattttgctatgctttctagtaaagtaaattcactgtagctaatgatgttacagacttacgtatacccttgtatacctgggacagggctgttttataccaataaacagcaaaatattgtccttactcattcaagaattaaaaggataaattttaaaaa

SEQ ID NO: 12826 - DNA, 2014 bp, Homo sapiens
  source 1..2014: mol_type = unassigned DNA
cattataatgtcatgatgacaacattttgtgagagaagtctgtataaaaagcaattgctcttttgtttccaaaacaggtattacaagtggataaataatgtgcactgctctgagcccaaaggtacgcagtggacctggcctctctgatatgcatcagtatagccaatggctagccagcagacatgaagctaatttgctaccaatgaaagaagatctggccttgtggttaaccaatctattagggaaggagattacagcagaaacttttatggagaagttggacaatggtgccttgctctgtcaacttgcagaaactatgcaggagaaattcaaggagagcatggatgctaacaagcccacaaagaatctaccgttgaagaagatcccatgcaaaaccagtgcaccctcgggctccttttttgccagagacaatacagcaaatttcttatcctggtgccgagatttaggggtggatgaaacgtgtctatttgaatcggaaggtttggtcctccacaagcaacccagagaagtgtgtctctgtctgctagagcttggccggattgcagccaggtatggtgtggagcctcctggtttgataaagctggaaaaagagattgaacaagaagaaacactttctgccccttctccttcaccttctccttcatcaaagtcttctggaaaaaagagtacaggaaacttactggatgatgcagtgaaacgaatttctgaagatcctccttgcaaatgcccaaacaagttctgtgtggagcggctctcccaaggaagataccgagtgggagaaaagatcctcttcattaggatgctgcacaacaaacatgtcatggtccgtgtgggaggaggctgggaaacttttgcagggtatttgttgaaacacgacccctgccgaatgctgcagatctcccgtgtggatggcaaaacatcccctatccaaagcaaatctccaactctaaaggacatgaatccagataactacttggtggtctctgccagttataaggctaagaaggaaattaagtgaaacaaattggtcatgacaaggggaccctcataatggcctgtatccacttctccagtatagtcagtttagttcatatgttctgaaaactgttttggagaaagatagacagaaaaatgtcatcatattgaaaaatgttcaaagagtagcactatttatttttaatgcttctgtagaatatgacctattaaaagaaaatctaaactcaaatttaaattatccaaattttaggcaaattattatttctcaatatgcgaacacagtatttagaacacaatattagaaacacaattctaactaaagataaataaggagaaaacatttaggatttgcagataagtcaacagaaagtgcctgctttacactcatgagtaaaagcactccagacatttttataattgcaagatttttatgcttttttttttttttttttacaaaatgatgattagtgtgataatgtgctgcaaaaaatatccaacagcactacacataagtacagagtattcacaatagtaatatgttactggaaaggccacttccgaaaagtttacattcacttggaaggctgccttaaagtatatctcttatctatgaccaaatatctggggtacttttagaagttttcagtacacccccttagagaatagcttatgagttatttcacacattcctgagcacatggctgtgtttagaatgatctagtgtaattcatacatgagctgacatacgttgatactttgacgagtaaattgtacagtcaaatgttcattgatttcatgttatttcaaagcattttcttattaaaaatatatctttagttaatcctattttgctatgctttctagtaaagtaaattcactgtagctaatgatgttacagacttacgtatacccttgtatacctgggacagggctgttttataccaataaacagcaaaatattgtccttactcattcaagaattaaaaggataaatttt

SEQ ID NO: 12827 - DNA, 2286 bp, Homo sapiens
  source 1..2286: mol_type = unassigned DNA
ttttacttccgctcggtctatgaggactgatgaaatgtaggaaatctgtttctggcagggagaaaaaatcgttttcccaaacagcactaaaaggagccatcagagaagtatgaagaggggtagtgcggctgtagctgctgccgctgccgccaggctggtggggtgcggggagcggctgctgcaggacctgtgcctggagggggccggccccgagaagctgcaggagcccagcccggagcccaagcgcctctgagagccgccagcagcccagctcgggacgcgggggtattacaagtggataaataatgtgcactgctctgagcccaaaggtacgcagtggacctggcctctctgatatgcatcagtatagccaatggctagccagcagacatgaagctaatttgctaccaatgaaagaagatctggccttgtggttaaccaatctattagggaaggagattacagcagaaacttttatggagaagttggacaatggtgccttgctctgtcaacttgcagaaactatgcaggagaaattcaaggagagcatggatgctaacaagcccacaaagaatctaccgttgaagaagatcccatgcaaaaccagtgcaccctcgggctccttttttgccagagacaatacagcaaatttcttatcctggtgccgagatttaggggtggatgaaacgtgtctatttgaatcggaaggtttggtcctccacaagcaacccagagaagtgtgtctctgtctgctagagcttggccggattgcagccaggtatggtgtggagcctcctggtttgataaagctggaaaaagagattgaacaagaagaaacactttctgccccttctccttcaccttctccttcatcaaagtcttctggaaaaaagagtacaggaaacttactggatgatgcagtgaaacgaatttctgaagatcctccttgcaaatgcccaaacaagttctgtgtggagcggctctcccaaggaagataccgagtgggagaaaagatcctcttcattaggatgctgcacaacaaacatgtcatggtccgtgtgggaggaggctgggaaacttttgcagggtatttgttgaaacacgacccctgccgaatgctgcagatctcccgtgtggatggcaaaacatcccctatccaaagcaaatctccaactctaaaggacatgaatccagataactacttggtggtctctgccagttataaggctaagaaggaaattaagtgaaacaaattggtcatgacaaggggaccctcataatggcctgtatccacttctccagtatagtcagtttagttcatatgttctgaaaactgttttggagaaagatagacagaaaaatgtcatcatattgaaaaatgttcaaagagtagcactatttatttttaatgcttctgtagaatatgacctattaaaagaaaatctaaactcaaatttaaattatccaaattttaggcaaattattatttctcaatatgcgaacacagtatttagaacacaatattagaaacacaattctaactaaagataaataaggagaaaacatttaggatttgcagataagtcaacagaaagtgcctgctttacactcatgagtaaaagcactccagacatttttataattgcaagatttttatgcttttttttttttttttttacaaaatgatgattagtgtgataatgtgctgcaaaaaatatccaacagcactacacataagtacagagtattcacaatagtaatatgttactggaaaggccacttccgaaaagtttacattcacttggaaggctgccttaaagtatatctcttatctatgaccaaatatctggggtacttttagaagttttcagtacacccccttagagaatagcttatgagttatttcacacattcctgagcacatggctgtgtttagaatgatctagtgtaattcatacatgagctgacatacgttgatactttgacgagtaaattgtacagtcaaatgttcattgatttcatgttatttcaaagcattttcttattaaaaatatatctttagttaatcctattttgctatgctttctagtaaagtaaattcactgtagctaatgatgttacagacttacgtatacccttgtatacctgggacagggctgttttataccaataaacagcaaaatattgtccttactcattcaagaattaaaaggataaattttaaaaatgttatctgtctctaaatcaatgcctcattctgaaatcaagttaattttcaaatggcaa

SEQ ID NO: 12828 - DNA, 736 bp, Homo sapiens
  source 1..736: mol_type = unassigned DNA
ccgtgcgaatggggccatgccgaccaaagcgccgatggatgtggcgcaggtagcgcgcccactgcaaggcccggcgcacggtggcggggtcccaggtgctgacgtaggtagtgcttgagaccgccagaagctcggaaaagcgatccaggtgctgcagaagggattccatgaggtattacaagtggataaataatgtgcactgctctgagcccaaaggtacgcagtggacctggcctctctgatatgcatcagtatagccaatggctagccagcagacatgaagctaatttgctaccaatgaaagaagatctggccttgtggttaaccaatctattagggaaggagattacagcagaaacttttatggagaagttggacaatggtgccttgctctgtcaacttgcagaaactatgcaggagaaattcaaggagagcatggatgctaacaagcccacaaagaatctaccgttgaagaagatcccatgcaaaaccagtgcaccctcgggctccttttttgccagagacaatacagcaaatttcttatcctggtgccgagatttaggggtggatgaaacgtgtctatttgaatcggaaggtttggtcctccacaagcaacccagagaagtgtgtctctgtctgctagagcttggccggattgcagccaggtatggtgtggagcctcctggtttgataaagctggaaaaagagattgaacaagaagaaacactttctgccc

SEQ ID NO: 12829 - DNA, 712 bp, Homo sapiens
  source 1..712: mol_type = unassigned DNA
cattataatgtcatgatgacaacattttgtgagagaagtctgtataaaaagcaattgctcttttgtttccaaaacaggtattacaagtggataaataatgtgcactgctctgagcccaaaggtacgcagtggacctggcctctctgatatgcatcagtatagccaatggctagccagcagacatgaagctaatttgctaccaatgaaagaagatctggccttgtggttaaccaatctattagggaaggagattacagcagaaacttttatggagaagttggacaatggtgccttgctctgtcaacttgcagaaactatgcaggagaaattcaaggagagcatggatgctaacaagcccacaaagaatctaccgttgaagaagatcccatgcaaaaccagtgcaccctcgggctccttttttgccagagacaatacagcaaatttcttatcctggtgccgagatttaggggtggatgaaacgtgtctatttgaatcggaaggtttggtcctccacaagcaacccagagaagtgtgtctctgtctgctagagcttggccggattgcagccaggtatggtgtggagcctcctggtttgataaagctggaaaaagagattgaacaagaagaaacactttctgccccttctccttcaccttctccttcatcaaagtcttctggaaaaaagagtacaggaaacttactggatgatgca

SEQ ID NO: 12830 - DNA, 547 bp, Homo sapiens
  source 1..547: mol_type = unassigned DNA
gttggacaggctctttctctaagagtgggtattcactgcagggggtgactttctgattctctggaaacaaccatgtgttccttatccctattgcggaacaccccggacaaccgcagcacgtattacaagtggataaataatgtgcactgctctgagcccaaaggtacgcagtggacctggcctctctgatatgcatcagtatagccaatggctagccagcagacatgaagctaatttgctaccaatgaaagaagatctggccttgtggttaaccaatctattagggaaggagattacagcagaaacttttatggagaagttggacaatggtgccttgctctgtcaacttgcagaaactatgcaggagaaattcaaggagagcatggatgctaacaagcccacaaagaatctaccgttgaagaagatcccatgcaaaaccagtgcaccctcgggctccttttttgccagagacaatacagcaaatttcttatcctggtgccgagatttaggggtggatgaaacgtgtctatttgaatcggaaggtttg

SEQ ID NO: 12831 - DNA, 579 bp, Homo sapiens
  source 1..579: mol_type = unassigned DNA
taatagggtgtaggtaaagttactgaacagccacatctcactttcaggaaagtagtggaagagattgtgtcttgagaagacaggcattttagaggtattacaagtggataaataatgtgcactgctctgagcccaaaggtacgcagtggacctggcctctctgatatgcatcagtatagccaatggctagccagcagacatgaagctaatttgctaccaatgaaagaagatctggccttgtggttaaccaatctattagggaaggagattacagcagaaacttttatggagaagttggacaatggtgccttgctctgtcaacttgcagaaactatgcaggagaaattcaaggagagcatggatgctaacaagcccacaaagaatctaccgttgaagaagatcccatgcaaaaccagtgcaccctcgggctccttttttgccagagacaatacagcaaatttcttatcctggtgccgagatttaggggtggatgaaacgtgtctatttgaatcggaaggtttggtcctccacaagcaacccagagaagtgtgtctctgtctgctagagcttggccggatt

SEQ ID NO: 12832 - DNA, 2530 bp, Homo sapiens
  source 1..2530: mol_type = unassigned DNA
agggaggcggggcggagacggcggcgaggaggaggccgcggcgcgggacgcatagagctgcggctcgggcggcgcctccctgcggcggcccggcccggctccggcccccgctggggcaatgctccccggggccgcgggatgagccaggtgagcgcggagacccccagcactccctgcctgtgactcggccggtccgggcatggcagacccagtggcgggcatcgcgggctcggcggccaagagcgtgcggccatttcgctccagtgaggcctacgtggaggccatgaaggaggacctggccgagtggctcaatgccttgtacggcctgggtctcccgggtggtggcgatggcttcctgacagggctggccacgggcacgaccctgtgccaacatgccaacgccgtgaccgaggctgcccgtgcattggcagccgcccgcccggcccgaggtgtggccttccaggcgcacagtgtagtgcctggctccttcatggcgcgcgacaacgtggccaccttcatcggctggtgccgcgtggagctgggtgtgccggaggtgctcatgtttgagactgaggacctggtgctgcgcaagaacgagaagagcgtggtgctgtgcctgctggaggtggcgcggcgtggggcacgcctgggcctgctggccccacgcctcgtgcagtttgagcaggagattgagcgggagctgcgtgctgcacccccagcccccaacgcccctgccgctggggaggacaccactgaaaccgcccccgcaccagggactcctgcccgcggcccccgcatgacacccagcgacctgcgcaacctcgacgagctggtgagggagattctgggccgctgcacctgccctgaccagtttcccatgatcaaggtctcagaggggaagtaccgtgtgggggactcgagcctgctcatctttgtgcgggtgctgaggagccacgtgatggtgcgagtgggtggtggctgggacacgctggagcattacctggacaagcacgacccgtgccgctgctcctccactgctcatcgcccaccccagccgagggtctgcaccttttctccacagagggtgtcgcccaccaccagtccccgccctgctagcccagtccctgggagtgagcgccggggctcccggcctgagatgactcccgttagcttacgaagcacaaaggaggggcccgagaccccacccaggccccgggatcagctgcccccccatccccgctcccgccgctactccggggacagtgactcctcagcctcctccgcccagagcggcccccttggtacccgcagtgatgacacaggcactggcccccggagggagcgacccagccggcggctgaccacaggcaccccggcctctccgagacggcctcctctgcgcagccagtcccgagaccggctggatcgcggccggccccggggggccccaggaggcaggggagcccagctgtcggtccccagccctgcccggcgggcccggagccagagccgcgaggagcaggctgtgctgcttgtgcgcagggatcgagacgggcagcactcatgggtgccaaggggcaggggcagtgggggctcgggcaggagcaccccccagactccccgtgcccgcagccctgcagcaccccggctttcccgggtctccagccccagtccagagttgggcaccacaccggccagcatcttccgcacacccctgcagctcgacccgcagcaggagcagcagctgttccggcgcctggaagaggagttcctggccaatgcccgggcccttgaggctgttgctagcgtgacccccactggaccagcccctgacccagctcgggcccccgaccctccagctcctgactctgcctattgttcctccagttcctcctcttcgtccctcagcgtcctgggtggcaaatgtggccaacctggggactctggccggacggccaatgggctgcctgggccccgaagccaagccctttccagctcctccgatgaaggcagcccctgccctggcatgggggggccactagatgcacctgggagccccctggcttgcactgaaccctcgaggacctgggcacggggtcggatggacacacagccagaccgtaaaccctcacgtatccccacgcctcggggcccccgccgcccctccggacccgcagagctggggacatggcatgccctgcactcagtcaccccgagggctgagccagattcctggatgtgatggaccagctcagctgtccccagaccccatcccttctccttttcctttgtggccttaacccttctgcatcagggagccccctctgcctcttgagtaccagacctcatgggaccagaccccttgggaccacatggcacaatgggacctctgttgtacattccggttgggggatgagcgttgctatttaattactaatattattgaatgccttagaggaggccgggcgagcccggtgttctgaagacctgtggcccagcagagcctctgacagtaaagttttgctccagc

SEQ ID NO: 12833 - DNA, 2237 bp, Homo sapiens
  source 1..2237: mol_type = unassigned DNA
gccgcggcgcgggacgcatagagctgcggctcgggcggcgcctccctgcggcggcccggcccggctccggcccccgctggggcaatgctccccggggccgcgggatgagccagtgactcggccggtccgggcatggcagacccagtggcgggcatcgcgggctcggcggccaagagcgtgcggccatttcgctccagtgaggcctacgtggaggccatgaaggaggacctggccgagtggctcaatgccttgtacggcctgggtctcccgggtggtggcgatggcttcctgacagggctggccacgggcacgaccctgtgccaacatgccaacgccgtgaccgaggctgcccgtgcattggcagccgcccgcccggcccgaggtgtggccttccaggcgcacagtgtagtgcctggctccttcatggcgcgcgacaacgtggccaccttcatcggctggtgccgcgtggagctgggtgtgccggaggtgctcatgtttgagactgaggacctggtgctgcgcaagaacgagaagagcgtggtgctgtgcctgctggaggtggcgcggcgtggggcacgcctgggcctgctggccccacgcctcgtgcagtttgagcaggagattgagcgggagctgcgtgctgcacccccagcccccaacgcccctgccgctggggaggacaccactgaaaccgcccccgcaccagggactcctgcccgcggcccccgcatgacacccagcgacctgcgcaacctcgacgagctggtgagggagattctgggccgctgcacctgccctgaccagtttcccatgatcaaggtctcagaggggaagtaccgtgtgggggactcgagcctgctcatctttgtgcgggtgctgaggagccacgtgatggtgcgagtgggtggtggctgggacacgctggagcattacctggacaagcacgacccgtgccgctgctcctccactgctcatcgcccaccccagccgagggtctgcaccttttctccacagagggtgtcgcccaccaccagtccccgccctgctagcccagtccctgggagtgagcgccggggctcccggcctgagatgactcccgttagcttacgaagcacaaaggaggggcccgagaccccacccaggtgagatgcaggaggacgaggagtgaggggtccagagggtgggggggcgtcagccctggcctgcatgatgggttgcctgtgcgccagagtgactcacaccctgggaaaagttcccgtgggtgggggcgggcctggcttcccatctccatggcaacccaaccaaaccaacaacacagctggggcgggccctgtggctgggcggcagccagtccagctcttgcttcctctggcccgtcctgggaaggggggtgtctagagcccaggaaacttcttcttccgtggcttttggggccctgggccgctggaggaagctgctcacttctccctggaagtccccaggacagaccgatgcccctgacagccccgtccaccagccacataccctgctgttcctctccctgcctgttctgcatgccagtccttccgtggtaccccatctgtctctattgtccccctgccccaggccccgggatcagctgcccccccatccccgctcccgccgctactccggggacagtgactcctcagcctcctccgcccagagcggcccccttggtacccgcagtgatgacacaggcactggcccccggagggagcgacccagccggcggctgaccacaggcaccccggcctctccgagacggcctcctgcctgcgcagccagtcccgagaccggctggatcgcggccggccccggggggccccaggaggcaggggagcccagctgtcggtccccagccctgcccggcgggcccggagccagagccgcgaggagcaggctgtgctgcttgtgcgcagggatcgagacgggcagcactcatgggtgccaaggggcaggggcagtgggggctcgggcaggagcaccccccagactccccgtgcccgcagccctgcagcaccccggctttcccgggtctccagccccagtccagagttgggcaccacaccggccagcatcttccgcacacccctgcagctcgacccgcagcaggagcagcagctgttccggcgcctggaagaggagttcctggccaatgcccgggcccttgaggctgttgctagcgtgacccccactggaccagcccctgacccagc

SEQ ID NO: 12834 - DNA, 2308 bp, Homo sapiens
  source 1..2308: mol_type = unassigned DNA
gacggcggcgaggaggaggccgcggcgcgggacgcatagagctgcggctcgggcggcgcctccctgcggcggcccggcccggctccggcccccgctggggcaatgctccccggggccgcgggatgagccagtgactcggccggtccgggcatggcagacccagtggcgggcatcgcgggctcggcggccaagagcgtgcggccatttcgctccagtgaggcctacgtggaggccatgaaggaggacctggccgagtggctcaatgccttgtacggcctgggtctcccgggtggtggcgatggcttcctgacagggctggccacgggcacgaccctgtgccaacatgccaacgccgtgaccgaggctgcccgtgcattggcagccgcccgcccggcccgaggtgtggccttccaggcgcacagtgtagtgcctggctccttcatggcgcgcgacaacgtggccaccttcatcggctggtgccgcgtggagctgggtgtgccggaggtgctcatgtttgagactgaggacctggtgctgcgcaagaacgagaagagcgtggtgctgtgcctgctggaggtggcgcggcgtggggcacgcctgggcctgctggccccacgcctcgtgcagtttgagcaggagattgagcgggagctgcgtgctgcacccccagcccccaacgcccctgccgctggggaggacaccactgaaaccgcccccgcaccagggactcctgcccgcggcccccgcatgacacccagcgacctgcgcaacctcgacgagctggtgagggagattctgggccgctgcacctgccctgaccagtttcccatgatcaaggtctcagaggggaagtaccgtgtgggggactcgagcctgctcatctttgtgcgggtgctgaggagccacgtgatggtgcgagtgggtggtggctgggacacgctggagcattacctggacaagcacgacccgtgccgctgctcctccactggccccgggatcagctgcccccccatccccgctcccgccgctactccggggacagtgactcctcagcctcctccgcccagagcggcccccttggtacccgcagtgatgacacaggcactggcccccggagggagcgacccagccggcggctgaccacaggcaccccggcctctccgagacggcctcctgcctgcgcagccagtcccgagaccggctggatcgcggccggccccggggggccccaggaggcaggggagcccagctgtcggtccccagccctgcccggcgggcccggagccagagccgcgaggagcaggctgtgctgcttgtgcgcagggatcgagacgggcagcactcatgggtgccaaggggcaggggcagtgggggctcgggcaggagcaccccccagactccccgtgcccgcagccctgcagcaccccggctttcccgggtctccagccccagtccagagttgggcaccacaccggccagcatcttccgcacacccctgcagctcgacccgcagcaggagcagcagctgttccggcgcctggaagaggagttcctggccaatgcccgggcccttgaggctgttgctagcgtgacccccactggaccagcccctgacccagctcgggcccccgaccctccagctcctgactctgcctattgttcctccagttcctcctcttcgtccctcagcgtcctgggtggcaaatgtggccaacctggggactctggccggacggccaatgggctgcctgggccccgaagccaagccctttccagctcctccgatgaaggcagcccctgccctggcatgggggggccactagatgcacctgggagccccctggcttgcactgaaccctcgaggacctgggcacggggtcggatggacacacagccagaccgtaaaccctcacgtatccccacgcctcggggcccccgccgcccctccggacccgcagagctggggacatggcatgccctgcactcagtcaccccgagggctgagccagattcctggatgtgatggaccagctcagctgtccccagaccccatcccttctccttttcctttgtggccttaacccttctgcatcagggagccccctctgcctcttgagtaccagacctcatgggaccagaccccttgggaccacatggcacaatgggacctctgttgtacattccggttgggggatgagcgttgctatttaattactaatattattgaatgccttagaggaggccgggcgagcccggtgttctgaagacctgtggcccagcagagcctctgacagtaaagttttgctcc

SEQ ID NO: 12835 - DNA, 2482 bp, Homo sapiens
  source 1..2482: mol_type = unassigned DNA
ggacgcatagagctgcggctcgggcggcgcctccctgcggcggcccggcccggctccggcccccgctggggcaatgctccccggggccgcgggatgagccagcgatcctgaactgtgttcctgcccacagtgactcggccggtccgggcatggcagacccagtggcgggcatcgcgggctcggcggccaagagcgtgcggccatttcgctccagtgaggcctacgtggaggccatgaaggaggacctggccgagtggctcaatgccttgtacggcctgggtctcccgggtggtggcgatggcttcctgacagggctggccacgggcacgaccctgtgccaacatgccaacgccgtgaccgaggctgcccgtgcattggcagccgcccgcccggcccgaggtgtggccttccaggcgcacagtgtagtgcctggctccttcatggcgcgcgacaacgtggccaccttcatcggctggtgccgcgtggagctgggtgtgccggaggtgctcatgtttgagactgaggacctggtgctgcgcaagaacgagaagagcgtggtgctgtgcctgctggaggtggcgcggcgtggggcacgcctgggcctgctggccccacgcctcgtgcagtttgagcaggagattgagcgggagctgcgtgctgcacccccagcccccaacgcccctgccgctggggaggacaccactgaaaccgcccccgcaccagggactcctgcccgcggcccccgcatgacacccagcgacctgcgcaacctcgacgagctggtgagggagattctgggccgctgcacctgccctgaccagtttcccatgatcaaggtctcagaggggaagtaccgtgtgggggactcgagcctgctcatctttgtgcgggtgctgaggagccacgtgatggtgcgagtgggtggtggctgggacacgctggagcattacctggacaagcacgacccgtgccgctgctcctccactgctcatcgcccaccccagccgagggtctgcaccttttctccacagagggtgtcgcccaccaccagtccccgccctgctagcccagtccctgggagtgagcgccggggctcccggcctgagatgactcccgttagcttacgaagcacaaaggaggggcccgagaccccacccaggccccgggatcagctgcccccccatccccgctcccgccgctactccggggacagtgactcctcagcctcctccgcccagagcggcccccttggtacccgcagtgatgacacaggcactggcccccggagggagcgacccagccggcggctgaccacaggcaccccggcctctccgagacggcctcctgcctgcgcagccagtcccgagaccggctggatcgcggccggccccggggggccccaggaggcaggggagcccagctgtcggtccccagccctgcccggcgggcccggagccagagccgcgaggagcaggctgtgctgcttgtgcgcagggatcgagacgggcagcactcatgggtgccaaggggcaggggcagtgggggctcgggcaggagcaccccccagactccccgtgcccgcagccctgcagcaccccggctttcccgggtctccagccccagtccagagttgggcaccacaccggccagcatcttccgcacacccctgcagctcgacccgcagcaggagcagcagctgttccggcgcctggaagaggagttcctggccaatgcccgggcccttgaggctgttgctagcgtgacccccactggaccagcccctgacccagctcgggcccccgaccctccagctcctgactctgcctattgttcctccagttcctcctcttcgtccctcagcgtcctgggtggcaaatgtggccaacctggggactctggccggacggccaatgggctgcctgggccccgaagccaagccctttccagctcctccgatgaaggcagcccctgccctggcatgggggggccactagatgcacctgggagccccctggcttgcactgaaccctcgaggacctgggcacggggtcggatggacacacagccagaccgtaaaccctcacgtatccccacgcctcggggcccccgccgcccctccggacccgcagagctggggacatggcatgccctgcactcagtcaccccgagggctgagccagattcctggatgtgatggaccagctcagctgtccccagaccccatcccttctccttttcctttgtggccttaacccttctgcatcagggagccccctctgcctcttgagtaccagacctcatgggaccagaccccttgggaccacatggcacaatgggacctctgttgtacattccggttgggggatgagcgttgctatttaattactaatattattgaatgccttagaggaggccgggcgagcccggtgttctgaagacctgtggcccagcagagcctctgacagtaaagttttgctccagc

SEQ ID NO: 12836 - DNA, 2924 bp, Homo sapiens
  source 1..2924: mol_type = unassigned DNA
cgcggcggtgccgtttatctggccaggggaggtccacccgggaggaggtgactttgcagcctccagccgctatcgcttcctgccttcatcttgggaacaggccgtgctgtgcgccagcccggggagcccaccgtctggggaggggggcgattaaaaggtcccaacctcctccccaggagaccaaagaggttggacggggccccgggtactaggctgggtgggggttgggcgcctgggccggtcgcagttgtctgggggccctggggctctctgcgtcgagagcgctcgaagacccgggattcctggcccgatcgcgggcggggggagaccccagctccaccccagctcccgccggctcggggaaggggcggcccctttaagagcgcgcggccccgcccgccccctccgggcaggatccgaattccagggaggcggggcggagacggcggcgaggaggaggccgcggcgcgggacgcatagagctgcggctcgggcggcgcctccctgcggcggcccggcccggctccggcccccgctggggcaatgctccccggggccgcgggatgagccagtgactcggccggtccgggcatggcagacccagtggcgggcatcgcgggctcggcggccaagagcgtgcggccatttcgctccagtgaggcctacgtggaggccatgaaggaggacctggccgagtggctcaatgccttgtacggcctgggtctcccgggtggtggcgatggcttcctgacagggctggccacgggcacgaccctgtgccaacatgccaacgccgtgaccgaggctgcccgtgcattggcagccgcccgcccggcccgaggtgtggccttccaggcgcacagtgtagtgcctggctccttcatggcgcgcgacaacgtggccaccttcatcggctggtgccgcgtggagctgggtgtgccggaggtgctcatgtttgagactgaggacctggtgctgcgcaagaacgagaagagcgtggtgctgtgcctgctggaggtggcgcggcgtggggcacgcctgggcctgctggccccacgcctcgtgcagtttgagcaggagattgagcgggagctgcgtgctgcacccccagcccccaacgcccctgccgctggggaggacaccactgaaaccgcccccgcaccagggactcctgcccgcggcccccgcatgacacccagcgacctgcgcaacctcgacgagctggtgagggagattctgggccgctgcacctgccctgaccagtttcccatgatcaaggtctcagaggggaagtaccgtgtgggggactcgagcctgctcatctttgtgcgggtgctgaggagccacgtgatggtgcgagtgggtggtggctgggacacgctggagcattacctggacaagcacgacccgtgccgctgctcctccactgctcatcgcccaccccagccgagggtctgcaccttttctccacagagggtgtcgcccaccaccagtccccgccctgctagcccagtccctgggagtgagcgccggggctcccggcctgagatgactcccgttagcttacgaagcacaaaggaggggcccgagaccccacccaggccccgggatcagctgcccccccatccccgctcccgccgctactccggggacagtgactcctcagcctcctccgcccagagcggcccccttggtacccgcagtgatgacacaggcactggcccccggagggagcgacccagccggcggctgaccacaggcaccccggcctctccgagacggcctcctgcctgcgcagccagtcccgagaccggctggatcgcggccggccccggggggccccaggaggcaggggagcccagctgtcggtccccagccctgcccggcgggcccggagccagagccgcgaggagcaggctgtgctgcttgtgcgcagggatcgagacgggcagcactcatgggtgccaaggggcaggggcagtgggggctcgggcaggagcaccccccagactccccgtgcccgcagccctgcagcaccccggctttcccgggtctccagccccagtccagagttgggcaccacaccggccagcatcttccgcacacccctgcagctcgacccgcagcaggagcagcagctgttccggcgcctggaagaggagttcctggccaatgcccgggcccttgaggctgttgctagcgtgacccccactggaccagcccctgacccagctcgggcccccgaccctccagctcctgactctgcctattgttcctccagttcctcctcttcgtccctcagcgtcctgggtggcaaatgtggccaacctggggactctggccggacggccaatgggctgcctgggccccgaagccaagccctttccagctcctccgatgaaggcagcccctgccctggcatgggggggccactagatgcacctgggagccccctggcttgcactgaaccctcgaggacctgggcacggggtcggatggacacacagccagaccgtaaaccctcacgtatccccacgcctcggggcccccgccgcccctccggacccgcagagctggggacatggcatgccctgcactcagtcaccccgagggctgagccagattcctggatgtgatggaccagctcagctgtccccagaccccatcccttctccttttcctttgtggccttaacccttctgcatcagggagccccctctgcctcttgagtaccagacctcatgggaccagaccccttgggaccacatggcacaatgggacctctgttgtacattccggttgggggatgagcgttgctatttaattactaatattattgaatgccttagaggaggccgggcgagcccggtgttctgaagacctgtggcccagcagagcctctgacagtaaagttttgctccagc

SEQ ID NO: 12837 - DNA, 2481 bp, Homo sapiens
  source 1..2481: mol_type = unassigned DNA
atagagctgcggctcgggcggcgcctccctgcggcggcccggcccggctccggcccccgctggggcaatgctccccggggccgcgggatgagccaggtgagcgcggagacccccagcactccctgcctgtgactcggccggtccgggcatggcagacccagtggcgggcatcgcgggctcggcggccaagagcgtgcggccatttcgctccagtgaggcctacgtggaggccatgaaggaggacctggccgagtggctcaatgccttgtacggcctgggtctcccgggtggtggcgatggcttcctgacagggctggccacgggcacgaccctgtgccaacatgccaacgccgtgaccgaggctgcccgtgcattggcagccgcccgcccggcccgaggtgtggccttccaggcgcacagtgtagtgcctggctccttcatggcgcgcgacaacgtggccaccttcatcggctggtgccgcgtggagctgggtgtgccggaggtgctcatgtttgagactgaggacctggtgctgcgcaagaacgagaagagcgtggtgctgtgcctgctggaggtggcgcggcgtggggcacgcctgggcctgctggccccacgcctcgtgcagtttgagcaggagattgagcgggagctgcgtgctgcacccccagcccccaacgcccctgccgctggggaggacaccactgaaaccgcccccgcaccagggactcctgcccgcggcccccgcatgacacccagcgacctgcgcaacctcgacgagctggtgagggagattctgggccgctgcacctgccctgaccagtttcccatgatcaaggtctcagaggggaagtaccgtgtgggggactcgagcctgctcatctttgtgcgggtgctgaggagccacgtgatggtgcgagtgggtggtggctgggacacgctggagcattacctggacaagcacgacccgtgccgctgctcctccactgctcatcgcccaccccagccgagggtctgcaccttttctccacagagggtgtcgcccaccaccagtccccgccctgctagcccagtccctgggagtgagcgccggggctcccggcctgagatgactcccgttagcttacgaagcacaaaggaggggcccgagaccccacccaggccccgggatcagctgcccccccatccccgctcccgccgctactccggggacagtgactcctcagcctcctccgcccagagcggcccccttggtacccgcagtgatgacacaggcactggcccccggagggagcgacccagccggcggctgaccacaggcaccccggcctctccgagacggcctcctgcctgcgcagccagtcccgagaccggctggatcgcggccggccccggggggccccaggaggcaggggagcccagctgtcggtccccagccctgcccggcgggcccggagccagagccgcgaggagcaggctgtgctgcttgtgcgcagggatcgagacgggcagcactcatgggtgccaaggggcaggggcagtgggggctcgggcaggagcaccccccagactccccgtgcccgcagccctgcagcaccccggctttcccgggtctccagccccagtccagagttgggcaccacaccggccagcatcttccgcacacccctgcagctcgacccgcagcaggagcagcagctgttccggcgcctggaagaggagttcctggccaatgcccgggcccttgaggctgttgctagcgtgacccccactggaccagcccctgacccagctcgggcccccgaccctccagctcctgactctgcctattgttcctccagttcctcctcttcgtccctcagcgtcctgggtggcaaatgtggccaacctggggactctggccggacggccaatgggctgcctgggccccgaagccaagccctttccagctcctccgatgaaggcagcccctgccctggcatgggggggccactagatgcacctgggagccccctggcttgcactgaaccctcgaggacctgggcacggggtcggatggacacacagccagaccgtaaaccctcacgtatccccacgcctcggggcccccgccgcccctccggacccgcagagctggggacatggcatgccctgcactcagtcaccccgagggctgagccagattcctggatgtgatggaccagctcagctgtccccagaccccatcccttctccttttcctttgtggccttaacccttctgcatcagggagccccctctgcctcttgagtaccagacctcatgggaccagaccccttgggaccacatggcacaatgggacctctgttgtacattccggttgggggatgagcgttgctatttaattactaatattattgaatgccttagaggaggccgggcgagcccggtgttctgaagacctgtggcccagcagagcctctgacagtaaagttttgctccagc

SEQ ID NO: 12838 - DNA, 745 bp, Homo sapiens
  source 1..745: mol_type = unassigned DNA
cccgggaggaggtgactttgcagcctccagccgctatcgcttcctgccttcatcttgggaacaggccgtgctgtgcgccagcccggggagcccaccgtctggggaggggggcgattaaaaggtcccaacctcctccccaggagaccaaagaggatccgaattccagggaggcggggcggagacggcggcgaggaggaggccgcggcgcgggacgcatagagctgcggctcgggcggcgcctccctgcggcggcccggcccggctccggcccccgctggggcaatgctccccggggccgcgggatgagccagtgactcggccggtccgggcatggcagacccagtggcgggcatcgcgggctcggcggccaagagcgtgcggccatttcgctccagtgaggcctacgtggaggccatgaaggaggacctggccgagtggctcaatgccttgtacggcctgggtctcccgggtggtggcgatggcttcctgacagggctggccacgggcacgaccctgtgccaacatgccaacgccgtgaccgaggctgcccgtgcattggcagccgcccgcccggcccgaggtgtggccttccaggcgcacagtgtagtgcctggctccttcatggcgcgcgacaacgtggccaccttcatcggctggtgccgcgtggagctgggtgtgccggaggtgctcatgtttgagactgaggacctggtgctgcgcaagaacgagaagagcgtggtgctgt

SEQ ID NO: 12839 - DNA, 569 bp, Homo sapiens
  source 1..569: mol_type = unassigned DNA
gctatcgcttcctgccttcatcttgggaacaggccgtgctgtgcgccagcccggggagcccaccgtctggggaggggggcgattaaaaggtcccaacctcctccccaggagaccaaagagtgactcggccggtccgggcatggcagacccagtggcgggcatcgcgggctcggcggccaagagcgtgcggccatttcgctccagtgaggcctacgtggaggccatgaaggaggacctggccgagtggctcaatgccttgtacggcctgggtctcccgggtggtggcgatggcttcctgacagggctggccacgggcacgaccctgtgccaacatgccaacgccgtgaccgaggctgcccgtgcattggcagccgcccgcccggcccgaggtgtggccttccaggcgcacagtgtagtgcctggctccttcatggcgcgcgacaacgtggccaccttcatcggctggtgccgcgtggagctgggtgtgccggaggtgctcatgtttgagactgaggacctggtgctgcgcaagaacgagaagagcgtggtgctgtgcctgctggaggtgg

SEQ ID NO: 12840 - DNA, 3381 bp, Homo sapiens
  source 1..3381: mol_type = unassigned DNA
atagagctgcggctcgggcggcgcctccctgcggcggcccggcccggctccggcccccgctggggcaatgctccccggggccgcgggatgagccaggtgagcgcggagacccccagcactccctgcctggtgcgcatggacgggggtggggaggcggggcgggaagcggcgtcctcggcctctgttccccggggctgtgtgaccttgggcggccccgcaccctctctgggcccagagccccagcaccggcagggcctgcggaggccgctctgagtcctggccccgcaggcaccggcctggagcgctggggaggcttcttggaggaggcggggcctggccctggccccggatcgccgagaccggccacgctgcgccgcctggacgccgggctcctccacccacagctctgcgaccttcacgagctcgaccctttctgcgcctcagtttcctcatctataaaatggagataatgcctccgcgcgctgagcccgagcgcggtcgtgctgttacactattgctgctgctatgtcgttaatgacggcacagcccttatggaaggggggccaaggaaggcacggggaccttcccgcaggacatggggtgggcaccagccctaagccatgcacataacccactctgaggtcaggacctgggttcctttcgtgtccactgggggccttagccgttgtcttcacttctctaggtcccagcccttcacaatgggcgcgcctccctgcctgagagggaggccccagccaagccccagtttccaccgcaaaaagccacacagcaaacacttaatggaccctaaatttataaaaattatcccatagagtcctatgaggcagggaatgttactgtacccatttcgcagatgaggaaacttggggcaccgacatttcccagagccaacatgtaaaccaggcatttggcctgagtgacagactggtgcaggtggccagcagcttaatttgtactgagcgcttactgggtccccacagcgatcctgaactgtgttcctgcccacagtgactcggccggtccgggcatggcagacccagtggcgggcatcgcgggctcggcggccaagagcgtgcggccatttcgctccagtgaggcctacgtggaggccatgaaggaggacctggccgagtggctcaatgccttgtacggcctgggtctcccgggtggtggcgatggcttcctgacagggctggccacgggcacgaccctgtgccaacatgccaacgccgtgaccgaggctgcccgtgcattggcagccgcccgcccggcccgaggtgtggccttccaggcgcacagtgtagtgcctggctccttcatggcgcgcgacaacgtggccaccttcatcggctggtgccgcgtggagctgggtgtgccggaggtgctcatgtttgagactgaggacctggtgctgcgcaagaacgagaagagcgtggtgctgtgcctgctggaggtggcgcggcgtggggcacgcctgggcctgctggccccacgcctcgtgcagtttgagcaggagattgagcgggagctgcgtgctgcacccccagcccccaacgcccctgccgctggggaggacaccactgaaaccgcccccgcaccagggactcctgcccgcggcccccgcatgacacccagcgacctgcgcaacctcgacgagctggtgagggagattctgggccgctgcacctgccctgaccagtttcccatgatcaaggtctcagaggggaagtaccgtgtgggggactcgagcctgctcatctttgtgcgggtgctgaggagccacgtgatggtgcgagtgggtggtggctgggacacgctggagcattacctggacaagcacgacccgtgccgctgctcctccactgctcatcgcccaccccagccgagggtctgcaccttttctccacagagggtgtcgcccaccaccagtccccgccctgctagcccagtccctgggagtgagcgccggggctcccggcctgagatgactcccgttagcttacgaagcacaaaggaggggcccgagaccccacccaggccccgggatcagctgcccccccatccccgctcccgccgctactccggggacagtgactcctcagcctcctccgcccagagcggcccccttggtacccgcagtgatgacacaggcactggcccccggagggagcgacccagccggcggctgaccacaggcaccccggcctctccgagacggcctcctgcctgcgcagccagtcccgagaccggctggatcgcggccggccccggggggccccaggaggcaggggagcccagctgtcggtccccagccctgcccggcgggcccggagccagagccgcgaggagcaggctgtgctgcttgtgcgcagggatcgagacgggcagcactcatgggtgccaaggggcaggggcagtgggggctcgggcaggagcaccccccagactccccgtgcccgcagccctgcagcaccccggctttcccgggtctccagccccagtccagagttgggcaccacaccggccagcatcttccgcacacccctgcagctcgacccgcagcaggagcagcagctgttccggcgcctggaagaggagttcctggccaatgcccgggcccttgaggctgttgctagcgtgacccccactggaccagcccctgacccagctcgggcccccgaccctccagctcctgactctgcctattgttcctccagttcctcctcttcgtccctcagcgtcctgggtggcaaatgtggccaacctggggactctggccggacggccaatgggctgcctgggccccgaagccaagccctttccagctcctccgatgaaggcagcccctgccctggcatgggggggccactagatgcacctgggagccccctggcttgcactgaaccctcgaggacctgggcacggggtcggatggacacacagccagaccgtaaaccctcacgtatccccacgcctcggggcccccgccgcccctccggacccgcagagctggggacatggcatgccctgcactcagtcaccccgagggctgagccagattcctggatgtgatggaccagctcagctgtccccagaccccatcccttctccttttcctttgtggccttaacccttctgcatcagggagccccctctgcctcttgagtaccagacctcatgggaccagaccccttgggaccacatggcacaatgggacctctgttgtacattccggttgggggatgagcgttgctatttaattactaatattattgaatgccttagaggaggccgggcgagcccggtgttctgaagacctgtggcccagcagagcctctgacagtaaagttttgctccagc

SEQ ID NO: 12841 - DNA, 2490 bp, Homo sapiens
  source 1..2490: mol_type = unassigned DNA
gcttgaggtgccgcagccgccgccgccgccgccgccgcgatgtgaccttcagggccgccaggacgggatgaccggagcctccgccccgcggcgcccgcggctcgcctcggcctcccgggcgctctgaccgcgcgtccccggcccgccatggccccttcgctctcgcccgggcccgccgccctgcgccgcgcgccgcagctgctgctgctgctgctggccgcggagtgcgcgcttgccgcgctgttgccggcgcgcgaggccacgcagttcctgcggcccaggcagcgccgcgcctttcaggtcttcgaggaggccaagcagggccacctggagagggagtgcgtggaggagctgtgcagccgcgaggaggcgcgggaggtgttcgagaacgaccccgagacggattatttttacccaagatacttagactgcatcaacaagtatgggtctccgtacaccaaaaactcaggcttcgccacctgcgtgcaaaacctgcctgaccagtgcacgcccaacccctgcgataggaaggggacccaagcctgccaggacctcatgggcaacttcttctgcctgtgtaaagctggctgggggggccggctctgcgacaaagatgtcaacgaatgcagccaggagaacgggggctgcctccagatctgccacaacaagccgggtagcttccactgttcctgccacagcggcttcgagctctcctctgatggcaggacctgccaagacatagacgagtgcgcagactcggaggcctgcggggaggcgcgctgcaagaacctgcccggctcctactcctgcctctgtgacgagggctttgcgtacagctcccaggagaaggcttgccgagatgtggacgagtgtctgcagggccgctgtgagcaggtctgcgtgaactccccagggagctacacctgccactgtgacgggcgtgggggcctcaagctgtcccaggacatggacacctgtgaggacatcttgccgtgcgtgcccttcagcgtggccaagagtgtgaagtccttgtacctgggccggatgttcagtgggacccccgtgatccgactgcgcttcaagaggctgcagcccaccaggctggtagctgagtttgacttccggacctttgaccccgagggcatcctcctctttgccggaggccaccaggacagcacctggatcgtgctggccctgagagccggccggctggagctgcagctgcgctacaacggtgtcggccgtgtcaccagcagcggcccggtcatcaaccatggcatgtggcagacaatctctgttgaggagctggcgcggaatctggtcatcaaggtcaacagggatgctgtcatgaaaatcgcggtggccggggacttgttccaaccggagcgaggactgtatcatctgaacctgaccgtgggaggtattcccttccatgagaaggacctcgtgcagcctataaaccctcgtctggatggctgcatgaggagctggaactggctgaacggagaagacaccaccatccaggaaacggtgaaagtgaacacgaggatgcagtgcttctcggtgacggagagaggctctttctaccccgggagcggcttcgccttctacagcctggactacatgcggacccctctggacgtcgggactgaatcaacctgggaagtagaagtcgtggctcacatccgcccagccgcagacacaggcgtgctgtttgcgctctgggcccccgacctccgtgccgtgcctctctctgtggcactggtagactatcactccacgaagaaactcaagaagcagctggtggtcctggccgtggagcatacggccttggccctaatggagatcaaggtctgcgacggccaagagcacgtggtcaccgtctcgctgagggacggtgaggccaccctggaggtggacggcaccaggggccagagcgaggtgagcgccgcgcagctgcaggagaggctggccgtgctcgagaggcacctgcggagccccgtgctcacctttgctggcggcctgccagatgtgccggtgacttcagcgccagtcaccgcgttctaccgcggctgcatgacactggaggtcaaccggaggctgctggacctggacgaggcggcgtacaagcacagcgacatcacggcccactcctgcccccccgtggagcccgccgcagcctaggcccccacgggacgcggcaggcttctcagtctctgtccgagacagccgggaggagcctgggggctcctcaccacgtggggccatgctgagagctgggctttcctctgtgaccatcccggcctgtaacatatctgtaaatagtgagatggacttggggcctctgacgccgcgcactcagccgtgggcccgggcgcggggaggccggcgcagcgcagagcgggctcgaagaaaataattctctattatttttattaccaagcgcttctttctgactctaaaatatggaaaataaaatatttacagaaa

SEQ ID NO: 12842 - DNA, 2188 bp, Homo sapiens
  source 1..2188: mol_type = unassigned DNA
atgtgcatgtgccaggcctcgcctccccccgccgccctagcgggatgtctgctgtcaagctgtgttcagccagccagagagcatggaggggctttctccaaagcagagtggctttccaactgcatcaacaagtatgggtctccgtacaccaaaaactcaggcttcgccacctgcgtgcaaaacctgcctgaccagtgcacgcccaacccctgcgataggaaggggacccaagcctgccaggacctcatgggcaacttcttctgcctgtgtaaagctggctgggggggccggctctgcgacaaagatgtcaacgaatgcagccaggagaacgggggctgcctccagatctgccacaacaagccgggtagcttccactgttcctgccacagcggcttcgagctctcctctgatggcaggacctgccaagacatagacgagtgcgcagactcggaggcctgcggggaggcgcgctgcaagaacctgcccggctcctactcctgcctctgtgacgagggctttgcgtacagctcccaggagaaggcttgccgagatgtggacgagtgtctgcagggccgctgtgagcaggtctgcgtgaactccccagggagctacacctgccactgtgacgggcgtgggggcctcaagctgtcccaggacatggacacctgtgaggacatcttgccgtgcgtgcccttcagcgtggccaagagtgtgaagtccttgtacctgggccggatgttcagtgggacccccgtgatccgactgcgcttcaagaggctgcagcccaccaggctggtagctgagtttgacttccggacctttgaccccgagggcatcctcctctttgccggaggccaccaggacagcacctggatcgtgctggccctgagagccggccggctggagctgcagctgcgctacaacggtgtcggccgtgtcaccagcagcggcccggtcatcaaccatggcatgtggcagacaatctctgttgaggagctggcgcggaatctggtcatcaaggtcaacagggatgctgtcatgaaaatcgcggtggccggggacttgttccaaccggagcgaggactgtatcatctgaacctgaccgtgggaggtattcccttccatgagaaggacctcgtgcagcctataaaccctcgtctggatggctgcatgaggagctggaactggctgaacggagaagacaccaccatccaggaaacggtgaaagtgaacacgaggatgcagtgcttctcggtgacggagagaggctctttctaccccgggagcggcttcgccttctacagcctggactacatgcggacccctctggacgtcgggactgaatcaacctgggaagtagaagtcgtggctcacatccgcccagccgcagacacaggcgtgctgtttgcgctctgggcccccgacctccgtgccgtgcctctctctgtggcactggtagactatcactccacgaagaaactcaagaagcagctggtggtcctggccgtggagcatacggccttggccctaatggagatcaaggtctgcgacggccaagagcacgtggtcaccgtctcgctgagggacggtgaggccaccctggaggtggacggcaccaggggccagagcgaggtgagcgccgcgcagctgcaggagaggctggccgtgctcgagaggcacctgcggagccccgtgctcacctttgctggcggcctgccagatgtgccggtgacttcagcgccagtcaccgcgttctaccgcggctgcatgacactggaggtcaaccggaggctgctggacctggacgaggcggcgtacaagcacagcgacatcacggcccactcctgcccccccgtggagcccgccgcagcctaggcccccacgggacgcggcaggcttctcagtctctgtccgagacagccgggaggagcctgggggctcctcaccacgtggggccatgctgagagctgggctttcctctgtgaccatcccggcctgtaacatatctgtaaatagtgagatggacttggggcctctgacgccgcgcactcagccgtgggcccgggcgcggggaggccggcgcagcgcagagcgggctcgaagaaaataattctctattatttttattaccaagcgcttctttctgactctaaaatatggaaaataaaatatttacagaaagctttgt

SEQ ID NO: 12843 - DNA, 2632 bp, Homo sapiens
  source 1..2632: mol_type = unassigned DNA
ccgagcgcttgaggtgccgcagccgccgccgccgccgccgccgcgatgtgaccttcagggccgccaggacgggatgaccggagcctccgccccgcggcgcccgcggctcgcctcggcctcccgggcgctctgaccgcgcgtccccggcccgccatggccccttcgctctcgcccgggcccgccgccctgcgccgcgcgccgcagctgctgctgctgctgctggccgcggagtgcgcgcttgccgcgctgttgccggcgcgcgaggccacgcagttcctgcggcccaggcagcgccgcgcctttcaggtcttcgaggaggccaagcagggccacctggagagggagtgcgtggaggagctgtgcagccgcgaggaggcgcgggaggtgttcgagaacgaccccgagacggattatttttacccaagatacttagactgcatcaacaagtatgggtctccgtacaccaaaaactcaggcttcgccacctgcgtgcaaaacctgcctgaccagtgcacgcccaacccctgcgataggaaggggacccaagcctgccaggacctcatgggcaacttcttctgcctgtgtaaagctggctgggggggccggctctgcgacaaagatgtcaacgaatgcagccaggagaacgggggctgcctccagatctgccacaacaagccgggtagcttccactgttcctgccacagcggcttcgagctctcctctgatggcaggacctgccaagacatagacgagtgcgcagactcggaggcctgcggggaggcgcgctgcaagaacctgcccggctcctactcctgcctctgtgacgagggctttgcgtacagctcccaggagaaggcttgccgagatgtggacgagtgtctgcagggccgctgtgagcaggtctgcgtgaactccccagggagctacacctgccactgtgacgggcgtgggggcctcaagctgtcccaggacatggacacctgtgagctagaggcggggtggccactcccgaggcacaggagggacagtggacccgctgcgcggccggggcgtggggctcaggggagcaggagtgaaggccacatccccgaccggcgtggcccccgtccgtggcaggacatcttgccgtgcgtgcccttcagcgtggccaagagtgtgaagtccttgtacctgggccggatgttcagtgggacccccgtgatccgactgcgcttcaagaggctgcagcccaccaggctggtagctgagtttgacttccggacctttgaccccgagggcatcctcctctttgccggaggccaccaggacagcacctggatcgtgctggccctgagagccggccggctggagctgcagctgcgctacaacggtgtcggccgtgtcaccagcagcggcccggtcatcaaccatggcatgtggcagacaatctctgttgaggagctggcgcggaatctggtcatcaaggtcaacagggatgctgtcatgaaaatcgcggtggccggggacttgttccaaccggagcgaggactgtatcatctgaacctgaccgtgggaggtattcccttccatgagaaggacctcgtgcagcctataaaccctcgtctggatggctgcatgaggagctggaactggctgaacggagaagacaccaccatccaggaaacggtgaaagtgaacacgaggatgcagtgcttctcggtgacggagagaggctctttctaccccgggagcggcttcgccttctacagcctggactacatgcggacccctctggacgtcgggactgaatcaacctgggaagtagaagtcgtggctcacatccgcccagccgcagacacaggcgtgctgtttgcgctctgggcccccgacctccgtgccgtgcctctctctgtggcactggtagactatcactccacgaagaaactcaagaagcagctggtggtcctggccgtggagcatacggccttggccctaatggagatcaaggtctgcgacggccaagagcacgtggtcaccgtctcgctgagggacggtgaggccaccctggaggtggacggcaccaggggccagagcgaggtgagcgccgcgcagctgcaggagaggctggccgtgctcgagaggcacctgcggagccccgtgctcacctttgctggcggcctgccagatgtgccggtgacttcagcgccagtcaccgcgttctaccgcggctgcatgacactggaggtcaaccggaggctgctggacctggacgaggcggcgtacaagcacagcgacatcacggcccactcctgcccccccgtggagcccgccgcagcctaggcccccacgggacgcggcaggcttctcagtctctgtccgagacagccgggaggagcctgggggctcctcaccacgtggggccatgctgagagctgggctttcctctgtgaccatcccggcctgtaacatatctgtaaatagtgagatggacttggggcctctgacgccgcgcactcagccgtgggcccgggcgcggggaggccggcgcagcgcagagcgggctcgaagaaaataattctctattatttttattaccaagcgcttctttctgactctaaaatatggaaaataaaatatttacagaaagctttgt

SEQ ID NO: 12844 - DNA, 2505 bp, Homo sapiens
  source 1..2505: mol_type = unassigned DNA
cacaccgacctgtcacaccggtgcctgtcacaccactgcctgtcacactgacttgtcaccggtgtctgtcacaccgacctgtcacactggtgcctgtcacactggtgcctgtcacaccgacctgtcacaccggtgcctgtcacaccgacctgtcacactgacctgtcacaccggtaggaatgcagtacccacatgtggacgtttctgggcagggcggctcttgtctttcctcttcagcctgggcctgtgcctgggggttgatgagagtgagcatttatttaaaaagcaaaaccacaggtggaaagagtcaccaggacagcttctcggagtcgcagacctgggatgcagccgtggggctcttgggtctgggctgcgacgttcagggcttccagccagccctcgccttgaggttctttgcctcgctgcctcatgtactcatgcagagggtgtcggacccctgcgagatgtccagctcaccctggctgcccacggtgggcagggcaggcctggctcagccccagcccctccatcttccaggggtgtcagctcacaccggctttggttctgtcccccttcgggcagcgtggagaaaccacagcccagaacagggaactttccaggacagccatcttcaaggcatccatatctatttcataatagtgtatactttttaatgattctctgtaatttttgtatgcttgaaatatttcataatttaaaaataaagggtcaagggaaatgagcagggaaggagatgacggggacccccgagaagccctgtgggaagcggctgctgcaagcccgcccttcacctgggagtcccagtggggcaggtgtgacagcctctggggtctcagcagctagaggcggggtggccactcccgaggcacaggagggacagtggacccgctgcgcggccggggcgtggggctcaggggagcaggagtgaaggccacatccccgaccggcgtggcccccgtccgtggcaggacatcttgccgtgcgtgcccttcagcgtggccaagagtgtgaagtccttgtacctgggccggatgttcagtgggacccccgtgatccgactgcgcttcaagaggctgcagcccaccaggctggtagctgagtttgacttccggacctttgaccccgagggcatcctcctctttgccggaggccaccaggacagcacctggatcgtgctggccctgagagccggccggctggagctgcagctgcgctacaacggtgtcggccgtgtcaccagcagcggcccggtcatcaaccatggcatgtggcagacaatctctgttgaggagctggcgcggaatctggtcatcaaggtcaacagggatgctgtcatgaaaatcgcggtggccggggacttgttccaaccggagcgaggactgtatcatctgaacctgaccgtgggaggtattcccttccatgagaaggacctcgtgcagcctataaaccctcgtctggatggctgcatgaggagctggaactggctgaacggagaagacaccaccatccaggaaacggtgaaagtgaacacgaggatgcagtgcttctcggtgacggagagaggctctttctaccccgggagcggcttcgccttctacagcctggactacatgcggacccctctggacgtcgggactgaatcaacctgggaagtagaagtcgtggctcacatccgcccagccgcagacacaggcgtgctgtttgcgctctgggcccccgacctccgtgccgtgcctctctctgtggcactggtagactatcactccacgaagaaactcaagaagcagctggtggtcctggccgtggagcatacggccttggccctaatggagatcaaggtctgcgacggccaagagcacgtggtcaccgtctcgctgagggacggtgaggccaccctggaggtggacggcaccaggggccagagcgaggtgagcgccgcgcagctgcaggagaggctggccgtgctcgagaggcacctgcggagccccgtgctcacctttgctggcggcctgccagatgtgccggtgacttcagcgccagtcaccgcgttctaccgcggctgcatgacactggaggtcaaccggaggctgctggacctggacgaggcggcgtacaagcacagcgacatcacggcccactcctgcccccccgtggagcccgccgcagcctaggcccccacgggacgcggcaggcttctcagtctctgtccgagacagccgggaggagcctgggggctcctcaccacgtggggccatgctgagagctgggctttcctctgtgaccatcccggcctgtaacatatctgtaaatagtgagatggacttggggcctctgacgccgcgcactcagccgtgggcccgggcgcggggaggccggcgcagcgcagagcgggctcgaagaaaataattctctattatttttattaccaagcgcttctttctgactctaaaatatggaaaataaaatatttacagaaagctttgt

SEQ ID NO: 12845 - DNA, 2170 bp, Homo sapiens
  source 1..2170: mol_type = unassigned DNA
ttgattgaaaccagtaaatgcttctctttggggttggggttttagtttcaaatgcccccggggggttactttttacggccccgtgtcctgtagcaccgtcatttaaatggaacagcacagcgtgcaccgccgccccccacccctccaccaagcagggcccttcccagctctccacctgctgggctgaagtcagccttcccagccgggccttgatcagaagcgtgcaccaacaccccgggagctgcccggtcaggggaggagggcagggaaatggggccagggcgcgctggccccacagagtctggatgcgacctctgggtggtgccctggccagtccctgcagccgcctgccccagccccgtctgagatgccgctgtgctgcggttggccggtttttttttgcttgcagacatagacgagtgcgcagactcggaggcctgcggggaggcgcgctgcaagaacctgcccggctcctactcctgcctctgtgacgagggctttgcgtacagctcccaggagaaggcttgccgagatgtggacgagtgtctgcagggccgctgtgagcaggtctgcgtgaactccccagggagctacacctgccactgtgacgggcgtgggggcctcaagctgtcccaggacatggacacctgtgaggacatcttgccgtgcgtgcccttcagcgtggccaagagtgtgaagtccttgtacctgggccggatgttcagtgggacccccgtgatccgactgcgcttcaagaggctgcagcccaccaggctggtagctgagtttgacttccggacctttgaccccgagggcatcctcctctttgccggaggccaccaggacagcacctggatcgtgctggccctgagagccggccggctggagctgcagctgcgctacaacggtgtcggccgtgtcaccagcagcggcccggtcatcaaccatggcatgtggcagacaatctctgttgaggagctggcgcggaatctggtcatcaaggtcaacagggatgctgtcatgaaaatcgcggtggccggggacttgttccaaccggagcgaggactgtatcatctgaacctgaccgtgggaggtattcccttccatgagaaggacctcgtgcagcctataaaccctcgtctggatggctgcatgaggagctggaactggctgaacggagaagacaccaccatccaggaaacggtgaaagtgaacacgaggatgcagtgcttctcggtgacggagagaggctctttctaccccgggagcggcttcgccttctacagcctggactacatgcggacccctctggacgtcgggactgaatcaacctgggaagtagaagtcgtggctcacatccgcccagccgcagacacaggcgtgctgtttgcgctctgggcccccgacctccgtgccgtgcctctctctgtggcactggtagactatcactccacgaagaaactcaagaagcagctggtggtcctggccgtggagcatacggccttggccctaatggagatcaaggtctgcgacggccaagagcacgtggtcaccgtctcgctgagggacggtgaggccaccctggaggtggacggcaccaggggccagagcgaggtgagcgccgcgcagctgcaggagaggctggccgtgctcgagaggcacctgcggagccccgtgctcacctttgctggcggcctgccagatgtgccggtgacttcagcgccagtcaccgcgttctaccgcggctgcatgacactggaggtcaaccggaggctgctggacctggacgaggcggcgtacaagcacagcgacatcacggcccactcctgcccccccgtggagcccgccgcagcctaggcccccacgggacgcggcaggcttctcagtctctgtccgagacagccgggaggagcctgggggctcctcaccacgtggggccatgctgagagctgggctttcctctgtgaccatcccggcctgtaacatatctgtaaatagtgagatggacttggggcctctgacgccgcgcactcagccgtgggcccgggcgcggggaggccggcgcagcgcagagcgggctcgaagaaaataattctctattatttttattaccaagcgcttctttctgactctaaaatatggaaaataaaatatttacagaaagctttgt

SEQ ID NO: 12846 - DNA, 8211 bp, Homo sapiens
  source 1..8211: mol_type = unassigned DNA
gtcccccgcctgcctgaggacccccgcgcaccccagagacggcgcgcgcccagagcgcgggagcccggagcgccgggcgcctgggaccccgcggagccgctgcccagcccgtggggctcggcgggaatgcaggctgcgctgtgaacccgggcgccaaggccatgtccggcgctcgctgccggaccctgtaccccttctccggggagcggcacggccaggggctgcgcttcgccgcgggcgagctgatcacgctgctgcaggtcccggacggcggctggtgggaaggcgagaaggaggacgggctccgtggctggttcccggcgagctacgtgcagttgctggagaagcctggaatggtcccccctccgccgggagaagaaagccagacggtcatccttccacctggctggcagagctacctgtcgcctcagggccggcggtactatgtcaacacgaccaccaatgagaccacctgggaacgtcccagcagttctcctgggattccagccagccctggctctcacaggagctctctgcctccaacagtgaatggataccacgcatcagggaccccagcgcaccctccagagactgcccacatgagtgtccgaaaatccaccggtgattcccagaacctgggatcctcatcgccaagcaaaaagcagagcaaggaaaacaccatcacaataaactgtgtgacgttccctcacccagacacgatgccggaacagcagctgctgaaaccaaccgagtggagctactgcgactacttctgggctgataagaaggacccccaaggcaacggcaccgtggctgggtttgaactactgctccagaaacagctgaagggcaaacaaatgcagaaggaaatgtcagaattcatccgggaaaggataaagattgaagaagactatgcgaagaacttagctaagctctctcagaactccttggcttcacaggaggaaggctccttgggagaggcgtgggcccaggtgaagaagagcctggcggacgaagcagaagttcacctcaagttctctgccaagcttcacagcgaggtggagaagcccctgatgaacttccgtgagaacttcaagaaagacatgaagaagtgcgaccaccacattgccgaccttcgcaagcagctcgccagccgctatgcctcggtggagaaggcccggaaagccctcacagagcggcagagagacctggagatgaagacccagcagctggagatcaagctgagcaacaagacagaggaggacatcaagaaggcgcggagaaagtccacacaggctggagacgacctcatgcgctgtgtggatctctacaaccaggcccagtccaaatggtttgaagagatggtgaccaccacattggagctagagcggctggaggtggagagggtagagatgatccggcagcacctgtgccagtacacgcagctgcggcatgaaacagacatgttcaaccaaagcacagtcgagcccgtggatcagctgcttcgaaaagtggacccggccaaagacagggagctgtgggtcagagagcacaagacgggcaacatccgccctgtggacatggagatctagatgggcctgtgcagcttcggggggtcctgctggggaggggggctgggctcccaccatggggcccatgccgagtggatgccccccaccctctctcctgggccactgaggagaggggagagagctggtgattccagaagggtgacccggacagcctagctgggggctcccccatattcccaggcccagaagacagacccacagccctgcccttgtctctgaggctgaagaccccctgactcccatgctgtgcttgccgctctgaaacaaacagaggctggaactttgtggtccttgccgagttttgtaggggtcactgtcacatgcttgtgccctggaagccccaaggctcttcctccagctggctcccttgtctccagggctttggaggatcagggtagggagggctctgtctctaagccaggtgtcaggatcagaatcatgggtagaaggtgccattcagctcacagccgcacccagaatcctttgcagccctccttctttatttttttcccattgcattctgggagtccacatctggctttctcagccactgttcatcaccaggggttttaggaggaaggcttggctcctgtcttcccagacccaccatgcctggagaggtcaggatggaactacctcattcggcaaattagccccaaattgagcgctgaatcgtgtcccatgagatcaggcgccatctgtaaagtctcctctggaaatgccaatccatccttcccccagctgcttcctcggggaggcccctgcccccaccctgccagcccttcccagtctcattagaggaagctttccaaagttctcagttatcaagacctcatccagctcgtccaaaggcttcagggatggaaacaaaccagctcgtctcagaggccagcaagctggggcctgtccgccacggtgccctgtgcacctttgggctgccctggcccccactctcccgggccgcccaccacaggctcttaatggggccgggtcagtcctacatgtgagatgggttagggcaagtctttgccatcccccagatggctctgtcttcttgtgtatggcagggctgggactgctgtcccttgtacagttttctgtcactggtgggcactggacaggcatagcagactctcttgtggccacactaggttgtcgcctttcaggcagtgtcccgccacctttgcttcccgctccttctggacattccagagccctgcaccaaacccttacttggtgtctgcacctcctttccctctctccatcttccaatccctggaaaagtctggtctgagtgtgacttgggaagctttcagtgctgctgtttggcccagctcattactttctccctttctctaccacagcaaacacattctccaccatgtcagtctaaagagtctaaaggggccgggagaagcatgagcgaggggcagattctagtcgggagcccatgccctggaaatccatctttcttcatctttcccattgaccactttgggtttgacctgcacatctgcagtgagggcagaattcaacaagcacaactcactggtctttcagtcaacgtgctagaaaccgatgacttattaatctctaattttttggcgcctctttcattgaatgagaattgctttcgtatagttcacattagaaaaatgcctaatatactaaagtaaaccaaacgttgtcacttttctcttgttcttgaaacattgcaaccaaaaaggtcagcacaaaggccttcacctacgtgaagacctcctggtaggatctgtccatgggatggagaaccactctgtccagatctggggttgggtcatgacaccagctaccaattttagaatattatttcttggtttctttatgaaaaatgggtgctagtggtaattgctttgtggcttagtaaactactctgtggatgatttccaaacattcaaagccaatagccttgttattaacaagatattttgagtacaatatggctcattgacttttccattacatctgaggattccagagtcctctgttcatccctgggatagagtgagccctcttgcgtcttccagggtagctcaggttggcccagtttgggccagtccatttttggaggtcactctttcccccctcatcccctcacctccttctctttacccccttcacgtacttcctttctttcttccctctgttattcattcatcaagcaggttaaagccattgtgctaagatctaatctgaggacactataatggccctgtcgtcagggaagcccgtgatcgctcgttttcaggggtcttaccggtcagcaaccttggcattgatacataggcactctacagaatttaagttttcagaggtaagtctgttgttctgattaatctgcattcattcagcgaatgctcaagacaagccaggcatgctgagaagcggcgctctagttgtatgtaagatgggcattcctctgctctcctctattctccatgtcgactgagaagagtataataagaacattgtaccctctccacacttaaccctctgggattctttattataatataaaccaccgtcgtgaggcatttacctgttggatggaaggtagacagcaacaagattttaatcacctggtcaccagaccctcacggcccatatccaattcgaatttcagaaatttctctgtttgctttaaataactctttacaaataagggtcgggcacggtggctcacgcctgtaatcccagctctttgggaggccgaggtgggcagatcacgaggtcaggagatcgagaccatcctggctaacatggtgaaaccccgtctctgctaaaaatacaaaaaattagccagatgtggtggtgcacacctgtagtcccaactattcggcaggctgaggcagtagaatcgcttgaacctgggaggcggagattgcagtgaaccaagatcgggccactgcactccagcttgggtgacagagcaagactccatctcaaaaaaattataaataactctttgcaaataggaaagtgaagctcaagggtaaccagtgaggctatgaaattgccagtgaattaagaccagggctagagtcaacagtccagaacccctatccgtatgaacaggggcccgtttctggttgaaatcaaggttaggatgcaactgagaaaataaaagactgcactttggagaggcaagcacgctatccgggttgttgttttgttttatgtcttggtgcttaggtgaggacttagctgggtttattcaaagtgggcgggtctgggctattcttgagaatgtcccttccatttctgagaacaagtcagccccttctacctgcctccacccaggagactgatgcacaagatctgtttgtgaaagcctgatttaaaaagaaaaaaaaaattccttaagccaaatggtgttccaagttggttgctgtgacaacctccaggaagagccacttgttaccctctattctttctagtgctttcagtcagtggcaacacataggccccttggaccgtggggatggcggccctgagattctgtcagtgggaccaccctgggcctcctttctacctccactcagcaccctgttggccaaggagaatttctgcggtgggaggcagtgctctgctagtcaggattgataaacagctgggcacaccgaaacagtgtaccaacgaattcaccaaccaggggtttctttccctaccctttgtgaaaaccaatcaattactagatgagtggatggatgcagaaaaatctgggctgagccaaagtcccttttggaaatacaagccataacattcgaaggacatcagcgaccttggcttgtttaggtgattttacttccagctgcaggtagtcttgacaaggagtgtttaaacagaaggctcaagatgcattccttgtgtaggtcggagagagcacttctaatgttaagtggggtacagatcagctgcccccccacgtagcctggacatcgtcttatccccataatccttgccatccctacaaggcccatcgccaccaccttttcccaggtttattgaggtatgattgacatccagtaaaattcaccctttggaaatatacagctctgtgaattttgacaaatttagtgtcttgtgaccatcaccaagatcaacctgtttttaaccctccaaaaaattcccttctcctgccctctttccctggcaaccctgattgattatctgatcctataattttgccttttctagaatgtcatataaatggagtcacactgatgtcgccttttgagtctggcatctttccctcagcttaatgcttttgagtcattcatgatgtgtgcgtgtggtttgttccttctccttgccgggaagtatttcattgcatgggcgtactactctgcttctttatttttacactgagcctttcgccctggaagttcttggcccagggtcttcaacttgtttgcacgaccacttccagcttgctgcttccttcagttccccaggctcctcctccaaatgccagctgtgcccacaagctgttcttagggctcacactcgccttttggcgcgtggtgggtttttggtagtgcagaaagaatccagggatgggaggggaagggacggatgggtgctcaattgctgctcacgtctgctgcaacctgaagcttgcatctcagccagcagatctgctcccttctgggacccaggcttcagtgtcacacggtccttggctatgtattgggcgttggaggctttgaaaggcgagcagaagcagcatggacaagaaggctggggctggccctggggctcatcatgatgctttcctggatctgttgcttcatctgcaagctgagggtgtttgttctagatgagtgtctcaggccaccggcaactgcatgtacctcctccctttctcatttccaatgatgtaccctgtacacgtgttcatgctgtgtctggctctcatctgcacaatcgtgcatagaattgcctcaagtcctggtgagagagatgccgtggtacttttccatttagattcaaatggagctaaaattaagagttttatgagctgttaagaatgaggtagtttctcctaggaccccccaaagacagtgcaagtaatgaccgtttggatctcattcgtcgatctttgatagtatgttctggagtctactccccaggagccaggacaggcgtgaagatggagtccttgtcgcagctggagccttgcctagctggtgatcacacagcctggcctgtacctgcaccccactggatggtggtacatggtggcagggacaggaccacacccagttaaggccagaccaggctgagtgtgacccctgaggtaaacactccactaagctgtgtcttgttcatgccccctgctcagtgaaaggtgagtcccgagaccagttgggtacctctctatgcgaaccagagacatttctggatccaggccaggtgaagattagggccaggaagcctgagcccccggggcctcaaggtagggagccgaagaggctgccaggactctgctgggttgaaatttgccggggaggactcttgtctccccctcaggagtatttttgttgaggctttcctggaggtgaagaagcaattcccattgcagcaggttagagcgagaatcagacagagggcaaaaaccaattcgcttctccccacgttctaaatgctggggcatggctgtcaggagggcttcctgggaggtgtctctgggggtggggtgaggttggggcgatggcctttggagattgcgtgtggtgttcaggactgttccttggtgtttgagggaaactttagtgggattgcagtggaatgtaaggtcagggcacgtgggtgctctctcggggtggggtgactgggagacctagagggaaagcctgctatgcagggggagagcacaggactggccctgctctgcggcctcctttgtcccataacctgaagttaagtcacatcccctgtcgggacctccgtgcactcatctgtcaagtgggggcgcttcccttccagcatcacctgcagcagacgggctctcgggagtcgtgggttccaggcagctgtgtggacccagggacagacattcaaagggacgccagccatccttagtgacaggggccccaacttagcatcccttcccttccgttaggaaggagatgaccggaagcaaccccttcacagacacgagcacatcggcaaaccctatgaaagtggaattttctaacaaaataaacttgcttgtttgatctgttttctgtaacttttgctaaatactttatacatttttcatgttaaagagccgtgtctcccgccagcactcctcaccccggtatgaatgtgtttcctccacattgtatatccttccaccctctggctgcctagatcagtaaataaaattgatgtaatataatttataagtaacactgttgaaaccctgatcccagtggaggctgtaacccacctgcccccgcaccacccccctgacccctgttaccgcatttgtgtgtattaatgctgaagaattaaatgtttaaagagtttaaattttgaaggcgtttgctatatacagttgtcctgcattattataaagagttttcaggaagtt

SEQ ID NO: 12847 - DNA, 8181 bp, Homo sapiens
  source 1..8181: mol_type = unassigned DNA
agaaacattgcatctggaaagtccagaacaagttgttaatttcccagcaagcactggagcggatttggaaggaactatgcaatgtagtgggttctttgtgaaagaacagcaatgagcaaagccacaggaacctccgctggggtgcccagaacactggccctgggctagcgacttgcctcagccccatttcccggagaggctgccatgaagaggaagccggcggagtcttggtgctgagtctgagggcttcaggcaggacccaagactctcctctgaggtagcagcccccagagaaggttagctgttctctgatgaagcctggaatggtcccccctccgccgggagaagaaagccagacggtcatccttccacctggctggcagagctacctgtcgcctcagggccggcggtactatgtcaacacgaccaccaatgagaccacctgggaacgtcccagcagttctcctgggattccagccagccctggctctcacaggagctctctgcctccaacagtgaatggataccacgcatcagggaccccagcgcaccctccagagactgcccacatgagtgtccgaaaatccaccggtgattcccagaacctgggatcctcatcgccaagcaaaaagcagagcaaggaaaacaccatcacaataaactgtgtgacgttccctcacccagacacgatgccggaacagcagctgctgaaaccaaccgagtggagctactgcgactacttctgggctgataagaaggacccccaaggcaacggcaccgtggctgggtttgaactactgctccagaaacagctgaagggcaaacaaatgcagaaggaaatgtcagaattcatccgggaaaggataaagattgaagaagactatgcgaagaacttagctaagctctctcagaactccttggcttcacaggaggaaggctccttgggagaggcgtgggcccaggtgaagaagagcctggcggacgaagcagaagttcacctcaagttctctgccaagcttcacagcgaggtggagaagcccctgatgaacttccgtgagaacttcaagaaagacatgaagaagtgcgaccaccacattgccgaccttcgcaagcagctcgccagccgctatgcctcggtggagaaggcccggaaagccctcacagagcggcagagagacctggagatgaagacccagcagctggagatcaagctgagcaacaagacagaggaggacatcaagaaggcgcggagaaagtccacacaggctggagacgacctcatgcgctgtgtggatctctacaaccaggcccagtccaaatggtttgaagagatggtgaccaccacattggagctagagcggctggaggtggagagggtagagatgatccggcagcacctgtgccagtacacgcagctgcggcatgaaacagacatgttcaaccaaagcacagtcgagcccgtggatcagctgcttcgaaaagtggacccggccaaagacagggagctgtgggtcagagagcacaagacgggcaacatccgccctgtggacatggagatctagatgggcctgtgcagcttcggggggtcctgctggggaggggggctgggctcccaccatggggcccatgccgagtggatgccccccaccctctctcctgggccactgaggagaggggagagagctggtgattccagaagggtgacccggacagcctagctgggggctcccccatattcccaggcccagaagacagacccacagccctgcccttgtctctgaggctgaagaccccctgactcccatgctgtgcttgccgctctgaaacaaacagaggctggaactttgtggtccttgccgagttttgtaggggtcactgtcacatgcttgtgccctggaagccccaaggctcttcctccagctggctcccttgtctccagggctttggaggatcagggtagggagggctctgtctctaagccaggtgtcaggatcagaatcatgggtagaaggtgccattcagctcacagccgcacccagaatcctttgcagccctccttctttatttttttcccattgcattctgggagtccacatctggctttctcagccactgttcatcaccaggggttttaggaggaaggcttggctcctgtcttcccagacccaccatgcctggagaggtcaggatggaactacctcattcggcaaattagccccaaattgagcgctgaatcgtgtcccatgagatcaggcgccatctgtaaagtctcctctggaaatgccaatccatccttcccccagctgcttcctcggggaggcccctgcccccaccctgccagcccttcccagtctcattagaggaagctttccaaagttctcagttatcaagacctcatccagctcgtccaaaggcttcagggatggaaacaaaccagctcgtctcagaggccagcaagctggggcctgtccgccacggtgccctgtgcacctttgggctgccctggcccccactctcccgggccgcccaccacaggctcttaatggggccgggtcagtcctacatgtgagatgggttagggcaagtctttgccatcccccagatggctctgtcttcttgtgtatggcagggctgggactgctgtcccttgtacagttttctgtcactggtgggcactggacaggcatagcagactctcttgtggccacactaggttgtcgcctttcaggcagtgtcccgccacctttgcttcccgctccttctggacattccagagccctgcaccaaacccttacttggtgtctgcacctcctttccctctctccatcttccaatccctggaaaagtctggtctgagtgtgacttgggaagctttcagtgctgctgtttggcccagctcattactttctccctttctctaccacagcaaacacattctccaccatgtcagtctaaagagtctaaaggggccgggagaagcatgagcgaggggcagattctagtcgggagcccatgccctggaaatccatctttcttcatctttcccattgaccactttgggtttgacctgcacatctgcagtgagggcagaattcaacaagcacaactcactggtctttcagtcaacgtgctagaaaccgatgacttattaatctctaattttttggcgcctctttcattgaatgagaattgctttcgtatagttcacattagaaaaatgcctaatatactaaagtaaaccaaacgttgtcacttttctcttgttcttgaaacattgcaaccaaaaaggtcagcacaaaggccttcacctacgtgaagacctcctggtaggatctgtccatgggatggagaaccactctgtccagatctggggttgggtcatgacaccagctaccaattttagaatattatttcttggtttctttatgaaaaatgggtgctagtggtaattgctttgtggcttagtaaactactctgtggatgatttccaaacattcaaagccaatagccttgttattaacaagatattttgagtacaatatggctcattgacttttccattacatctgaggattccagagtcctctgttcatccctgggatagagtgagccctcttgcgtcttccagggtagctcaggttggcccagtttgggccagtccatttttggaggtcactctttcccccctcatcccctcacctccttctctttacccccttcacgtacttcctttctttcttccctctgttattcattcatcaagcaggttaaagccattgtgctaagatctaatctgaggacactataatggccctgtcgtcagggaagcccgtgatcgctcgttttcaggggtcttaccggtcagcaaccttggcattgatacataggcactctacagaatttaagttttcagaggtaagtctgttgttctgattaatctgcattcattcagcgaatgctcaagacaagccaggcatgctgagaagcggcgctctagttgtatgtaagatgggcattcctctgctctcctctattctccatgtcgactgagaagagtataataagaacattgtaccctctccacacttaaccctctgggattctttattataatataaaccaccgtcgtgaggcatttacctgttggatggaaggtagacagcaacaagattttaatcacctggtcaccagaccctcacggcccatatccaattcgaatttcagaaatttctctgtttgctttaaataactctttacaaataagggtcgggcacggtggctcacgcctgtaatcccagctctttgggaggccgaggtgggcagatcacgaggtcaggagatcgagaccatcctggctaacatggtgaaaccccgtctctgctaaaaatacaaaaaattagccagatgtggtggtgcacacctgtagtcccaactattcggcaggctgaggcagtagaatcgcttgaacctgggaggcggagattgcagtgaaccaagatcgggccactgcactccagcttgggtgacagagcaagactccatctcaaaaaaattataaataactctttgcaaataggaaagtgaagctcaagggtaaccagtgaggctatgaaattgccagtgaattaagaccagggctagagtcaacagtccagaacccctatccgtatgaacaggggcccgtttctggttgaaatcaaggttaggatgcaactgagaaaataaaagactgcactttggagaggcaagcacgctatccgggttgttgttttgttttatgtcttggtgcttaggtgaggacttagctgggtttattcaaagtgggcgggtctgggctattcttgagaatgtcccttccatttctgagaacaagtcagccccttctacctgcctccacccaggagactgatgcacaagatctgtttgtgaaagcctgatttaaaaagaaaaaaaaaattccttaagccaaatggtgttccaagttggttgctgtgacaacctccaggaagagccacttgttaccctctattctttctagtgctttcagtcagtggcaacacataggccccttggaccgtggggatggcggccctgagattctgtcagtgggaccaccctgggcctcctttctacctccactcagcaccctgttggccaaggagaatttctgcggtgggaggcagtgctctgctagtcaggattgataaacagctgggcacaccgaaacagtgtaccaacgaattcaccaaccaggggtttctttccctaccctttgtgaaaaccaatcaattactagatgagtggatggatgcagaaaaatctgggctgagccaaagtcccttttggaaatacaagccataacattcgaaggacatcagcgaccttggcttgtttaggtgattttacttccagctgcaggtagtcttgacaaggagtgtttaaacagaaggctcaagatgcattccttgtgtaggtcggagagagcacttctaatgttaagtggggtacagatcagctgcccccccacgtagcctggacatcgtcttatccccataatccttgccatccctacaaggcccatcgccaccaccttttcccaggtttattgaggtatgattgacatccagtaaaattcaccctttggaaatatacagctctgtgaattttgacaaatttagtgtcttgtgaccatcaccaagatcaacctgtttttaaccctccaaaaaattcccttctcctgccctctttccctggcaaccctgattgattatctgatcctataattttgccttttctagaatgtcatataaatggagtcacactgatgtcgccttttgagtctggcatctttccctcagcttaatgcttttgagtcattcatgatgtgtgcgtgtggtttgttccttctccttgccgggaagtatttcattgcatgggcgtactactctgcttctttatttttacactgagcctttcgccctggaagttcttggcccagggtcttcaacttgtttgcacgaccacttccagcttgctgcttccttcagttccccaggctcctcctccaaatgccagctgtgcccacaagctgttcttagggctcacactcgccttttggcgcgtggtgggtttttggtagtgcagaaagaatccagggatgggaggggaagggacggatgggtgctcaattgctgctcacgtctgctgcaacctgaagcttgcatctcagccagcagatctgctcccttctgggacccaggcttcagtgtcacacggtccttggctatgtattgggcgttggaggctttgaaaggcgagcagaagcagcatggacaagaaggctggggctggccctggggctcatcatgatgctttcctggatctgttgcttcatctgcaagctgagggtgtttgttctagatgagtgtctcaggccaccggcaactgcatgtacctcctccctttctcatttccaatgatgtaccctgtacacgtgttcatgctgtgtctggctctcatctgcacaatcgtgcatagaattgcctcaagtcctggtgagagagatgccgtggtacttttccatttagattcaaatggagctaaaattaagagttttatgagctgttaagaatgaggtagtttctcctaggaccccccaaagacagtgcaagtaatgaccgtttggatctcattcgtcgatctttgatagtatgttctggagtctactccccaggagccaggacaggcgtgaagatggagtccttgtcgcagctggagccttgcctagctggtgatcacacagcctggcctgtacctgcaccccactggatggtggtacatggtggcagggacaggaccacacccagttaaggccagaccaggctgagtgtgacccctgaggtaaacactccactaagctgtgtcttgttcatgccccctgctcagtgaaaggtgagtcccgagaccagttgggtacctctctatgcgaaccagagacatttctggatccaggccaggtgaagattagggccaggaagcctgagcccccggggcctcaaggtagggagccgaagaggctgccaggactctgctgggttgaaatttgccggggaggactcttgtctccccctcaggagtatttttgttgaggctttcctggaggtgaagaagcaattcccattgcagcaggttagagcgagaatcagacagagggcaaaaaccaattcgcttctccccacgttctaaatgctggggcatggctgtcaggagggcttcctgggaggtgtctctgggggtggggtgaggttggggcgatggcctttggagattgcgtgtggtgttcaggactgttccttggtgtttgagggaaactttagtgggattgcagtggaatgtaaggtcagggcacgtgggtgctctctcggggtggggtgactgggagacctagagggaaagcctgctatgcagggggagagcacaggactggccctgctctgcggcctcctttgtcccataacctgaagttaagtcacatcccctgtcgggacctccgtgcactcatctgtcaagtgggggcgcttcccttccagcatcacctgcagcagacgggctctcgggagtcgtgggttccaggcagctgtgtggacccagggacagacattcaaagggacgccagccatccttagtgacaggggccccaacttagcatcccttcccttccgttaggaaggagatgaccggaagcaaccccttcacagacacgagcacatcggcaaaccctatgaaagtggaattttctaacaaaataaacttgcttgtttgatctgttttctgtaacttttgctaaatactttatacatttttcatgttaaagagccgtgtctcccgccagcactcctcaccccggtatgaatgtgtttcctccacattgtatatccttccaccctctggctgcctagatcagtaaataaaattgatgtaatataatttataagtaacactgttgaaaccctgatcccagtggaggctgtaacccacctgcccccgcaccacccccctgacccctgttaccgcatttgtgtgtattaatgctgaagaattaaatgtttaaagagtttaaattttgaaggcgtttgctatatacagttgtcctgcattattataaagagttttcaggaagtt

SEQ ID NO: 12848 - DNA, 7773 bp, Homo sapiens
  source 1..7773: mol_type = unassigned DNA
cccgagagctgggcgtgggaacagcgtggggtcagggagacccctgcttgccctggcccagaatatggtgacttaggattcagactgagcatccctgattccccagcgcctccaccctcagggaacctgaatggggggaaaaaatgtccaatatggagaacagctttgacgatgtttcttgcctctctccccagaacctgggatcctcatcgccaagcaaaaagcagagcaaggaaaacaccatcacaataaactgtgtgacgttccctcacccagacacgatgccggaacagcagctgctgaaaccaaccgagtggagctactgcgactacttctgggctgataagaaggacccccaaggcaacggcaccgtggctgggtttgaactactgctccagaaacagctgaagggcaaacaaatgcagaaggaaatgtcagaattcatccgggaaaggataaagattgaagaagactatgcgaagaacttagctaagctctctcagaactccttggcttcacaggaggaaggctccttgggagaggcgtgggcccaggtgaagaagagcctggcggacgaagcagaagttcacctcaagttctctgccaagcttcacagcgaggtggagaagcccctgatgaacttccgtgagaacttcaagaaagacatgaagaagtgcgaccaccacattgccgaccttcgcaagcagctcgccagccgctatgcctcggtggagaaggcccggaaagccctcacagagcggcagagagacctggagatgaagacccagcagctggagatcaagctgagcaacaagacagaggaggacatcaagaaggcgcggagaaagtccacacaggctggagacgacctcatgcgctgtgtggatctctacaaccaggcccagtccaaatggtttgaagagatggtgaccaccacattggagctagagcggctggaggtggagagggtagagatgatccggcagcacctgtgccagtacacgcagctgcggcatgaaacagacatgttcaaccaaagcacagtcgagcccgtggatcagctgcttcgaaaagtggacccggccaaagacagggagctgtgggtcagagagcacaagacgggcaacatccgccctgtggacatggagatctagatgggcctgtgcagcttcggggggtcctgctggggaggggggctgggctcccaccatggggcccatgccgagtggatgccccccaccctctctcctgggccactgaggagaggggagagagctggtgattccagaagggtgacccggacagcctagctgggggctcccccatattcccaggcccagaagacagacccacagccctgcccttgtctctgaggctgaagaccccctgactcccatgctgtgcttgccgctctgaaacaaacagaggctggaactttgtggtccttgccgagttttgtaggggtcactgtcacatgcttgtgccctggaagccccaaggctcttcctccagctggctcccttgtctccagggctttggaggatcagggtagggagggctctgtctctaagccaggtgtcaggatcagaatcatgggtagaaggtgccattcagctcacagccgcacccagaatcctttgcagccctccttctttatttttttcccattgcattctgggagtccacatctggctttctcagccactgttcatcaccaggggttttaggaggaaggcttggctcctgtcttcccagacccaccatgcctggagaggtcaggatggaactacctcattcggcaaattagccccaaattgagcgctgaatcgtgtcccatgagatcaggcgccatctgtaaagtctcctctggaaatgccaatccatccttcccccagctgcttcctcggggaggcccctgcccccaccctgccagcccttcccagtctcattagaggaagctttccaaagttctcagttatcaagacctcatccagctcgtccaaaggcttcagggatggaaacaaaccagctcgtctcagaggccagcaagctggggcctgtccgccacggtgccctgtgcacctttgggctgccctggcccccactctcccgggccgcccaccacaggctcttaatggggccgggtcagtcctacatgtgagatgggttagggcaagtctttgccatcccccagatggctctgtcttcttgtgtatggcagggctgggactgctgtcccttgtacagttttctgtcactggtgggcactggacaggcatagcagactctcttgtggccacactaggttgtcgcctttcaggcagtgtcccgccacctttgcttcccgctccttctggacattccagagccctgcaccaaacccttacttggtgtctgcacctcctttccctctctccatcttccaatccctggaaaagtctggtctgagtgtgacttgggaagctttcagtgctgctgtttggcccagctcattactttctccctttctctaccacagcaaacacattctccaccatgtcagtctaaagagtctaaaggggccgggagaagcatgagcgaggggcagattctagtcgggagcccatgccctggaaatccatctttcttcatctttcccattgaccactttgggtttgacctgcacatctgcagtgagggcagaattcaacaagcacaactcactggtctttcagtcaacgtgctagaaaccgatgacttattaatctctaattttttggcgcctctttcattgaatgagaattgctttcgtatagttcacattagaaaaatgcctaatatactaaagtaaaccaaacgttgtcacttttctcttgttcttgaaacattgcaaccaaaaaggtcagcacaaaggccttcacctacgtgaagacctcctggtaggatctgtccatgggatggagaaccactctgtccagatctggggttgggtcatgacaccagctaccaattttagaatattatttcttggtttctttatgaaaaatgggtgctagtggtaattgctttgtggcttagtaaactactctgtggatgatttccaaacattcaaagccaatagccttgttattaacaagatattttgagtacaatatggctcattgacttttccattacatctgaggattccagagtcctctgttcatccctgggatagagtgagccctcttgcgtcttccagggtagctcaggttggcccagtttgggccagtccatttttggaggtcactctttcccccctcatcccctcacctccttctctttacccccttcacgtacttcctttctttcttccctctgttattcattcatcaagcaggttaaagccattgtgctaagatctaatctgaggacactataatggccctgtcgtcagggaagcccgtgatcgctcgttttcaggggtcttaccggtcagcaaccttggcattgatacataggcactctacagaatttaagttttcagaggtaagtctgttgttctgattaatctgcattcattcagcgaatgctcaagacaagccaggcatgctgagaagcggcgctctagttgtatgtaagatgggcattcctctgctctcctctattctccatgtcgactgagaagagtataataagaacattgtaccctctccacacttaaccctctgggattctttattataatataaaccaccgtcgtgaggcatttacctgttggatggaaggtagacagcaacaagattttaatcacctggtcaccagaccctcacggcccatatccaattcgaatttcagaaatttctctgtttgctttaaataactctttacaaataagggtcgggcacggtggctcacgcctgtaatcccagctctttgggaggccgaggtgggcagatcacgaggtcaggagatcgagaccatcctggctaacatggtgaaaccccgtctctgctaaaaatacaaaaaattagccagatgtggtggtgcacacctgtagtcccaactattcggcaggctgaggcagtagaatcgcttgaacctgggaggcggagattgcagtgaaccaagatcgggccactgcactccagcttgggtgacagagcaagactccatctcaaaaaaattataaataactctttgcaaataggaaagtgaagctcaagggtaaccagtgaggctatgaaattgccagtgaattaagaccagggctagagtcaacagtccagaacccctatccgtatgaacaggggcccgtttctggttgaaatcaaggttaggatgcaactgagaaaataaaagactgcactttggagaggcaagcacgctatccgggttgttgttttgttttatgtcttggtgcttaggtgaggacttagctgggtttattcaaagtgggcgggtctgggctattcttgagaatgtcccttccatttctgagaacaagtcagccccttctacctgcctccacccaggagactgatgcacaagatctgtttgtgaaagcctgatttaaaaagaaaaaaaaaattccttaagccaaatggtgttccaagttggttgctgtgacaacctccaggaagagccacttgttaccctctattctttctagtgctttcagtcagtggcaacacataggccccttggaccgtggggatggcggccctgagattctgtcagtgggaccaccctgggcctcctttctacctccactcagcaccctgttggccaaggagaatttctgcggtgggaggcagtgctctgctagtcaggattgataaacagctgggcacaccgaaacagtgtaccaacgaattcaccaaccaggggtttctttccctaccctttgtgaaaaccaatcaattactagatgagtggatggatgcagaaaaatctgggctgagccaaagtcccttttggaaatacaagccataacattcgaaggacatcagcgaccttggcttgtttaggtgattttacttccagctgcaggtagtcttgacaaggagtgtttaaacagaaggctcaagatgcattccttgtgtaggtcggagagagcacttctaatgttaagtggggtacagatcagctgcccccccacgtagcctggacatcgtcttatccccataatccttgccatccctacaaggcccatcgccaccaccttttcccaggtttattgaggtatgattgacatccagtaaaattcaccctttggaaatatacagctctgtgaattttgacaaatttagtgtcttgtgaccatcaccaagatcaacctgtttttaaccctccaaaaaattcccttctcctgccctctttccctggcaaccctgattgattatctgatcctataattttgccttttctagaatgtcatataaatggagtcacactgatgtcgccttttgagtctggcatctttccctcagcttaatgcttttgagtcattcatgatgtgtgcgtgtggtttgttccttctccttgccgggaagtatttcattgcatgggcgtactactctgcttctttatttttacactgagcctttcgccctggaagttcttggcccagggtcttcaacttgtttgcacgaccacttccagcttgctgcttccttcagttccccaggctcctcctccaaatgccagctgtgcccacaagctgttcttagggctcacactcgccttttggcgcgtggtgggtttttggtagtgcagaaagaatccagggatgggaggggaagggacggatgggtgctcaattgctgctcacgtctgctgcaacctgaagcttgcatctcagccagcagatctgctcccttctgggacccaggcttcagtgtcacacggtccttggctatgtattgggcgttggaggctttgaaaggcgagcagaagcagcatggacaagaaggctggggctggccctggggctcatcatgatgctttcctggatctgttgcttcatctgcaagctgagggtgtttgttctagatgagtgtctcaggccaccggcaactgcatgtacctcctccctttctcatttccaatgatgtaccctgtacacgtgttcatgctgtgtctggctctcatctgcacaatcgtgcatagaattgcctcaagtcctggtgagagagatgccgtggtacttttccatttagattcaaatggagctaaaattaagagttttatgagctgttaagaatgaggtagtttctcctaggaccccccaaagacagtgcaagtaatgaccgtttggatctcattcgtcgatctttgatagtatgttctggagtctactccccaggagccaggacaggcgtgaagatggagtccttgtcgcagctggagccttgcctagctggtgatcacacagcctggcctgtacctgcaccccactggatggtggtacatggtggcagggacaggaccacacccagttaaggccagaccaggctgagtgtgacccctgaggtaaacactccactaagctgtgtcttgttcatgccccctgctcagtgaaaggtgagtcccgagaccagttgggtacctctctatgcgaaccagagacatttctggatccaggccaggtgaagattagggccaggaagcctgagcccccggggcctcaaggtagggagccgaagaggctgccaggactctgctgggttgaaatttgccggggaggactcttgtctccccctcaggagtatttttgttgaggctttcctggaggtgaagaagcaattcccattgcagcaggttagagcgagaatcagacagagggcaaaaaccaattcgcttctccccacgttctaaatgctggggcatggctgtcaggagggcttcctgggaggtgtctctgggggtggggtgaggttggggcgatggcctttggagattgcgtgtggtgttcaggactgttccttggtgtttgagggaaactttagtgggattgcagtggaatgtaaggtcagggcacgtgggtgctctctcggggtggggtgactgggagacctagagggaaagcctgctatgcagggggagagcacaggactggccctgctctgcggcctcctttgtcccataacctgaagttaagtcacatcccctgtcgggacctccgtgcactcatctgtcaagtgggggcgcttcccttccagcatcacctgcagcagacgggctctcgggagtcgtgggttccaggcagctgtgtggacccagggacagacattcaaagggacgccagccatccttagtgacaggggccccaacttagcatcccttcccttccgttaggaaggagatgaccggaagcaaccccttcacagacacgagcacatcggcaaaccctatgaaagtggaattttctaacaaaataaacttgcttgtttgatctgttttctgtaacttttgctaaatactttatacatttttcatgttaaagagccgtgtctcccgccagcactcctcaccccggtatgaatgtgtttcctccacattgtatatccttccaccctctggctgcctagatcagtaaataaaattgatgtaatataatttataagtaacactgttgaaaccctgatcccagtggaggctgtaacccacctgcccccgcaccacccccctgacccctgttaccgcatttgtgtgtattaatgctgaagaattaaatgtttaaagagtttaaattttgaaggcgtttgctatatacagttgtcctgcattattataaagagttttcaggaagtt

SEQ ID NO: 12849 - DNA, 8024 bp, Homo sapiens
  source 1..8024: mol_type = unassigned DNA
atgcttttctttagagctcctattgcttctgggtttggggtgtgagaggatgcagagtgggagaccttaaaaccgtctgatctggctgctaaagcgagtgtctgacgaccacccattaacaccagcgagtagcgtttgctcacggctttaggataagaagcctggaatggtcccccctccgccgggagaagaaagccagacggtcatccttccacctggctggcagagctacctgtcgcctcagggccggcggtactatgtcaacacgaccaccaatgagaccacctgggaacgtcccagcagttctcctgggattccagccagccctggctctcacaggagctctctgcctccaacagtgaatggataccacgcatcagggaccccagcgcaccctccagagactgcccacatgagtgtccgaaaatccaccggtgattcccagaacctgggatcctcatcgccaagcaaaaagcagagcaaggaaaacaccatcacaataaactgtgtgacgttccctcacccagacacgatgccggaacagcagctgctgaaaccaaccgagtggagctactgcgactacttctgggctgataagaaggacccccaaggcaacggcaccgtggctgggtttgaactactgctccagaaacagctgaagggcaaacaaatgcagaaggaaatgtcagaattcatccgggaaaggataaagattgaagaagactatgcgaagaacttagctaagctctctcagaactccttggcttcacaggaggaaggctccttgggagaggcgtgggcccaggtgaagaagagcctggcggacgaagcagaagttcacctcaagttctctgccaagcttcacagcgaggtggagaagcccctgatgaacttccgtgagaacttcaagaaagacatgaagaagtgcgaccaccacattgccgaccttcgcaagcagctcgccagccgctatgcctcggtggagaaggcccggaaagccctcacagagcggcagagagacctggagatgaagacccagcagctggagatcaagctgagcaacaagacagaggaggacatcaagaaggcgcggagaaagtccacacaggctggagacgacctcatgcgctgtgtggatctctacaaccaggcccagtccaaatggtttgaagagatggtgaccaccacattggagctagagcggctggaggtggagagggtagagatgatccggcagcacctgtgccagtacacgcagctgcggcatgaaacagacatgttcaaccaaagcacagtcgagcccgtggatcagctgcttcgaaaagtggacccggccaaagacagggagctgtgggtcagagagcacaagacgggcaacatccgccctgtggacatggagatctagatgggcctgtgcagcttcggggggtcctgctggggaggggggctgggctcccaccatggggcccatgccgagtggatgccccccaccctctctcctgggccactgaggagaggggagagagctggtgattccagaagggtgacccggacagcctagctgggggctcccccatattcccaggcccagaagacagacccacagccctgcccttgtctctgaggctgaagaccccctgactcccatgctgtgcttgccgctctgaaacaaacagaggctggaactttgtggtccttgccgagttttgtaggggtcactgtcacatgcttgtgccctggaagccccaaggctcttcctccagctggctcccttgtctccagggctttggaggatcagggtagggagggctctgtctctaagccaggtgtcaggatcagaatcatgggtagaaggtgccattcagctcacagccgcacccagaatcctttgcagccctccttctttatttttttcccattgcattctgggagtccacatctggctttctcagccactgttcatcaccaggggttttaggaggaaggcttggctcctgtcttcccagacccaccatgcctggagaggtcaggatggaactacctcattcggcaaattagccccaaattgagcgctgaatcgtgtcccatgagatcaggcgccatctgtaaagtctcctctggaaatgccaatccatccttcccccagctgcttcctcggggaggcccctgcccccaccctgccagcccttcccagtctcattagaggaagctttccaaagttctcagttatcaagacctcatccagctcgtccaaaggcttcagggatggaaacaaaccagctcgtctcagaggccagcaagctggggcctgtccgccacggtgccctgtgcacctttgggctgccctggcccccactctcccgggccgcccaccacaggctcttaatggggccgggtcagtcctacatgtgagatgggttagggcaagtctttgccatcccccagatggctctgtcttcttgtgtatggcagggctgggactgctgtcccttgtacagttttctgtcactggtgggcactggacaggcatagcagactctcttgtggccacactaggttgtcgcctttcaggcagtgtcccgccacctttgcttcccgctccttctggacattccagagccctgcaccaaacccttacttggtgtctgcacctcctttccctctctccatcttccaatccctggaaaagtctggtctgagtgtgacttgggaagctttcagtgctgctgtttggcccagctcattactttctccctttctctaccacagcaaacacattctccaccatgtcagtctaaagagtctaaaggggccgggagaagcatgagcgaggggcagattctagtcgggagcccatgccctggaaatccatctttcttcatctttcccattgaccactttgggtttgacctgcacatctgcagtgagggcagaattcaacaagcacaactcactggtctttcagtcaacgtgctagaaaccgatgacttattaatctctaattttttggcgcctctttcattgaatgagaattgctttcgtatagttcacattagaaaaatgcctaatatactaaagtaaaccaaacgttgtcacttttctcttgttcttgaaacattgcaaccaaaaaggtcagcacaaaggccttcacctacgtgaagacctcctggtaggatctgtccatgggatggagaaccactctgtccagatctggggttgggtcatgacaccagctaccaattttagaatattatttcttggtttctttatgaaaaatgggtgctagtggtaattgctttgtggcttagtaaactactctgtggatgatttccaaacattcaaagccaatagccttgttattaacaagatattttgagtacaatatggctcattgacttttccattacatctgaggattccagagtcctctgttcatccctgggatagagtgagccctcttgcgtcttccagggtagctcaggttggcccagtttgggccagtccatttttggaggtcactctttcccccctcatcccctcacctccttctctttacccccttcacgtacttcctttctttcttccctctgttattcattcatcaagcaggttaaagccattgtgctaagatctaatctgaggacactataatggccctgtcgtcagggaagcccgtgatcgctcgttttcaggggtcttaccggtcagcaaccttggcattgatacataggcactctacagaatttaagttttcagaggtaagtctgttgttctgattaatctgcattcattcagcgaatgctcaagacaagccaggcatgctgagaagcggcgctctagttgtatgtaagatgggcattcctctgctctcctctattctccatgtcgactgagaagagtataataagaacattgtaccctctccacacttaaccctctgggattctttattataatataaaccaccgtcgtgaggcatttacctgttggatggaaggtagacagcaacaagattttaatcacctggtcaccagaccctcacggcccatatccaattcgaatttcagaaatttctctgtttgctttaaataactctttacaaataagggtcgggcacggtggctcacgcctgtaatcccagctctttgggaggccgaggtgggcagatcacgaggtcaggagatcgagaccatcctggctaacatggtgaaaccccgtctctgctaaaaatacaaaaaattagccagatgtggtggtgcacacctgtagtcccaactattcggcaggctgaggcagtagaatcgcttgaacctgggaggcggagattgcagtgaaccaagatcgggccactgcactccagcttgggtgacagagcaagactccatctcaaaaaaattataaataactctttgcaaataggaaagtgaagctcaagggtaaccagtgaggctatgaaattgccagtgaattaagaccagggctagagtcaacagtccagaacccctatccgtatgaacaggggcccgtttctggttgaaatcaaggttaggatgcaactgagaaaataaaagactgcactttggagaggcaagcacgctatccgggttgttgttttgttttatgtcttggtgcttaggtgaggacttagctgggtttattcaaagtgggcgggtctgggctattcttgagaatgtcccttccatttctgagaacaagtcagccccttctacctgcctccacccaggagactgatgcacaagatctgtttgtgaaagcctgatttaaaaagaaaaaaaaaattccttaagccaaatggtgttccaagttggttgctgtgacaacctccaggaagagccacttgttaccctctattctttctagtgctttcagtcagtggcaacacataggccccttggaccgtggggatggcggccctgagattctgtcagtgggaccaccctgggcctcctttctacctccactcagcaccctgttggccaaggagaatttctgcggtgggaggcagtgctctgctagtcaggattgataaacagctgggcacaccgaaacagtgtaccaacgaattcaccaaccaggggtttctttccctaccctttgtgaaaaccaatcaattactagatgagtggatggatgcagaaaaatctgggctgagccaaagtcccttttggaaatacaagccataacattcgaaggacatcagcgaccttggcttgtttaggtgattttacttccagctgcaggtagtcttgacaaggagtgtttaaacagaaggctcaagatgcattccttgtgtaggtcggagagagcacttctaatgttaagtggggtacagatcagctgcccccccacgtagcctggacatcgtcttatccccataatccttgccatccctacaaggcccatcgccaccaccttttcccaggtttattgaggtatgattgacatccagtaaaattcaccctttggaaatatacagctctgtgaattttgacaaatttagtgtcttgtgaccatcaccaagatcaacctgtttttaaccctccaaaaaattcccttctcctgccctctttccctggcaaccctgattgattatctgatcctataattttgccttttctagaatgtcatataaatggagtcacactgatgtcgccttttgagtctggcatctttccctcagcttaatgcttttgagtcattcatgatgtgtgcgtgtggtttgttccttctccttgccgggaagtatttcattgcatgggcgtactactctgcttctttatttttacactgagcctttcgccctggaagttcttggcccagggtcttcaacttgtttgcacgaccacttccagcttgctgcttccttcagttccccaggctcctcctccaaatgccagctgtgcccacaagctgttcttagggctcacactcgccttttggcgcgtggtgggtttttggtagtgcagaaagaatccagggatgggaggggaagggacggatgggtgctcaattgctgctcacgtctgctgcaacctgaagcttgcatctcagccagcagatctgctcccttctgggacccaggcttcagtgtcacacggtccttggctatgtattgggcgttggaggctttgaaaggcgagcagaagcagcatggacaagaaggctggggctggccctggggctcatcatgatgctttcctggatctgttgcttcatctgcaagctgagggtgtttgttctagatgagtgtctcaggccaccggcaactgcatgtacctcctccctttctcatttccaatgatgtaccctgtacacgtgttcatgctgtgtctggctctcatctgcacaatcgtgcatagaattgcctcaagtcctggtgagagagatgccgtggtacttttccatttagattcaaatggagctaaaattaagagttttatgagctgttaagaatgaggtagtttctcctaggaccccccaaagacagtgcaagtaatgaccgtttggatctcattcgtcgatctttgatagtatgttctggagtctactccccaggagccaggacaggcgtgaagatggagtccttgtcgcagctggagccttgcctagctggtgatcacacagcctggcctgtacctgcaccccactggatggtggtacatggtggcagggacaggaccacacccagttaaggccagaccaggctgagtgtgacccctgaggtaaacactccactaagctgtgtcttgttcatgccccctgctcagtgaaaggtgagtcccgagaccagttgggtacctctctatgcgaaccagagacatttctggatccaggccaggtgaagattagggccaggaagcctgagcccccggggcctcaaggtagggagccgaagaggctgccaggactctgctgggttgaaatttgccggggaggactcttgtctccccctcaggagtatttttgttgaggctttcctggaggtgaagaagcaattcccattgcagcaggttagagcgagaatcagacagagggcaaaaaccaattcgcttctccccacgttctaaatgctggggcatggctgtcaggagggcttcctgggaggtgtctctgggggtggggtgaggttggggcgatggcctttggagattgcgtgtggtgttcaggactgttccttggtgtttgagggaaactttagtgggattgcagtggaatgtaaggtcagggcacgtgggtgctctctcggggtggggtgactgggagacctagagggaaagcctgctatgcagggggagagcacaggactggccctgctctgcggcctcctttgtcccataacctgaagttaagtcacatcccctgtcgggacctccgtgcactcatctgtcaagtgggggcgcttcccttccagcatcacctgcagcagacgggctctcgggagtcgtgggttccaggcagctgtgtggacccagggacagacattcaaagggacgccagccatccttagtgacaggggccccaacttagcatcccttcccttccgttaggaaggagatgaccggaagcaaccccttcacagacacgagcacatcggcaaaccctatgaaagtggaattttctaacaaaataaacttgcttgtttgatctgttttctgtaacttttgctaaatactttatacatttttcatgttaaagagccgtgtctcccgccagcactcctcaccccggtatgaatgtgtttcctccacattgtatatccttccaccctctggctgcctagatcagtaaataaaattgatgtaatataatttataagtaacactgttgaaaccctgatcccagtggaggctgtaacccacctgcccccgcaccacccccctgacccctgttaccgcatttgtgtgtattaatgctgaagaattaaatgtttaaagagtttaaattttgaaggcgtttgctatatacagttgtcctgcattattataaagagttttcaggaagtt

SEQ ID NO: 12850 - DNA, 1944 bp, Homo sapiens
  source 1..1944: mol_type = unassigned DNA
tttcccggagaggctgccatgaagaggaagccggcggagtcttggtgctgagtctgagggcttcaggcaggacccaagactctcctctgaggtagcagcccccagagaaggttagctgttctctgatgaagcctggaatggtcccccctccgccgggagaagaaagccagacggtcatccttccacctggctggcagagctacctgtcgcctcagggccggcggtactatgtcaacacgaccaccaatgagaccacctgggaacgtcccagcagttctcctgggattccagccagccctggctctcacaggagctctctgcctccaacagtgaatggataccacgcatcagggaccccagcgcaccctccagagactgcccacatgagtgtccgaaaatccaccggtgattcccagaacctgggatcctcatcgccaagcaaaaagcagagcaaggaaaacaccatcacaataaactgtgtgacgttccctcacccagacacgatgccggaacagcagctgctgaaaccaaccgagtggagctactgcgactacttctgggctgataagaaggacccccaaggcaacggcaccgtggctgggtttgaactactgctccagaaacagctgaagggcaaacaaatgcagaaggaaatgtcagaattcatccgggaaaggataaagattgaagaagactatgcgaagaacttagctaagctctctcagaactccttggcttcacaggaggaaggctccttgggagaggcgtgggcccaggtgaagaagagcctggcggacgaagcagaagttcacctcaagttctctgccaagcttcacagcgaggtggagaagcccctgatgaacttccgtgagaacttcaagaaagacatgaagaagtgcgaccaccacattgccgaccttcgcaagcagctcgccagccgctatgcctcggtggagaaggcccggaaagccctcacagagcggcagagagacctggagatgaagacccagcagctggagatcaagctgagcaacaagacagaggaggacatcaagaaggcgcggagaaagtccacacaggctggagacgacctcatgcgctgtgtggatctctacaaccaggcccagtccaaatggtttgaagagatggtgaccaccacattggagctagagcggctggaggtggagagggtagagatgatccggcagcacctgtgccagtacacgcagctgcggcatgaaacagacatgttcaaccaaagcacagtcgagcccgtggatcagctgcttcgaaaagtggacccggccaaagacagggagctgtgggtcagagagcacaagacgggcaacatccgccctgtggacatggagatctagatgggcctgtgcagcttcggggggtcctgcccccaccctgccagcccttcccagtctcattagaggaagctttccaaagttctcagttatcaagacctcatccagctcgtccaaaggcttcagggatggaaacaaaccagctcgtctcagaggccagcaagctggggcctgtccgccacggtgccctgtgcacctttgggctgccctggcccccactctcccgggccgcccaccacaggctcttaatggggccgggtcagtcctacatgtgagatgggttagggcaagtctttgccatcccccagatggctctgtcttcttgtgtatggcagggctgggactgctgtcccttgtacagttttctgtcactggtgggcactggacaggcatagcagactctcttgtggccacactaggttgtcgcctttcaggcagtgtcccgccacctttgcttcccgctccttctggacattccagagccctgcaccaaacccttacttggtgtctgcacctcctttccctctctccatcttccaatccctggaaaagtctggtctgagtgtgactt

SEQ ID NO: 12851 - DNA, 4277 bp, Homo sapiens
  source 1..4277: mol_type = unassigned DNA
gtcccccgcctgcctgaggacccccgcgcaccccagagacggcgcgcgcccagagcgcgggagcccggagcgccgggcgcctgggaccccgcggagccgctgcccagcccgtggggctcggcgggaatgcaggctgcgctgtgaacccgggcgccaaggccatgtccggcgctcgctgccggaccctgtaccccttctccggggagcggcacggccaggggctgcgcttcgccgcgggcgagctgatcacgctgctgcaggtcccggacggcggctggtgggaaggcgagaaggaggacgggctccgtggctggttcccggcgagctacgtgcagttgctggagaagcctggaatggtcccccctccgccgggagaagaaagccagacggtcatccttccacctggctggcagagctacctgtcgcctcagggccggcggtactatgtcaacacgaccaccaatgagaccacctgggaacgtcccagcagttctcctgggattccagccagccctggctctcacaggagctctctgcctccaacagtgaatggataccacgcatcagggaccccagcgcaccctccagagactgcccacatgagtgtccgaaaatccaccggtgattcccagaacctgggatcctcatcgccaagcaaaaagcagagcaaggaaaacaccatcacagagctagagcggctggaggtggagagggtagagatgatccggcagcacctgtgccagtacacgcagctgcggcatgaaacagacatgttcaaccaaagcacagtcgagcccgtggatcagctgcttcgaaaagtggacccggccaaagacagggagctgtgggtcagagagcacaagacgggcaacatccgccctgtggacatggagatctagatgggcctgtgcagcttcggggggtcctgctggggaggggggctgggctcccaccatggggcccatgccgagtggatgccccccaccctctctcctgggccactgaggagaggggagagagctggtgattccagaagggtgacccggacagcctagctgggggctcccccatattcccaggcccagaagacagacccacagccctgcccttgtctctgaggctgaagaccccctgactcccatgctgtgcttgccgctctgaaacaaacagaggctggaactttgtggtccttgccgagttttgtaggggtcactgtcacatgcttgtgccctggaagccccaaggctcttcctccagctggctcccttgtctccagggctttggaggatcagggtagggagggctctgtctctaagccaggtgtcaggatcagaatcatgggtagaaggtgccattcagctcacagccgcacccagaatcctttgcagccctccttctttatttttttcccattgcattctgggagtccacatctggctttctcagccactgttcatcaccaggggttttaggaggaaggcttggctcctgtcttcccagacccaccatgcctggagaggtcaggatggaactacctcattcggcaaattagccccaaattgagcgctgaatcgtgtcccatgagatcaggcgccatctgtaaagtctcctctggaaatgccaatccatccttcccccagctgcttcctcggggaggcccctgcccccaccctgccagcccttcccagtctcattagaggaagctttccaaagttctcagttatcaagacctcatccagctcgtccaaaggcttcagggatggaaacaaaccagctcgtctcagaggccagcaagctggggcctgtccgccacggtgccctgtgcacctttgggctgccctggcccccactctcccgggccgcccaccacaggctcttaatggggccgggtcagtcctacatgtgagatgggttagggcaagtctttgccatcccccagatggctctgtcttcttgtgtatggcagggctgggactgctgtcccttgtacagttttctgtcactggtgggcactggacaggcatagcagactctcttgtggccacactaggttgtcgcctttcaggcagtgtcccgccacctttgcttcccgctccttctggacattccagagccctgcaccaaacccttacttggtgtctgcacctcctttccctctctccatcttccaatccctggaaaagtctggtctgagtgtgacttgggaagctttcagtgctgctgtttggcccagctcattactttctccctttctctaccacagcaaacacattctccaccatgtcagtctaaagagtctaaaggggccgggagaagcatgagcgaggggcagattctagtcgggagcccatgccctggaaatccatctttcttcatctttcccattgaccactttgggtttgacctgcacatctgcagtgagggcagaattcaacaagcacaactcactggtctttcagtcaacgtgctagaaaccgatgacttattaatctctaattttttggcgcctctttcattgaatgagaattgctttcgtatagttcacattagaaaaatgcctaatatactaaagtaaaccaaacgttgtcacttttctcttgttcttgaaacattgcaaccaaaaaggtcagcacaaaggccttcacctacgtgaagacctcctggtaggatctgtccatgggatggagaaccactctgtccagatctggggttgggtcatgacaccagctaccaattttagaatattatttcttggtttctttatgaaaaatgggtgctagtggtaattgctttgtggcttagtaaactactctgtggatgatttccaaacattcaaagccaatagccttgttattaacaagatattttgagtacaatatggctcattgacttttccattacatctgaggattccagagtcctctgttcatccctgggatagagtgagccctcttgcgtcttccagggtagctcaggttggcccagtttgggccagtccatttttggaggtcactctttcccccctcatcccctcacctccttctctttacccccttcacgtacttcctttctttcttccctctgttattcattcatcaagcaggttaaagccattgtgctaagatctaatctgaggacactataatggccctgtcgtcagggaagcccgtgatcgctcgttttcaggggtcttaccggtcagcaaccttggcattgatacataggcactctacagaatttaagttttcagaggtaagtctgttgttctgattaatctgcattcattcagcgaatgctcaagacaagccaggcatgctgagaagcggcgctctagttgtatgtaagatgggcattcctctgctctcctctattctccatgtcgactgagaagagtataataagaacattgtaccctctccacacttaaccctctgggattctttattataatataaaccaccgtcgtgaggcatttacctgttggatggaaggtagacagcaacaagattttaatcacctggtcaccagaccctcacggcccatatccaattcgaatttcagaaatttctctgtttgctttaaataactctttacaaataagggtcgggcacggtggctcacgcctgtaatcccagctctttgggaggccgaggtgggcagatcacgaggtcaggagatcgagaccatcctggctaacatggtgaaaccccgtctctgctaaaaatacaaaaaattagccagatgtggtggtgcacacctgtagtcccaactattcggcaggctgaggcagtagaatcgcttgaacctgggaggcggagattgcagtgaaccaagatcgggccactgcactccagcttgggtgacagagcaagactccatctcaaaaaaattataaataactctttgcaaataggaaagtgaagctcaagggtaaccagtgaggctatgaaattgccagtgaattaagaccagggctagagtcaacagtccagaacccctatccgtatgaacaggggcccgtttctggttgaaatcaaggttaggatgcaactgagaaaataaaagactgcactttggagaggcaagcacgctatccgggttgttgttttgttttatgtcttggtgcttaggtgaggacttagctgggtttattcaaagtgggcgggtctgggctattcttgagaatgtcccttccatttctgagaacaagtcagccccttctacctgcctccacccaggagactgatgcacaagatctgtttgtgaaagcctgattt

SEQ ID NO: 12852 - DNA, 1010 bp, Homo sapiens
  source 1..1010: mol_type = unassigned DNA
cacttctctcctggtgaacaagtggaaggaggatggctgggatgatgcagaagccgttttttcagggcaggaggggaagataaactgtgtgacgttccctcacccagacacgatgccggaacagcagctgctgaaaccaaccgagtggagctactgcgactacttctgggctgataagaaggacccccaaggcaacggcaccgtggctgggtttgaactactgctccagaaacagctgaagggcaaacaaatgcagaaggaaatgtcagaattcatccgggaaaggataaagattgaagaagactatgcgaagaacttagctaagctctctcagaactccttggcttcacaggaggaaggctccttgggagaggcgtgggcccaggtgaagaagagcctggcggacgaagcagaagttcacctcaagttctctgccaagcttcacagcgaggtggagaagcccctgatgaacttccgtgagaacttcaagaaagacatgaagaagtgcgaccaccacattgccgaccttcgcaagcagctcgccagccgctatgcctcggtggagaaggcccggaaagccctcacagagcggcagagagacctggagatgaagacccagcagctggagatcaagctgagcaacaagacagaggaggacatcaagaaggcgcggagaaagtccacacaggctggagacgacctcatgcgctgtgtggatctctacaaccaggcccagtccaaatggtttgaagagatggtgaccaccacattggagctagagcggctggaggtggagagggtagagatgatccggcagcacctgtgccagtacacgcagctgcggcatgaaacagacatgttcaaccaaagcacagtcgagcccgtggatcagctgcttcgaaaagtggacccggccaaagacagggagctgtgggtcagagagcacaagacgggcaacatccgccctgtggacatggagatctagatgggcctgtgcagcttcggggggt

SEQ ID NO: 12853 - DNA, 1799 bp, Homo sapiens
  source 1..1799: mol_type = unassigned DNA
cctctctgctcccagaggagctgtcctctgtgcaggggctctgaatgctcaggtgcttctcactgctcatgctcacgcaaccccggaggtcacgtgtgtgctgcctctgacctcaggggtttatgggccgcagacttcccaatgtcacgctactgtaggaagcctggaatggtcccccctccgccgggagaagaaagccagacggtcatccttccacctggctggcagagctacctgtcgcctcagggccggcggtactatgtcaacacgaccaccaatgagaccacctgggaacgtcccagcagttctcctgggattccagccagccctggctctcacaggagctctctgcctccaacagtgaatggataccacgcatcagggaccccagcgcaccctccagagactgcccacatgagtgtccgaaaatccaccggtgattcccagaacctgggatcctcatcgccaagcaaaaagcagagcaaggaaaacaccatcacaataaactgtgtgacgttccctcacccagacacgatgccggaacagcagctgctgaaaccaaccgagtggagctactgcgactacttctgggctgataagaaggacccccaaggcaacggcaccgtggctgggtttgaactactgctccagaaacagctgaagggcaaacaaatgcagaaggaaatgtcagaattcatccgggaaaggataaagattgaagaagactatgcgaagaacttagctaagctctctcagaactccttggcttcacaggaggaaggctccttgggagaggcgtgggcccaggtgaagaagagcctggcggacgaagcagaagttcacctcaagttctctgccaagcttcacagcgaggtggagaagcccctgatgaacttccgtgagaacttcaagaaagacatgaagaagtgcgaccaccacattgccgaccttcgcaagcagctcgccagccgctatgcctcggtggagaaggcccggaaagccctcacagagcggcagagagacctggagatgaagacccagcagctggagatcaagctgagcaacaagacagaggaggacatcaagaaggcgcggagaaagtccacacaggctggagacgacctcatgcgctgtgtggatctctacaaccaggcccagtccaaatggtttgaagagatggtgaccaccacattggagctagagcggctggaggtggagagggtagagatgatccggcagcacctgtgccagtacacgcagctgcggcatgaaacagacatgttcaaccaaagcacagtcgagcccgtggatcagctgcttcgaaaagtggacccggccaaagacagggagctgtgggtcagagagcacaagacgggcaacatccgccctgtggacatggagatctagatgggcctgtgcagcttcggggggtcctgctggggaggggggctgggctcccaccatggggcccatgccgagtggatgccccccaccctctctcctgggccactgaggagaggggagagagctggtgattccagaagggtgacccggacagcctagctgggggctcccccatattcccaggcccagaagacagacccacagccctgcccttgtctctgaggctgaagaccccctgactcccatgctgtgcttgccgctctgaaacaaacagaggctggaactttgtggtccttgccgagttttgtaggggtcactgtcacatgcttgtgccctggaagccccaaggctcttcctccagctggctcccttgtctccagggctttggaggatca

SEQ ID NO: 12854 - DNA, 2417 bp, Homo sapiens
  source 1..2417: mol_type = unassigned DNA
aattcgccttcagcccgagagctgggcgtgggaacagcgtggggtcagggagacccctgcttgccctggcccagaatatggtgacttaggattcagactgagcatccctgattccccagcgcctccaccctcagggaacctgaatggggggaaaaaatgtccaatatggagaacagctttgacgatgtttcttgcctctctccccagaacctgggatcctcatcgccaagcaaaaagcagagcaaggaaaacaccatcacaataaactgtgtgacgttccctcacccagacacgatgccggaacagcagctgctgaaaccaaccgagtggagctactgcgactacttctgggctgataagaaggacccccaaggcaacggcaccgtggctgggtttgaactactgctccagaaacagctgaagggcaaacaaatgcagaaggaaatgtcagaattcatccgggaaaggataaagattgaagaagactatgcgaagaacttagctaagctctctcagaactccttggcttcacaggaggaaggctccttgggagaggcgtgggcccaggtgaagaagagcctggcggacgaagcagaagttcacctcaagttctctgccaagcttcacagcgaggtggagaagcccctgatgaacttccgtgagaacttcaagaaagacatgaagaagtgcgaccaccacattgccgaccttcgcaagcagctcgccagccgctatgcctcggtggagaaggcccggaaagccctcacagagcggcagagagacctggagatgaagacccagcagctggagatcaagctgagcaacaagacagaggaggacatcaagaaggcgcggagaaagtccacacaggctggagacgacctcatgcgctgtgtggatctctacaaccaggcccagtccaaatggtttgaagagatggtgaccaccacattggagctagagcggctggaggtggagagggtagagatgatccggcagcacctgtgccagtacacgcagctgcggcatgaaacagacatgttcaaccaaagcacagtcgagcccgtggatcagctgcttcgaaaagtggacccggccaaagacagggagctgtgggtcagagagcacaagacgggcaacatccgccctgtggacatggagatctagatgggcctgtgcagcttcggggggtcctgctggggaggggggctgggctcccaccatggggcccatgccgagtggatgccccccaccctctctcctgggccactgaggagaggggagagagctggtgattccagaagggtgacccggacagcctagctgggggctcccccatattcccaggcccagaagacagacccacagccctgcccttgtctctgaggctgaagaccccctgactcccatgctgtgcttgccgctctgaaacaaacagaggctggaactttgtggtccttgccgagttttgtaggggtcactgtcacatgcttgtgccctggaagccccaaggctcttcctccagctggctcccttgtctccagggctttggaggatcagggtagggagggctctgtctctaagccaggtgtcaggatcagaatcatgggtagaaggtgccattcagctcacagccgcacccagaatcctttgcagccctccttctttatttttttcccattgcattctgggagtccacatctggctttctcagccactgttcatcaccaggggttttaggaggaaggcttggctcctgtcttcccagacccaccatgcctggagaggtcaggatggaactacctcattcggcaaattagccccaaattgagcgctgaatcgtgtcccatgagatcaggcgccatctgtaaagtctcctctggaaatgccaatccatccttcccccagctgcttcctcggggaggcccctgcccccaccctgccagcccttcccagtctcattagaggaagctttccaaagttctcagttatcaagacctcatccagctcgtccaaaggcttcagggatggaaacaaaccagctcgtctcagaggccagcaagctggggcctgtccgccacggtgccctgtgcacctttgggctgccctggcccccactctcccgggccgcccaccacaggctcttaatggggccgggtcagtcctacatgtgagatgggttagggcaagtctttgccatcccccagatggctctgtcttcttgtgtatggcagggctgggactgctgtcccttgtacagttttctgtcactggtgggcactggacaggcatagcagactctcttgtggccacactaggttgtcgcctttcaggcagtgtcccgccacctttgcttcccgctccttctggacattccagagccctgcaccaaacccttacttggtgtctgcacctcc

SEQ ID NO: 12855 - DNA, 3189 bp, Homo sapiens
  source 1..3189: mol_type = unassigned DNA
ggagtctcgcgaggatcttgtgacttatcgcggcatcgcccagcggttgccgggaaacggcgtggcttccgggggcgggcgccctggtcccggagtcgccgctgggcctgtccgctggcgtcatggcaccgaaaaagaaagggaagaaaggcaaagccaaaggcaccccgattgtcgatgggctcgctccagaggacatgagcaaggagcaggtggaggagcatgtcagccgcatccgggaggagctggaccgcgagcgggaggaacgaaactacttccagctggagcgggacaagatccacaccttctgggagatcacacggaggcagctggaggagaagaaggctgagctgcggaacaaagaccgggagatggaagaagccgaggagaggcaccaggtggagatcaaggtgtacaagcagaaagtgaagcacctgctatatgagcaccagaacaacctgacagagatgaaggctgagggcactgtagtcatgaagctggcacagaaagagcaccgcatacaggagagtgtgctgcgcaaggacatgcgggcactgaaggtggagctcaaggagcaggagctggccagtgaggtggtggtgaagaacctgcggctgaaacacaccgaggagatcaccaggatgcggaatgattttgagaggcaagttcgagaaattgaggccaagtatgataagaagatgaagatgctgagggacgaactcgacttgcggagaaagactgagctccacgaagtggaggagaggaagaatggccagatccacacgctgatgcagcgccacgaggaggccttcaccgacattaagaactactacaacgacatcaccctcaacaacctggccctcatcaactccctcaaggagcagatggaggacatgcggaagaaggaggaccacctggagagggagatggcagaggtgtctgggcagaacaagcgcctggcagaccctctccagaaggctcgggaggagatgagcgagatgcagaaacagctcgcaaactacgagagggacaagcagatcctgctttgcacaaaagcccgtttgaaagtcagggagaaagagctgaaagacctgcagtgggagcatgaagtgttagagcagcgattcaccaaggtgcagcaggagcgggacgagctctatcggaagttcaccgcagccatccaggaggtgcagcagaagacagggttcaagaacctcgtgctagaacgcaagctgcaggctctgagcgccgctgtggagaagaaggaggtgcagttcaacgaggtcctggctgcctctaacctggaccctgcagccctgacgctggtgtcccgcaagctggaggatgttcttgagtcgaagaacagcaccatcaaggacctgcagtatgagctggcccaggtctgtaaggcccataacgacctgctgcgcacgtatgaggcaaagctgctggccttcgggatccctctggacaacgtgggcttcaagcccttggaaacagctgtgatcggacagacactgggccagggccccgcgggactggtgggcaccccgacgtagctgcccccctggggggccacagcccagagaaccagcctaggaacactcgggatgacaccccttatcacaccaaggacagcaagttttttagattttatcatcagcaaatgaaagcttttcacatgttcttgccatcctctttcctggctctgtggaggagaaccacctgcaggaccctcacccatggtgtccctgtcgctcccttccctgggtgccgcacgtccagcctgtgtccaggcctactccctggtctcacctccgaccacagtcggcggcaccttctcagagtgccccgcactcacctgggggttggggcagtgccgcgctgtgctgcctgtcttcgcgccactgttgtcccaccgaatggacagctttgcaggtgctggcactaacttcattgacacctgagtcacagctgcccagtgggattctccagggggccgggacttccctaggaagtggtgagccaatgctccctgatgagcacaaagcccgctctgttgagggctgggtgggtgcagccagcgtgcgggaacgggcaggcagcctcccgctgccagtcttcgctctaactccctcggtaggtgatgtaggaccaggggcacgtggaacttctgggccttgctggtgatggttaaaacaacctgagatggagaggccaggagagagtataaggggatagcagcaaaccacctatctggccccaacacacctgagagaattcagcagcccagactgagggtctgggatggggtgaaccttccgcaccagagggacactccacagaagccacagcccagtaagtcaggcgcttctgcggcggctccagtgtggggtgaggcagtgaggttaggcccagagagctggagttggctcagatgaaaacctctgtcaacaaagaggggatgaatcacccttggcccagcctccccacaaagcctgaccctgggcaggtgagtgacgggtgtgtcctcgtagagtctattgctgcctggacacctttcttttgggagctcaaagcaagtgagctcacctacctgccaccgcccaggaccagtctgcccactgcctaaatgatgcccggccagcaggacctggcctgcagatcccagtgagtcatgagcctcagccccctccagcccactggggctctcacctccacatgtgggtagaagctttcctgccccctcttcctccagtagccctcagtgtcgaaggtgagcttgtaggtgcctgccttcatctggtccaggacagtgaccatctgggtctgtgtagctggggagaggatgaggctgcagagatggggaccagaagccccccaccccagctttcctgggtctgcatcccagtgggcctcagacactgccctgccacctgtcagacttgggtgagcagacacagtgaggctgttaggtcctgcagttccagagcagtctagggacaccactgccctgtctttaggaaatcacaacacagagaagcaaaaagggaaaaagtctcccacaatttatcccatgagcaagaaccactttatagctggcatatatttttccagattttctctatgcataagtatatttgtttaaaaacttataaagtggattatactatttgtattgttttataa

SEQ ID NO: 12856 - DNA, 1669 bp, Homo sapiens
  source 1..1669: mol_type = unassigned DNA
gacaccaccgggacctggctgcgccctcccgaccccggccgggcgtccggggctcctgcgcactcacttggcggccgcgcccgctggcgtcctcttgttctcttccaggcaccgaaaaagaaagggaagaaaggcaaagccaaaggcaccccgattgtcgatgggctcgctccagaggacatgagcaaggagcaggtggaggagcatgtcagccgcatccgggaggagctggaccgcgagcgggaggaacgaaactacttccagctggagcgggacaagatccacaccttctgggagatcacacggaggcagctggaggagaagaaggctgagctgcggaacaaagaccgggagatggaagaagccgaggagaggcaccaggtggagatcaaggtgtacaagcagaaagtgaagcacctgctatatgagcaccagaacaacctgacagagatgaaggctgagggcactgtagtcatgaagctggcacagaaagagcaccgcatacaggagagtgtgctgcgcaaggacatgcgggcactgaaggtggagctcaaggagcaggagctggccagtgaggtggtggtgaagaacctgcggctgaaacacaccgaggagatcaccaggatgcggaatgattttgagaggcaagttcgagaaattgaggccaagtatgataagaagatgaagatgctgagggacgaactcgacttgcggagaaagactgagctccacgaagtggaggagaggaagaatggccagatccacacgctgatgcagcgccacgaggaggccttcaccgacattaagaactactacaacgacatcaccctcaacaacctggccctcatcaactccctcaaggagcagatggaggacatgcggaagaaggaggaccacctggagagggagatggcagaggtgtctgggcagaacaagcgcctggcagaccctctccagaaggctcgggaggagatgagcgagatgcagaaacagctcgcaaactacgagagggacaagcagatcctgctttgcacaaaagcccgtttgaaagtcagggagaaagagctgaaagacctgcagtgggagcatgaagtgttagagcagcgattcaccaaggtgcagcaggagcgggacgagctctatcggaagttcaccgcagccatccaggaggtgcagcagaagacagggttcaagaacctcgtgctagaacgcaagctgcaggctctgagcgccgctgtggagaagaaggaggtgcagttcaacgaggtcctggctgcctctaacctggaccctgcagccctgacgctggtgtcccgcaagctggaggatgttcttgagtcgaagaacagcaccatcaaggacctgcagtatgagctggcccaggtctgtaaggcccataacgacctgctgcgcacgtatgaggcaaagctgctggccttcgggatccctctggacaacgtgggcttcaagcccttggaaacagctgtgatcggacagacactgggccagggccccgcgggactggtgggcaccccgacgtagctgcccccctggggggccacagcccagagaaccagcctaggaacactcgggatgacaccccttatcacaccaaggacagcaagttttttagattttatcatcagcaaatgaaagcttttcacatgtt

SEQ ID NO: 12857 - DNA, 1080 bp, Homo sapiens
  source 1..1080: mol_type = unassigned DNA
ctggtcccggagtcgccgctgggcctgtccgctggcgtcatggcaccgaaaaagaaagggaagaaaggcaaagccaaaggcaccccgattgtcgatgggctcgctccagaggacatgagcaaggagcaggtggaggagcatgtcagccgcatccgggaggagctggaccgcgagcgggaggaacgaaactacttccagctggagcgggacaagatccacaccttctgggagatcacacggaggcagctggaggagaagaaggctgagctgcggaacaaagaccgggagatggaagaagccgaggagaggcaccaggtggagatcaaggtgtacaagcagaaagtgaagcacctgctatatgagcaccagaacaacctgacagagatgaaggctgagggcactgtagtcatgaagctggcacagaaagagcaccgcatacaggagagtgtgctgcgcaaggacatgcgggcactgaaggtggagctcaaggagcaggagctggccagtgaggtggtggtgaagaacctgcggctgaaattgaggccaagtatgataagaagatgaagatgctgagggacgaactcgacttgcggagaaagactgagctccacgaagtggaggagaggaagaatggccagatccacacgctgatgcagcgccacgaggaggccttcaccgacattaagaactactacaacgacatcaccctcaacaacctggccctcatcaactccctcaaggtgctgtgcgtgggctgggctggggaggcacactctgcctgtcctagaatgtgggctgcagagtcctggggatccagaccccagctctccaccccaacacacccagtactttttataagattgtttgacaatgcccctctcatatccttaactgaaattcctaaataacgtaacctatctctacctattgttaaaagcagtcaggatattgccctcaccgtagtgcagagggggaagtaatgaagtgtgttctggtttgtaaaagctcagatggaaccgcagtgagggccgtgatgtggctggagtggataggtgtcatagtcactgcctgcgacaggtg

SEQ ID NO: 12858 - DNA, 1308 bp, Homo sapiens
  source 1..1308: mol_type = unassigned DNA
gcttccgggggcgggcgccctggtcccggagtcgccgctgggcctgtccgctggcgtcatggtggaggagcatgtcagccgcatccgggaggagctggaccgcgagcgggaggaacgaaactacttccagctggagcgggacaagatccacaccttctgggagatcacacggaggcagctggaggagaagaaggctgagctgcggaacaaagaccgggagatggaagaagccgaggagaggcaccaggtggagatcaaggtgtacaagcagaaagtgaagcacctgctatatgagcaccagaacaacctgacagagatgaaggctgagggcactgtagtcatgaagctggcacagaaagagcaccgcatacaggagagtgtgctgcgcaaggacatgcgggcactgaaggtggagctcaaggagcaggagctggccagtgaggtggtggtgaagaacctgcggctgaaacacaccgaggagatcaccaggatgcggaatgattttgagaggcaagttcgagaaattgaggccaagtatgataagaagatgaagatgctgagggacgaactcgacttgcggagaaagactgagctccacgaagtggaggagaggaagaatggccagatccacacgctgatgcagcgccacgaggaggccttcaccgacattaagaactactacaacgacatcaccctcaacaacctggccctcatcaactccctcaaggagcagatggaggacatgcggaagaaggaggaccacctggagagggagatggcagaggtgtctgggcagaacaagcgcctggcagaccctctccagaaggctcgggaggagatgagcgagatgcagaaacagctcgcaaactacgagagggacaagcagatcctgctttgcacaaaagcccgtttgaaagtcagggagaaagagctgaaagacctgcagtgggagcatgaagtgttagagcagcgattcaccaaggtgcagcaggagcgggacgagctctatcggaagttcaccgcagccatccaggaggtgcagcagaagacagggttcaagaacctcgtgctagaacgcaagctgcaggctctgagcgccgctgtggagaagaaggaggtgcagttcaacgaggtcctggctgcctctaacctggaccctgcagccctgacgctggtgtcccgcaagctggagacctttttctgctgacaaccctgtgtggatggatgcatccatcaaaccaggctgctattcgctggatctctcagaacgcccactggagtccccaggccgctcccgttgcctcggcc

SEQ ID NO: 12859 - DNA, 1691 bp, Homo sapiens
  source 1..1691: mol_type = unassigned DNA
tccgagaaagagacggagagagagggaagaaaaagacagatagatagatattggggggaaggagaaaaaaggagaagagagggaagagaggacagcggagagagagcaccagagagagagggagagagagagagagcgctagagagagggagcgagcatgtgcgatgagcaatagctgtggaccttacagttgctgctaactgccctggtgtgtgtgagggagagagagggagggagggagagagagcgcgctagcgcgagagagcgagtgagcaagcgagcagaaaagaggtggagagggggggaataagaaagagagagaaggaaaggagagaaggcaggaagaaggcaagggacgagacaaccatgctgtgctgtatgagaagaaccaaacaggttgaaaaaaatgatgacgaccaaaagattgaacaagatggtatcaaaccagaagataaagctcataaggccgcaaccaaaattcaggctagcttccgtggacacataacaaggaaaaagctcaaaggagagaagaaggatgatgtccaagctgctgaggctgaagctaataagaaggatgaagcccctgttgccgatggggtggagaagaagggagaaggcaccactactgccgaagcagccccagccactggctccaagcctgatgagcccggcaaagcaggagaaactccttccgaggagaagaagggggagggtgatgctgccacagagcaggcagccccccaggctcctgcatcctcagaggagaaggccggctcagctgagacagaaagtgccactaaagcttccactgataactcgccgtcctccaaggctgaagatgccccagccaaggaggagcctaaacaagccgatgtgcctgctgctgtcactgctgctgctgccaccacccctgccgcagaggatgctgctgccaaggcaacagcccagcctccaacggagactggggagagcagccaagctgaagagaacatagaagctgtagatgaaaccaaacctaaggaaagtgcccggcaggacgagggtaaagaagaggaacctgaggctgaccaagaacatgcctgaactctaagaaatggctttccacatccccaccctcccctctcctgagcctgtctctccctaccctcttctcagctccactctgaagtcccttcctgtcctgctcacgtctgtgagtctgtcctttcccacccactagccctctttctctctgtgtggcaaacatttaaaaaaaaaaaaaaaaagcaggaaagatcccaagtcaaacagtgtggcttaaacattttttgtttcttggtgttgttatggcaagtttttggtaatgatgattcaatcattttgggaaattcttgcactgtatccaagttatttgatctggtgcgtgtggccctgtgggagtccactttcctctctctctctctctctgttccaagtgtgtgtgcaatgttccgttcatctgaggagtccaaaatatcgagtgaattcaaaatcatttttgttttcctccttttcaatgtgatggaatgaacaaaaaggaaaaaattcaaaaaacccagtttgttttaaaaataaataaataaagcaaatgtgccaattagcgtaaacttgcggctctaaggctcctttttcaacccgaatattaataaatcatgagagtaatcaaggtccaa

SEQ ID NO: 12860 - DNA, 1901 bp, Homo sapiens
  source 1..1901: mol_type = unassigned DNA
acagttgctgctaactgccctggtgtgtgtgagggagagagagggagggagggagagagagcgcgctagcgcgagagagcgagtgagcaagcgagcagaaaagaggtggagagggggggaataagaaagagagagaaggaaaggagagaaggcaggaagaaggcaagggacgagacaaccatgctgtgctgtatgagaagaaccaaacagaattaaaagggaacctggtctctgggttgttttcaacatctcaagtgtgaattttccctgtcaaaatcttcacaaggaaaatgagtcacagcatcacctgggtgacgaggtcataacacctcagcccttgcttaaaaaattttatttctacttttctattgtaaagagatctcaaaacaggaagataaaattggactgacagctctacagcctagtcttttagacagtgaactaggccagcattggcagacactggcgatgacaaagtcctgctctgaattatgccaccccgcactccactttttaccttgcctgggaggcttgaggaaaaatcttcagagagcagttcgacctagtccttattcacttggcttcttgactttctggatttcaagggttgaaaaaaatgatgacgaccaaaagattgaacaagatggtatcaaaccagaagataaagctcataaggccgcaaccaaaattcaggctagcttccgtggacacataacaaggaaaaagctcaaaggagagaagaaggatgatgtccaagctgctgaggctgaagctaataagaaggatgaagcccctgttgccgatggggtggagaagaagggagaaggcaccactactgccgaagcagccccagccactggctccaagcctgatgagcccggcaaagcaggagaaactccttccgaggagaagaagggggagggtgatgctgccacagagcaggcagccccccaggctcctgcatcctcagaggagaaggccggctcagctgagacagaaagtgccactaaagcttccactgataactcgccgtcctccaaggctgaagatgccccagccaaggaggagcctaaacaagccgatgtgcctgctgctgtcactgctgctgctgccaccacccctgccgcagaggatgctgctgccaaggcaacagcccagcctccaacggagactggggagagcagccaagctgaagagaacatagaagctgtagatgaaaccaaacctaaggaaagtgcccggcaggacgagggtaaagaagaggaacctgaggctgaccaagaacatgcctgaactctaagaaatggctttccacatccccaccctcccctctcctgagcctgtctctccctaccctcttctcagctccactctgaagtcccttcctgtcctgctcacgtctgtgagtctgtcctttcccacccactagccctctttctctctgtgtggcaaacatttaaaaaaaaaaaaaaaaagcaggaaagatcccaagtcaaacagtgtggcttaaacattttttgtttcttggtgttgttatggcaagtttttggtaatgatgattcaatcattttgggaaattcttgcactgtatccaagttatttgatctggtgcgtgtggccctgtgggagtccactttcctctctctctctctctctgttccaagtgtgtgtgcaatgttccgttcatctgaggagtccaaaatatcgagtgaattcaaaatcatttttgttttcctccttttcaatgtgatggaatgaacaaaaaggaaaaaattcaaaaaacccagtttgttttaaaaataaataaataaagcaaatgtgccaattagcgtaaacttgcggctctaaggctcctttttcaacccgaatattaataaatcatgagagtaatcaaggtccaa

SEQ ID NO: 12861 - DNA, 2558 bp, Homo sapiens
  source 1..2558: mol_type = unassigned DNA
acgcggggcgcgcggctccgtcggctaccgcgggcgggcgcaggcgacgggcacggcgggcgagcgggcggtatggcggcggcggggcccgcggcggggccgacggggcccgagcccatgccgagctacgcgcagctagtgcagcgcggctggggcagcgcgctggcggcggcgcggggctgcacggactgcggctgggggctggcgcgtcgcggcctggctgagcacgcgcacctggcgccgcccgagctgctgctgctggcgctcggcgcgctgggctggaccgccctgcgctccgcggccactgcgcgcctctttcggcccctggcgaagcggtgctgcctccagcccagagatgccgccaagatgcccgagagcgcttggaagtttctcttctacctgggcagctggagctacagtgcctacctgctgtttggcaccgactaccccttcttccatgacccaccatctgtcttctacgactggacgccgggcatggcagtgccacgggacattgcagccgcctacctgctccagggaagcttctatggccactccatctacgctacgctatacatggacacctggcgcaaggactcggtggtcatgctgctccaccacgtggtcactctcatcctcatcgtctcctcctacgccttccggtaccacaatgtgggcatccttgtgctcttcctgcacgatatcagtgacgtgcagcttgagttcaccaagctcaacatttacttcaagtcccgcggcggctcctaccatcggctgcatgccttggcagcagacttgggctgcctcagcttcggcttcagctggttctggttccgcctctactggttcccgctcaaggtcctgtatgccaccagtcactgcagtctgcgcacggtgcctgacatccccttctacttcttcttcaatgcgctcctgctgctgctcacccttatgaacctctactggttcctgtacatcgtggcgtttgcagccaaggtgttgacaggccaggtgcacgagctgaaggacctgcgggagtatgacacagccgaggcccagagcctgaagcccagcaaagccgagaagccactgaggaacggcctggtgaaggacaagcgcttctgaacccctcggccccgcccccgtggacccggccccaccccgaataccccggccacgctccccgtccttggccgcccctccaccccctccaactctgctcctctagggccgccgccacctcccctgggaccccgccccctcatcctgcctccagttcccggccacgccccccaggacccctgcccctccggggacaccggccccgccctcagcccactggtcccgggccgccgcggaccctgcgcactctctggtcatcgcctgggaggaagatgccaccgccgcagcaaggtccctgcggccaccacctcctcctcctcctggccctgctgctgccctcgctgcccctgacccgcgcccccgtgcccccaggcccagccgccgccctgctccaggctctaggactgcgcgatgagccccagggtgcccccaggctccggccggttcccccggtcatgtggcgcctgtttcgacgccgggacccccaggagaccaggtctggctcgcggcggacgtccccaggggtcaccctgcaaccgtgccacgtggaggagctgggggtcgccggaaacatcgtgcgccacatcccggaccgcggtgcgcccacccgggcctcggagcctgcctcggccgcggggcattgccctgagtggacagtcgtcttcgacctgtcggctgtggaacccgctgagcgcccgagccgggcccgcctggagctgcgtttcgcggcggcggcggcggcagccccggagggcggctgggagctgagcgtggcgcaagcgggccagggcgcgggcgcggaccccgggccggtgctgctccgccagttggtgcccgccctggggccgccagtgcgcgcggagctgctgggcgccgcttgggctcgcaacgcctcatggccgcgcagcctccgcctggcgctggcgctacgcccccgggcccctgccgcctgcgcgcgcctggccgaggcctcgctgctgctggtgaccctcgacccgcgcctgtgccaccccctggcccggccgcggcgcgacgccgaacccgtgttgggcggcggccccgggggcgcttgtcgcgcgcggcggctgtacgtgagcttccgcgaggtgggctggcaccgctgggtcatcgcgccgcgcggcttcctggccaactactgccagggtcagtgcgcgctgcccgtcgcgctgtcggggtccggggggccgccggcgctcaaccacgctgtgctgcgcgcgctcatgcacgcggccgccccgggagccgccgacctgccctgctgcgtgcccgcgcgcctgtcgcccatctccgtgctcttctttgacaacagcgacaacgtggtgctgcggcagtatgaggacatggtggtggacgagtgcggctgccgctaacccggggcgggcagggacgcgggcccaacaataaatgccgcgtgg

SEQ ID NO: 12862 - DNA, 3731 bp, Homo sapiens
  source 1..3731: mol_type = unassigned DNA
tccccgccccccagtcctccctcccctcccctccagcatggtgctcgcggccccgctgctgctgggcttcctgctcctcgccctggagctgcggccccggggggaggcggccgagggccccgcggcggcggcggcggcggcggcggcggcggcagcggcgggggtcgggggggagcgctccagccggccagccccgtccgtggcgcccgagccggacggctgccccgtgtgcgtttggcggcagcacagccgcgagctgcgcctagagagcatcaagtcgcagatcttgagcaaactgcggctcaaggaggcgcccaacatcagccgcgaggtggtgaagcagctgctgcccaaggcgccgccgctgcagcagatcctggacctacacgacttccagggcgacgcgctgcagcccgaggacttcctggaggaggacgagtaccacgccaccaccgagaccgtcattagcatggcccaggagacggacccagcagtacagacagatggcagccctctctgctgccattttcacttcagccccaaggtgatgttcacaaaggtactgaaggcccagctgtgggtgtacctacggcctgtaccccgcccagccacagtctacctgcagatcttgcgactaaaacccctaactggggaagggaccgcagggggagggggcggaggccggcgtcacatccgtatccgctcactgaagattgagctgcactcacgctcaggccattggcagagcatcgacttcaagcaagtgctacacagctggttccgccagccacagagcaactggggcatcgagatcaacgcctttgatcccagtggcacagacctggctgtcacctccctggggccgggagccgaggggctgcatccattcatggagcttcgagtcctagagaacacaaaacgttcccggcggaacctgggtctggactgcgacgagcactcaagcgagtcccgctgctgccgatatcccctcacagtggactttgaggctttcggctgggactggatcatcgcacctaagcgctacaaggccaactactgctccggccagtgcgagtacatgttcatgcaaaaatatccgcatacccatttggtgcagcaggccaatccaagaggctctgctgggccctgttgtacccccaccaagatgtccccaatcaacatgctctacttcaatgacaagcagcagattatctacggcaagatccctggcatggtggtggatcgctgtggctgctcttaaggtgggggatagaggatgcctcccccacagaccctaccccaagacccctagccctgcccccatccccccaagccctagagctccctccactcttcccgcgaacatcacaccgttccccgaccaagccgtgtgcaatacaacagagggaggcaggtgggaattgagggtgaggggtttgggggaaaggggaagcaggggcatagtcagggtggggagtgtttgaagtttgcagatgagaaggtttgacaaaaagacagagagatgtagagacagtgatagagacagaggaacaaaaagagcagcagtgagaaggcaaagagagaggcagaagagacagacgaggcagagacaaaacactgagaaagagactgaaatggagtaataaatgaaagccccacaccaagcctcctttcttccactggcaaggtgaggggcttggtatagtttggggagatcccctgactattcagtaggagaagaaatcaaaaatccattcttttctccttctctccctccaacagtggccaggggaaggggaagtgagggcaggggcaaaaagatttgggaatttttatttatttatttattgtgacttttcatttttttggtatttggctttactggaataggagggcccctgcccactgtgccccgtttatcccttattccccaaaccctgctctccccaacacctactcacttaagcacttgtataaagcctccagggttgggaatgggagtaaagggcaagagggcggacacatgaagtttagtttctaacccatcatcaccctaactcaaccttttctgagccaaatggcttgaattgaagccagttgtcatggaaatagtaagaggttagggtttaagagctggggatgcgggggtgggagagagaaccctcaacatccaggatctatataatgagagctactttaaaccctcaggtccaccctcatgatgctgagttatttagccagagggtgcagcctgcttatgcccaaattccctcagccaagagagagaccaaagagcctctggaatggccctgctcccagcctctatcttcaggtcaattagagagagtatagagaccccagagtcccctgggtctggaaagcgttaggagaggtcaagaaaggagcagtaaggaggctgaaggttacagggcatttgaatccaaatcactgctctgggctagggaatagagccagcagaccaaggtgggaaggattctggaagggggacattttagtctcctaaccccaaagctcagggtggaagaggggagaacaaggaagcagagtgtataattattttttccttttatttttggaatctaacagtacctggcagcagggaggggaaagtacagtggggaaaagcatctgacaaggccagttagaacagaggatgggaaggatggagactcccgggcttggaaggctaggaagcaggcagagactggttgccatttcaagtcactagctaggcccattcattcctcccacaaccctgacccattctcctctggactcactgtgcctcagtttcttcccctcaatggaatgagaaatgacagcacccgccacagccaagagatgaattctgagcacttaccacgggcactttatggacataaaatacctctcgctgtgggacagataaccagggcaccagagtagtggtgaagagatgtgaggcttaagaggagtcacaggcttcagagtacaagttcccctctgcctcccagctggacagtgcctagaagccaaggagttgagaatctcctgatccacaccctatccttacttcaccaccaggcctcttggctccaggcaagagcttagaggatgtcaggagaggtgggggtaagaatcttcagcaaaactgtcactctaagtagagccagcagttacgggtctgataaaaacagtactgaactaaagtaaagcccaagctggtgagcaaaactggatggctcattcttcccaagagcatgactctcccccttggccagttggtggaaggggcaaaggtatgtgaccacccttgagaaggtgatgttggtgagctttaacatcttattcctattcttatagtgagaaagtgaaacaagatctttcagtagaggaatgggcagggctgttaggctcttcagcttgccttcacccatatagcagctatgctaaccccaagcctctctggccctgttcttcatccttccttctgccccaatcctgaaggacaagacacacccggccatcaacaccactcacatttccttggtggaaggaaaggaacagagaagtgaagaacagatacctccctccaaggtcaaatgcctcgtgatcttggcagagtagggattgggcaataagcatcaggtatcttccctctacagattctagagagctggggcattaaatatgggggacacttagaatacagctccttaaataccaccaaa

SEQ ID NO: 12863 - DNA, 1258 bp, Homo sapiens
  source 1..1258: mol_type = unassigned DNA
ccgcggcggcggcggcggcggcggcggcggcggcagcggcgggggtcgggggggagcgctccagccggccagccccgtccgtggcgcccgagccggacggctgccccgtgtgcgtttggcggcagcacagccgcgagctgcgcctagagagcatcaagtcgcagatcttgagcaaactgcggctcaaggaggcgcccaacatcagccgcgaggtggtgaagcagctgctgcccaaggcgccgccgctgcagcagatcctggacctacacgacttccagggcgacgcgctgcagcccgaggacttcctggaggaggacgagtaccacgccaccaccgagaccgtcattagcatggcccaggagacggacccagcagtacagacagatggcagccctctctgctgccattttcacttcagccccaaggtgatgttcacaaaggtactgaaggcccagctgtgggtgtacctacggcctgtaccccgcccagccacagtctacctgcagatcttgcgactaaaacccctaactggggaagggaccgcagggggagggggcggaggccggcgtcacatccgtatccgctcactgaagattgagctgcactcacgctcaggccattggcagagcatcgacttcaagcaagtgctacacagctggttccgccagccacagagcaactggggcatcgagatcaacgcctttgatcccagtggcacagacctggctgtcacctccctggggccgggagccgaggggctgcatccattcatggagcttcgagtcctagagaacacaaaacgttcccggcggaacctgggtctggactgcgacgagcactcaagcgagtcccgctgctgccgatatcccctcacagtggactttgaggctttcggctgggactggatcatcgcacctaagcgctacaaggccaactactgctccggccagtgcgagtacatgttcatgcaaaaatatccgcatacccatttggtgcagcaggccaatccaagaggctctgctgggccctgttgtacccccaccaagatgtccccaatcaacatgctctacttcaatgacaagcagcagattatctacggcaagatccctggcatggtggtggatcgctgtggctgctcttaagtgggtcactacaagctgctggagcaaagacttggtgggtgggtaacttaacctcttcacagaggataaaaaatgcttgtgagtatgacagaagggaataaacaggcttaaagggt

SEQ ID NO: 12864 - DNA, 1200 bp, Homo sapiens
  source 1..1200: mol_type = unassigned DNA
agtcccagctcagagccgcaacctgcacagccatgcccgggcaagaactcaggacggtgaatggctctcagatgctcctggtgttgctggtgctctcgtggctgccgcatgggggcgccctgtctctggccgaggcgagccgcgcaagtttcccgggaccctcagagttgcactccgaagactccagattccgagagttgcggaaacgctacgaggacctgctaaccaggctgcgggccaaccagagctgggaagattcgaacaccgacctcgtcccggcccctgcagtccggatactcacgccagaagtgcggctgggatccggcggccacctgcacctgcgtatctctcgggccgcccttcccgaggggctccccgaggcctcccgccttcaccgggctctgttccggctgtccccgacggcgtcaaggtcgtgggacgtgacacgaccgctgcggcgtcagctcagccttgcaagaccccaggcgcccgcgctgcacctgcgactgtcgccgccgccgtcgcagtcggaccaactgctggcagaatcttcgtccgcacggccccagctggagttgcacttgcggccgcaagccgccagggggcgccgcagagcgcgtgcgcgcaacggggaccactgtccgctcgggcccgggcgttgctgccgtctgcacacggtccgcgcgtcgctggaagacctgggctgggccgattgggtgctgtcgccacgggaggtgcaagtgaccatgtgcatcggcgcgtgcccgagccagttccgggcggcaaacatgcacgcgcagatcaagacgagcctgcaccgcctgaagcccgacacggtgccagcgccctgctgcgtgcccgccagctacaatcccatggtgctcattcaaaagaccgacaccggggtgtcgctccagacctatgatgacttgttagccaaagactgccactgcatatgagcagtcctggtccttccactgtgcacctgcgcggaggacgcgacctcagttgtcctgccctgtggaatgggctcaaggttcctgagacacccgattcctgcccaaacagctgtatttatataagtctgttatttattattaatttattggggtgaccttcttggggactcgggggctggtctgatggaactgtgtatttatttaaaactctggtgataaaaataaagctgtctgaactgtt

SEQ ID NO: 12865 - DNA, 1720 bp, Homo sapiens
  source 1..1720: mol_type = unassigned DNA
agaaagcaactagcacagccatgcccaggccaggacccgtgacacagcgatgctctcagatgctgctgatgttacagatgttgttgggggcaccctgagggggcaccctgactctgcaggtgagaaccttctggggttcctaggaccctcggacaagcactctgatccggatgactccaggtcccaggagttgcagaaacgccaccaggaccttcagagcaccagttagacaaggagagccaggaggagctgggccccaacctcatccaaaagcacagactcccaggctggaatggtgtcctcatatcgaggaagaggatactgaggcccagaaatgtgccctagctttactaggagcgcccccacctaaagatcctccccctaaatacacccccagaccccgcccagctgtggtcattggagtgtttactctgcaggcagggggaggagggcgggactgagcaggcggagacggacaaagtccggggactataaaggccggtccggcagcatctggtcagtcccagctcagagccgcaacctgcacagccatgcccgggcaagaactcaggacggtgaatggctctcagatgctcctggtgttgctggtgctctcgtggctgccgcatgggggcgccctgtctctggccgaggcgagccgcgcaagtttcccgggaccctcagagttgcactccgaagactccagattccgagagttgcggaaacgctacgaggacctgctaaccaggctgcgggccaaccagagctgggaagattcgaacaccgacctcgtcccggcccctgcagtccggatactcacgccagaagtgcggctgggatccggcggccacctgcacctgcgtatctctcgggccgcccttcccgaggggctccccgaggcctcccgccttcaccgggctctgttccggctgtccccgacggcgtcaaggtcgtgggacgtgacacgaccgctgcggcgtcagctcagccttgcaagaccccaggcgcccgcgctgcacctgcgactgtcgccgccgccgtcgcagtcggaccaactgctggcagaatcttcgtccgcacggccccagctggagttgcacttgcggccgcaagccgccagggggcgccgcagagcgcgtgcgcgcaacggggaccactgtccgctcgggcccgggcgttgctgccgtctgcacacggtccgcgcgtcgctggaagacctgggctgggccgattgggtgctgtcgccacgggaggtgcaagtgaccatgtgcatcggcgcgtgcccgagccagttccgggcggcaaacatgcacgcgcagatcaagacgagcctgcaccgcctgaagcccgacacggtgccagcgccctgctgcgtgcccgccagctacaatcccatggtgctcattcaaaagaccgacaccggggtgtcgctccagacctatgatgacttgttagccaaagactgccactgcatatgagcagtcctggtccttccactgtgcacctgcgcggaggacgcgacctcagttgtcctgccctgtggaatgggctcaaggttcctgagacacccgattcctgcccaaacagctgtatttatataagtctgttatttattattaatttattggggtgaccttcttggggactcgggggctggtctgatggaactgtgtatttatttaaaactctggtgataaaaataaagctgtctgaactgttc

SEQ ID NO: 12866 - DNA, 1936 bp, Homo sapiens
  source 1..1936: mol_type = unassigned DNA
tccagcccggcagcgggtgagagtgggtgctggccaggacggttccttcagagcaaacagcagggagatgccggcccgctccttcccagctcctccccgtgcccgctaacacagcacggccgcctgcagtctcctctctgggtgattgcgcgggcctaagatgtgtcctggggcactgtgggtggccctgcccctgctgtccctgctggctggctccctacaggggaagccactgcagagctggggacgagggtctgctgggggaaacgcccacagcccactgggggtgcctggaggtgggctgcctgagcacaccttcaacctgaagatgtttctggagaacgtgaaggtggatttcctgcgcagccttaacctgagtggggtcccttcgcaggacaaaaccagggtggagccgccgcagtacatgattgacctgtacaacaggtacacgtccgataagtcgactacgccagcgtccaacattgtgcggagcttcagcatggaagatgccatctccataactgccacagaggacttccccttccagaagcacatcttgctcttcaacatctccattcctaggcatgagcagatcaccagagctgagctccgactctatgtctcctgtcaaaatcacgtggacccctctcatgacctgaaaggaagcgtggtcatttatgatgttctggatggaacagatgcctgggatagtgctacagagaccaagaccttcctggtgtcccaggacattcaggatgagggctgggagaccttggaagtgtccagcgccgtgaagcgctgggtccggtccgactccaccaagagcaaaaataagctggaagtgactgtggagagccacaggaagggctgcgacacgctggacatcagtgtccccccaggttccagaaacctgcccttctttgttgtcttctccaatgaccacagcagtgggaccaaggagaccaggctggagctgagggagatgatcagccatgaacaagagagcgtgctcaagaagctgtccaaggacggctccacagaggcaggtgagagcagtcacgaggaggacacggatggccacgtggctgcggggtcgactttagccaggcggaaaaggagcgccggggctggcagccactgtcaaaagacctccctgcgggtaaacttcgaggacatcggctgggacagctggatcattgcacccaaggagtatgaagcctacgagtgtaagggcggctgcttcttccccttggctgacgatgtgacgccgacgaaacacgctatcgtgcagaccctggtgcatctcaagttccccacaaaggtgggcaaggcctgctgtgtgcccaccaaactgagccccatctccgtcctctacaaggatgacatgggggtgcccaccctcaagtaccattacgagggcatgagcgtggcagagtgtgggtgcaggtagtatctgcctgcggggctggggaggcaggccaaaggggctccacatgagaggtcctgcatgcccctgggcacaacaaggactgattcaatctgcatgccagcctggaggaggaaagggagcctgctctccctccccacaccccacccaaagcatacaccgctgagctcaactgccagggaaggctaaggaaatggggatttgagcacaacaggaaagcctgggagggttgttgggatgcaaggaggtgatgaaaaggagacagggggaaaaataatccatagtcagcagaaaacaacagcagtgagccagaggagcacaggcgggcaggtcactgcagagactgatggaagttagagaggtggaggaggccagctcgctccaaaacccttggggagtagagggaaggagcaggccgcgtgtcacacccatcattgtatgttatttcccacaacccagttggaggggcatggcttccaatttagagac

SEQ ID NO: 12867 - DNA, 1239 bp, Homo sapiens
  source 1..1239: mol_type = unassigned DNA
cagtctggcagtggagctctccccggtctgacagccactccagaggccatgcttcgtttcttgccagatttggctttcagcttcctgttaattctggctttgggccaggcagtccaatttcaagaatatgtctttctccaatttctgggcttagataaggcgccttcaccccagaagttccaacctgtgccttatatcttgaagaaaattttccaggatcgcgaggcagcagcgaccactggggtctcccgagacttatgctacgtaaaggagctgggcgtccgcgggaatgtacttcgctttctcccagaccaaggtttctttctttacccaaagaaaatttcccaagcttcctcctgcctgcagaagctcctctactttaacctgtctgccatcaaagaaagggaacagttgacattggcccagctgggcctggacttggggcccaattcttactataacctgggaccagagctggaactggctctgttcctggttcaggagcctcatgtgtggggccagaccacccctaagccaggtaaaatgtttgtgttgcggtcagtcccatggccacaaggtgctgttcacttcaacctgctggatgtagctaaggattggaatgacaacccccggaaaaatttcgggttattcctggagatactggtcaaagaagatagagactcaggggtgaattttcagcctgaagacacctgtgccagactaagatgctcccttcatgcttccctgctggtggtgactctcaaccctgatcagtgccacccttctcggaaaaggagagcagccatccctgtccccaagctttcttgtaagaacctctgccaccgtcaccagctattcattaacttccgggacctgggttggcacaagtggatcattgcccccaaggggttcatggcaaattactgccatggagagtgtcccttctcactgaccatctctctcaacagctccaattatgctttcatgcaagccctgatgcatgccgttgacccagagatcccccaggctgtgtgtatccccaccaagctgtctcccatttccatgctctaccaggacaataatgacaatgtcattctacgacattatgaagacatggtagtcgatgaatgtgggtgtgggtaggatgtcagaaatgggaatagaaggagtgttcttagggtaaatcttttaataaaactacctatctggtttatgaccacttagatcgaaatgtcaata

SEQ ID NO: 12868 - DNA, 2383 bp, Homo sapiens
  source 1..2383: mol_type = unassigned DNA
ttcaagccctcagtcagttgtgcaggagaaagggggcggttggctttctcctttcaagaacgagttattttcagctgctgactggagacggtgcacgtctggatacgagagcatttccactatgggactggatacaaacacacacccggcagacttcaagagtctcagactgaggagaaagcctttccttctgctgctactgctgctgccgctgcttttgaaagtccactcctttcatggtttttcctgccaaaccagaggcacctttgctgctgccgctgttctctttggtgtcattcagcggctggccagaggatgagactccccaaactcctcactttcttgctttggtacctggcttggctggacctggaattcatctgcactgtgttgggtgcccctgacttgggccagagaccccaggggaccaggccaggattggccaaagcagaggccaaggagaggccccccctggcccggaacgtcttcaggccagggggtcacagctatggtgggggggccaccaatgccaatgccagggcaaagggaggcaccgggcagacaggaggcctgacacagcccaagaaggatgaacccaaaaagctgccccccagaccgggcggccctgaacccaagccaggacaccctccccaaacaaggcaggctacagcccggactgtgaccccaaaaggacagcttcccggaggcaaggcacccccaaaagcaggatctgtccccagctccttcctgctgaagaaggccagggagcccgggcccccacgagagcccaaggagccgtttcgcccaccccccatcacaccccacgagtacatgctctcgctgtacaggacgctgtccgatgctgacagaaagggaggcaacagcagcgtgaagttggaggctggcctggccaacaccatcaccagctttattgacaaagggcaagatgaccgaggtcccgtggtcaggaagcagaggtacgtgtttgacattagtgccctggagaaggatgggctgctgggggccgagctgcggatcttgcggaagaagccctcggacacggccaagccagcggcccccggaggcgggcgggctgcccagctgaagctgtccagctgccccagcggccggcagccggcctccttgctggatgtgcgctccgtgccaggcctggacggatctggctgggaggtgttcgacatctggaagctcttccgaaactttaagaactcggcccagctgtgcctggagctggaggcctgggaacggggcagggccgtggacctccgtggcctgggcttcgaccgcgccgcccggcaggtccacgagaaggccctgttcctggtgtttggccgcaccaagaaacgggacctgttctttaatgagattaaggcccgctctggccaggacgataagaccgtgtatgagtacctgttcagccagcggcgaaaacggcgggccccactggccactcgccagggcaagcgacccagcaagaaccttaaggctcgctgcagtcggaaggcactgcatgtcaacttcaaggacatgggctgggacgactggatcatcgcaccccttgagtacgaggctttccactgcgaggggctgtgcgagttcccattgcgctcccacctggagcccacgaatcatgcagtcatccagaccctgatgaactccatggaccccgagtccacaccacccacctgctgtgtgcccacgcggctgagtcccatcagcatcctcttcattgactctgccaacaacgtggtgtataagcagtatgaggacatggtcgtggagtcgtgtggctgcaggtagcagcactggccctctgtcttcctgggtggcacatcccaagagccccttcctgcactcctggaatcacagaggggtcaggaagctgtggcaggagcatctacacagcttgggtgaaaggggattccaataagcttgctcgctctctgagtgtgacttgggctaaaggcccccttttatccacaagttcccctggctgaggattgctgcccgtctgctgatgtgaccagtggcaggcacaggtccagggagacagactctgaatgggactgagtcccaggaaacagtgctttccgatgagactcagcccaccatttctcctcacctgggccttctcagcctctggactctcctaagcacctctcaggagagccacaggtgccactgcctcctcaaatcacatttgtgcctggtgacttcctgtccctgggacagttgagaagctgactgggcaagagtgggagagaagaggagagggcttggatagagttgaggagtgtgaggctgttagactgttagatttaaatgtatattgatgagataaaaagcaaaactgtgcctaaaa

SEQ ID NO: 12869 - DNA, 2572 bp, Homo sapiens
  source 1..2572: mol_type = unassigned DNA
cgctgccactggttagcgataatactggcagcgcgaccggtttctgagggttgttcaccttgctgctcagacgctccgagaagcttcaggcagcataacacttacagtagagacagggtttcaccatgttagccaggatggtcttgatctcctgacctcgtgatccacctgcctcggcctcccaaagtgctgggattacaggcgtgagccactgcgcctggccgcaatttacttcattgaatctccaacaagagtcctgtgagctgctgactggagacggtgcacgtctggatacgagagcatttccactatgggactggatacaaacacacacccggcagacttcaagagtctcagactgaggagaaagcctttccttctgctgctactgctgctgccgctgcttttgaaagtccactcctttcatggtttttcctgccaaaccagaggcacctttgctgctgccgctgttctctttggtgtcattcagcggctggccagaggatgagactccccaaactcctcactttcttgctttggtacctggcttggctggacctggaattcatctgcactgtgttgggtgcccctgacttgggccagagaccccaggggaccaggccaggattggccaaagcagaggccaaggagaggccccccctggcccggaacgtcttcaggccagggggtcacagctatggtgggggggccaccaatgccaatgccagggcaaagggaggcaccgggcagacaggaggcctgacacagcccaagaaggatgaacccaaaaagctgccccccagaccgggcggccctgaacccaagccaggacaccctccccaaacaaggcaggctacagcccggactgtgaccccaaaaggacagcttcccggaggcaaggcacccccaaaagcaggatctgtccccagctccttcctgctgaagaaggccagggagcccgggcccccacgagagcccaaggagccgtttcgcccaccccccatcacaccccacgagtacatgctctcgctgtacaggacgctgtccgatgctgacagaaagggaggcaacagcagcgtgaagttggaggctggcctggccaacaccatcaccagctttattgacaaagggcaagatgaccgaggtcccgtggtcaggaagcagaggtacgtgtttgacattagtgccctggagaaggatgggctgctgggggccgagctgcggatcttgcggaagaagccctcggacacggccaagccagcggcccccggaggcgggcgggctgcccagctgaagctgtccagctgccccagcggccggcagccggcctccttgctggatgtgcgctccgtgccaggcctggacggatctggctgggaggtgttcgacatctggaagctcttccgaaactttaagaactcggcccagctgtgcctggagctggaggcctgggaacggggcagggccgtggacctccgtggcctgggcttcgaccgcgccgcccggcaggtccacgagaaggccctgttcctggtgtttggccgcaccaagaaacgggacctgttctttaatgagattaaggcccgctctggccaggacgataagaccgtgtatgagtacctgttcagccagcggcgaaaacggcgggccccactggccactcgccagggcaagcgacccagcaagaaccttaaggctcgctgcagtcggaaggcactgcatgtcaacttcaaggacatgggctgggacgactggatcatcgcaccccttgagtacgaggctttccactgcgaggggctgtgcgagttcccattgcgctcccacctggagcccacgaatcatgcagtcatccagaccctgatgaactccatggaccccgagtccacaccacccacctgctgtgtgcccacgcggctgagtcccatcagcatcctcttcattgactctgccaacaacgtggtgtataagcagtatgaggacatggtcgtggagtcgtgtggctgcaggtagcagcactggccctctgtcttcctgggtggcacatcccaagagccccttcctgcactcctggaatcacagaggggtcaggaagctgtggcaggagcatctacacagcttgggtgaaaggggattccaataagcttgctcgctctctgagtgtgacttgggctaaaggcccccttttatccacaagttcccctggctgaggattgctgcccgtctgctgatgtgaccagtggcaggcacaggtccagggagacagactctgaatgggactgagtcccaggaaacagtgctttccgatgagactcagcccaccatttctcctcacctgggccttctcagcctctggactctcctaagcacctctcaggagagccacaggtgccactgcctcctcaaatcacatttgtgcctggtgacttcctgtccctgggacagttgagaagctgactgggcaagagtgggagagaagaggagagggcttggatagagttgaggagtgtgaggctgttagactgttagatttaaatgtatattgatgagataaaaagcaaaactgtgcctaaaa

SEQ ID NO: 12870 - DNA, 3701 bp, Homo sapiens
  source 1..3701: mol_type = unassigned DNA
cccgaggagccgggccccggccgctgtccagccgctccgtgccccgcgcgtcctgcgccgccgccaccgcctcctggggagacgcagccacttgcccgccatggatactcccagggtcctgctctcggccgtcttcctcatcagttttctgtgggatttgcccggtttccagcaggcttccatctcatcctcctcgtcgtccgccgagctgggttccaccaagggcatgcgaagccgcaaggaaggcaagatgcagcgggcgccgcgcgacagtgacgcgggccgggagggccaggaaccacagccgcggcctcaggacgaaccccgggctcagcagccccgggcgcaggagccgccaggcaggggtccgcgcgtggtgccccacgagtacatgctgtcaatctacaggacttactccatcgctgagaagctgggcatcaatgccagctttttccagtcttccaagtcggctaatacgatcaccagctttgtagacaggggactagacgatctctcgcacactcctctccggagacagaagtatttgtttgatgtgtccatgctctcagacaaagaagagctggtgggcgcggagctgcggctctttcgccaggcgccctcagcgccctgggggccaccagccgggccgctccacgtgcagctcttcccttgcctttcgcccctactgctggacgcgcggaccctggacccgcagggggcgccgccggccggctgggaagtcttcgacgtgtggcagggcctgcgccaccagccctggaagcagctgtgcttggagctgcgggccgcatggggcgagctggacgccggggaggccgaggcgcgcgcgcggggaccccagcaaccgccgcccccggacctgcggagtctgggcttcggccggagggtgcggcctccccaggagcgggccctgctggtggtattcaccagatcccagcgcaagaacctgttcgcagagatgcgcgagcagctgggctcggccgaggctgcgggcccgggcgcgggcgccgaggggtcgtggccgccgccgtcgggcgccccggatgccaggccttggctgccctcgcccggccgccggcggcggcgcacggccttcgccagtcgccatggcaagcggcacggcaagaagtccaggctacgctgcagcaagaagcccctgcacgtgaacttcaaggagctgggctgggacgactggattatcgcgcccctggagtacgaggcctatcactgcgagggtgtatgcgacttcccgctgcgctcgcacctggagcccaccaaccacgccatcatccagacgctgatgaactccatggaccccggctccaccccgcccagctgctgcgtgcccaccaaattgactcccatcagcattctatacatcgacgcgggcaataatgtggtctacaagcagtacgaggacatggtggtggagtcgtgcggctgcaggtagcggtgcctttcccgccgccttggcccggaaccaaggtgggccaaggtccgccttgcaggggaggcctggctgcagagaggcggaggaggaagctggcgctgggggaggctgagggtgagggaacagcctggatgtgagagccggtgggagagaagggagcgcagccttcccagtaacttctacctgccagcccagagggaaatatggattttcacaccttgcctggccaccctggaaaaacaagccaaggaggatttcttttgttctgttttctctctctctctctctctctctctctctctctctctctctctctctattactgtggctttggatttccttatgtgtcttacaggctttgatagaaggggaggggaggagagatgcatacccgtttctcaactgctccatggattgaaaaaataacagtttaaaaagggaaacaatgtgggaggaagaatcaccgttgacgcatcttgatttggttggtttttacatgtgtaaagaaggtggggtctctggccatgtcatagcccatgtcttgtgccctcccacacagaaagtgttagatagggaaattggcaaaaagaatagttaagtcaggaatggtcctgcctatagaagagctttgagagaggtgggcccacgggtgcccctctcacccatttgtgtactctgtgagtttaccagctctgccctggcctctttcggtaccaggaactggcaaccttcatctcactcctgagggcccaggtctctgccttcattgttgctttttctggtgggggcaaggggagctggtatggatggaatgacaagaattagtccaaatggaaccccttgaaggataatgagaaaccacaaggcctgcctctgactggggctgacacggaggtgcattagcccaggctggaggtagcccacccaaatgccctttctgattctaattgatttctttcaacagaatttgccaaaattcagacatgcacttctaaggggaaggtgattttccagttcaaaaaaatgggcaggagtggggaacaaaacaattaacgtaagagctacaaaggagggaaaaggaaccaagaagtagaaggagtcccatcaggagggaagatggtgggcctcagggaggatggggatcaagggacaggccaggagccaggagtggggaagggagggatgaaaggggacacaagtccctgtctctgaagtttctttaaaatctgagttccctcccctctctttgacattcctgaaagattaccagccagcaatagcccagggctcccccaaaagaattggttcagattgtaattatcagttaggcaatgtttttaaaacttagtaatgagaaactgtgaaaagagccaagtgttacattgagcttggggtgggagatggggaacaggcagtgaggaaggagacaggggtggaattcgtcttctgggaggaagctggagagagcacagtgaaattgaaatacccattcccagatagtcaaaaacatgaactttcccccagcctgcaccagtattgttttcaaacattgcccatgagtaggccctttgaagagttagcttcctcctcatctttgactataaaattgtttaatcaatggaatttgtaccagccttttaaaaagttttagtttttcctaagtgattttgctctcttccaatctaaacctgttgcttgtttggttcagagaactacaaactgtcaaagaaagggtggggatgataagaaatgctaatataaaaatgctaagtgaaaaaaagacttggccaggagaaataatttaaaatgcacatttgctttggatgcactgttgttctgttaaggctgtatatatttgtttatttaaggtgactgaaagtgcaaagaggaaatggacagcatgcaattcatcctaatgtacaaaacgttatatgcactcaaatgttataatttctaatatttttaaagtttatattcgagttgtacaaagttaagcattaatcagatatttcattttttcataatgttaccattttcttaaatattattacaaaattttaagtctgtctaatggagagttttttttaaactgtctacctcatataatacaagtatttacaacgctaaagttaccagaggtcaatgaataatcaaaacattttttacagtacacctttcctggatgatatgcaatcgaatgctatattattaaacgcatttttctccttaataa

SEQ ID NO: 12871 - DNA, 1162 bp, Homo sapiens
  source 1..1162: mol_type = unassigned DNA
cccgaggagccgggccccggccgctgtccagccgctccgtgccccgcgcgtcctgcgccgccgccaccgcctcctggggagacgcagccacttgcccgccatggatactcccagggtcctgctctcggccgtcttcctcatcagttttctgtgggatttgcccggtttccagcaggcttccatctcatcctcctcgtcgtccgccgagctgggttccaccaagggcatgcgaagccgcaaggaaggcaagatgcagcgggcgccgcgcgacagtgacgcgggccgggagggccaggaaccacagccgcggcctcaggacgaaccccgggctcagcagccccgggcgcaggagccgccaggcaggggtccgcgcgtggtgccccacgagtacatgctgtcaatctacaggacttactccatcgctgagaagctgggcatcaatgccagctttttccagtcttccaagtcggctaatacgatcaccagctttgtagacaggggactagacgatctctcgcacactcctctccggagacagaagtatttgtttgatgtgtccatgctctcagacaaagaagagctggtgggcgcggagctgcggctctttcgccaggcgccctcagcgccctgggggccaccagccgggccgctccacgtgcagctcttcccttgcctttcgcccctactgctggacgcgcggaccctggacccgcagggggcgccgccggccggctgggaagtcttcgacgtgtggcagggcctgcgccaccagccctggaagcagctgtgcttggagctgcgggccgcatggggcgagctggacgccggggaggccgaggcgcgcgcgcggggaccccagcaaccgccgcccccggacctgcggagtctgggcttcggccggagggtgcggcctccccaggagcgggccctgctggtggtattcaccagatcccagcgcaagaacctgttcgcccctggagtacgaggcctatcactgcgagggtgtatgcgacttcccgctgcgctcgcacctggagcccaccaaccacgccatcatccagacgctgatgaactccatggaccccggctccaccccgcccagctgctgcgtgcccaccaaattgactcccatcagcattctatacatcgacgcgggcaataa

SEQ ID NO: 12872 - DNA, 973 bp, Homo sapiens
  source 1..973: mol_type = unassigned DNA
ctggggagacgcagccacttgcccgccatggatactcccagggtcctgctctcggccgtcttcctcatcagttttctgtgggatttgcccggtttccagcaggcttccatctcatcctcctcgtcgtccgccgagctgggttccaccaagggcatgcgaagccgcaaggaaggcaagatgcagcgggcgccgcgcgacagtgacgcgggccgggagggccaggaaccacagccgcggcctcaggacgaaccccgggctcagcagccccgggcgcaggagccgccaggcaggggtccgcgcgtggtgccccacgagtacatgctgtcaatctacaggacttactccatcgctgagaagctgggcatcaatgccagctttttccagtcttccaagtcggctaatacgatcaccagctttgtagacaggggactagacgatctctcgcacactcctctccggagacagaagtatttgtttgatgtgtccatgctctcagacaaagaagagctggtgggcgcggagctgcggctctttcgccaggcgccctcagcgccctgggggccaccagccgggccgctccacgtgcagctcttcccttgcctttcgcccctactgctggacgcgcggaccctggacccgcagggggcgccgccggccggctgggaagtcttcgacgtgtggcagggcctgcgccaccagccctggaagcagctgtgcttggagctgcgggccgcccccggacctgcggagtctgggcttcggccggagggtgcggcctccccaggagcgggccctgctggtggtattcaccagatcccagctgctgcgtgcccaccaaattgactcccatcagcattctatacatcgacgcgggcaataatgtggtctacaagcagtacgaggacatggtggtggagtcgtgcggctgcaggtagcggtgcctttcccgccgccttggcccggaaccaaggtg

SEQ ID NO: 12873 - DNA, 4162 bp, Homo sapiens
  source 1..4162: mol_type = unassigned DNA
ctttgaggccgccgggagcatcctgtggcctctctctgcgcggccacccggccgcggcgcgaagcggtctggagggcgagcccttccgcggccccaactctgccgccccgttcccggcattgggaaccagggcagggagggggcgggtgtttctctgcgggggagtggggaggaagctgggcgggtgcgcgcggtgccccgagcctggaaccacggagggcgcgttggtcttgggcggatggagggggtgtcgcactgccgcggggaggcgtgtcgggaggctggggccagtggcagtcgcttggcgagggtgggggcgtagcgctgcggtgggaggaggcggctccggccctggtctccactctaggccggggtggggggcgcatagcggccgccggagctttcagcagggggcgctgctccgggcgttgggcgggggtggggtgggccaggagggggggccgcgggctggccgcgcacacttcccccattattaaacactatgttcaaaaggcgccgggggacttcccggagccacggagcccgcgccgcccgcccgcccggcccacggagcccatggacctgagcgccgccgccgcgctgtgcctttggctgctgagcgcctgccgcccccgcgacgggctggaagcggccgccgtgctgcgagcggcgggggctgggccggtccggagcccagggggcggcggcggcggcggcggcggcgggcggactcttgcccaggctgcgggcgccgcggctgtcccggccgccgcggttccccgggcccgcgccgcgcgccgcgccgcgggctccggcttcaggaacggctcggtggtgccgcaccacttcatgatgtcgctttaccggagcctggccgggagggctccggccggggcagccgctgtctccgcctcgggccatggtcgcgcggacacgatcaccggcttcacagaccaggcgacccaagacgaatcggcagccgaaacaggccagagcttcctgttcgacgtgtccagccttaacgacgcagacgaggtggtgggtgccgagctgcgcgtgctgcgccggggatctccagagtcgggcccaggcagctggacttctccgccgttgctgctgctgtccacgtgcccgggcgccgcccgagcgccacgcctgctgtactcgcgggcagctgagcccctagtcggtcagcgctgggaggcgttcgacgtggcggacgccatgaggcgccaccgtcgtgaaccgcgccccccccgcgcgttctgcctcttgctgcgcgcagtggcaggcccggtgccgagcccgttggcactgcggcggctgggcttcggctggccgggcggagggggctctgcggcagaggagcgcgcggtgctagtcgtctcctcccgcacgcagaggaaagagagcttattccgggagatccgcgcccaggcccgcgcgctcggggccgctctggcctcagagccgctgcccgacccaggaaccggcaccgcgtcgccaagggcagtcattggcggccgcagacggaggaggacggcgttggccgggacgcggacagcgcagggcagcggcgggggcgcgggccggggccacgggcgcaggggccggagccgctgcagccgcaagccgttgcacgtggacttcaaggagctcggctgggacgactggatcatcgcgccgctggactacgaggcgtaccactgcgagggcctttgcgacttccctttgcgttcgcacctcgagcccaccaaccatgccatcattcagacgctgctcaactccatggcaccagacgcggcgccggcctcctgctgtgtgccagcgcgcctcagccccatcagcatcctctacatcgacgccgccaacaacgttgtctacaagcaatacgaggacatggtggtggaggcctgcggctgcaggtagcgcgagggccggggagggggcagccacgcggccgaggatccccagctgatgagcagcagcgggccaccctgtcaccgagcgtgggtgcatgtccgatgtgacccagcaccctctcagaggagggagagcacacgttcacactcacacacactcgtgcagtcacgcacacatttaccggggacagcatgtgaaagccttgggaagagatgacctgccggtaccgaatgtcaaagccctgtgtattttgcaaacagataaccatggcgcccactgcccccatttagggagaggaaggtgtttgtgctgatgttgcagttagaggcacgaaaatcaggtagcaacaacgggttaggaaattcgaagttccagaatgggagaaccaaaggggtactcgagcatgctttatctcacccccttttgtttctggcccgatgtggggcatcgcttccctggggggctgagcgccgcgtggtgcactccgtgacccactgcaaggctgtaatgcccttcccgagggtttgtgttgcatggggccgtttaccctggaactgctgcaaaaagcatctttctttttttaacttttaaaatttaacgtgcccctgcttcatttttgaaagggaagttttgtctgaaagtagctgttgtggagcttcccagatttctgcaaaggtcggtaccgccacccccccccccccccccgccttttttttttttttttttaatcaattccaataggaaatgttatggaaagtggaaaggatatttttcttttaaacggctgagtctgatctaacaggatattggggtgggataggatctgccaggttcggaagctccccagttggtcagggggaggtgggagccatgcctcgggtggctcaggaggaagttagtgcaatggcccggaatggggaaggtggggctgggggaggggagctactgcttttcctagagacctgccaggaggttttcctaagaagccagggaagaggctctcagggcttgaaaggcaaggaggtgtcctggggcccactccagccgaggactccggcttgccggccaggtaggcggaagctcccggggccgactcgggcttgtgctagttatcaagtaagtcggcctccgctttttacctgctttcgctgtgttgttgctgtagttgttggcagtgtgatagtaacgggaagtgaagccactcaaaaatgcttttgtcagacttcaactcacaacccagacctttagagcagggggaaggtctgccccttcccctcatcggctccctggcttggctgctgtgcccttggaagggcagggccttggtgtgggggagcagaggtggaatatcccccagttcccttatttggccccaaagggtcttattgatgggaggattttctaggcatgtaaaagtgagttcgaacattcagacttcactgtttgatttgatttgtttatgcctgggaatcctttgtggctttttgtcaataggctgggagagggaacctagttggactccagctgtccggggtgggggcttcttagaacagccccgcagccctctcggtgcatctgtgtgatgttgtgtaggactttccccttcagagtcctggggagcattatttccaccctgtgttggatgcaggacaattcatacacattttgattctcagtgattacactcttgagagagagaagacagacttacgatttagatacagctaatttacttaggggccctacctgaatcggttttcatcctgtaaaattctcccaaaagaaaaaaaaatacacgtgtaaattactcttaaaattaagattccccccttcctcctattatgtgaatttatattctgtggctgtatgagtagctataaataaccagaacatgaacagtctcttcaggttaaaaattttaaaaatatccaaaagtggctgctctggtacaattccatcttattttagtgactgggcaaagatggtccctaaatttgtggattttgccagagatgcctcactctcgtttttaaaatgaagcttgtcataatgaagaattatatattaaaaaaagcactgaagtgttgaaagttgtagtattagaaggtttagaaaggaagttaatgacaaagtgcagttaaatgttattttgaggaaggtctggggtatttaatatctttggataaaagcaaacattttgatacttttttagtgactagtaaaaacaattttttgggca

SEQ ID NO: 12874 - DNA, 2784 bp, Homo sapiens
  source 1..2784: mol_type = unassigned DNA
gagggtgcgcccaccggtcccgccgggcgcccgcgggacgcgccgccagggccctctccgccgggggctcggcgctcgcccacctcttccaaatttaaccattacctaaatccgaagggaaatgagcaaacctctcggattgggtgtcaaggtctcctccgggctggggctgagcaagccctcggagtgaccgtgggtgacagcggctccagggactcttggggcgcagtggggaaagtgccggaccaccatgccgcgctcatttctcgtcaaaagcaagaaggctcacagctaccaccagccgcgctccccaggaccagactattccctccgtttagagaatgtaccggcgcctagccgagcagacagcacttcaaatgcaggcggggcgaaggcggagccccgggaccgtttgtcccccgaatcgcagctgaccgaagccccagacagagcctccgcatccccagacagctgcgaaggcagcgtctgcgaacggagctcggagtttgaggacttctggaggcccccgtcaccctccgcgtctccagcctcggagaagtcaatgtgcccatcgctggacgaagcccagcccttccccctgcctttcaaaccgtactcatggagcggcctggcgggttctgacctgcggcacctggtgcagagctaccgaccgtgtggggccctggagcgtggcgctggcctgggcctcttctgcgaacccgccccggagcctggccacccggccgcgctgtacggcccgaagcgggctgccggcggcgcgggggccggggcgccagggagctgcagcgcaggggccggtgccaccgctggccctggcctagggctctacggcgacttcgggtctgcggcagccgggctgtatgagaggcccacggcagcggcgggcttgctgtaccccgagcgtggccacgggctgcacgcagacaagggcgctggcgtcaaggtggagtcggagctgctgtgcacccgcctgctgctgggcggcggctcctacaagtgcatcaagtgcagcaaggtgttctccacgccgcacgggctcgaggtgcacgtgcgcaggtcccacagcggtaccagaccctttgcctgcgagatgtgcggcaagaccttcgggcacgcggtgagcctggagcagcacaaagccgtgcactcgcaggaacggagctttgactgtaagatctgtgggaagagcttcaagaggtcatccacactgtccacacacctgcttatccactcagacactcggccctacccctgtcagtactgtggcaagaggttccaccagaagtcagacatgaagaaacacactttcatccacactggtgagaagcctcacaagtgccaggtgtgcggcaaggcattcagccagagctccaacctcatcacccacagccgcaaacacacaggcttcaagcccttcggctgcgacctctgtgggaagggtttccagaggaaggtggacctccgaaggcaccgggagacgcagcatgggctcaaatgagcaccctggctggctgcaagcagcagctacacaacactacagagggcagcctccctgcttgccaccactctgctccctgcttgcctccactcccttctgactttccagaccccaggtccagtctgcagatcctaccaggttgctcctccttcgccttacctcctggagctgccagaagaaatgaggtaccttttcaaagtgcagccgagagtgagaaccaagtgactctctaggcttcggacacaaataggctcctctacacctgaagacaaaggcaaagtcaaatggggaccagaataaatcttagaccccacagtccttcccatttccagccctaatctacagacaggaatgcccttcaggtttcttccctcccccctcttgacctaccccagatatttgtgtggaagaggaggaatcaccatttacaaggtggacaaatgctaatatttttatctagaaagaagagtgagtgttaacttttatttttttccttctggggggtctgttgactcctttcttttgggtgctgcctataaatcttggaggaatcatttctcctcctcaaaaactgattcagaaactgacttggggaaggaatttaatactttgaagtcatgagatgcaccatcgaggctacccccaagaagaagcagaagagaagttggtaatgagaggggattagaggtcctcccttcagtagggctgtgaaaacctcatcactggaggtaaaagcacaagcaatgcctgtggacaagatgtcattcattcactcagcaaatgttcatggatcaccggctaccaaggtaccaggcaccatgctaggtattggggaagagagactgaagtcacaacccctgactgctcctcaaaagctaacggttgcacctccaagtggctgggtctgttcttactcttggagggaattctgagaagacagcacagaattgtaaaccttcccttttgacccttttggattttatcaggtgtaaacaaaaagctgaacagttacttcaaagatatgtgtgtatattcagttttttattgttaagctgatattttaaagatttctgagctagcaggcatgtgggaaggaaggctctgtcttcaactctttgaccctccatgtgtaccatagaggggggaaaggtggtattttcactttgatgaggttggtaaatgtttttagatcttctggtaagcattatgtttgttaatacatatttattagagtgatgttttaagttaataaagtattaagagta

SEQ ID NO: 12875 - DNA, 2855 bp, Homo sapiens
  source 1..2855: mol_type = unassigned DNA
agctgagttggggtaacccacccgatgggaactacagctctccagggagtttgattgccggagcgagcttcgctaggaaaggggaggagctggggggcgtgggcagggaggaggaaaggggcctgagacagggccccgggacaggttttaccgctgagctgtgtcagtggcggcggcggcaacgacggcgggttcgcgccacctgtccaagtgccacctggtctcctccgggctggggctgagcaagccctcggagtgaccgtgggtgacagcggctccagggactcttggggcgcagtggggaaagtgccggaccaccatgccgcgctcatttctcgtcaaaagcaagaaggctcacagctaccaccagccgcgctccccaggaccagactattccctccgtttagagaatgtaccggcgcctagccgagcagacagcacttcaaatgcaggcggggcgaaggcggagccccgggaccgtttgtcccccgaatcgcagctgaccgaagccccagacagagcctccgcatccccagacagctgcgaaggcagcgtctgcgaacggagctcggagtttgaggacttctggaggcccccgtcaccctccgcgtctccagcctcggagaagtcaatgtgcccatcgctggacgaagcccagcccttccccctgcctttcaaaccgtactcatggagcggcctggcgggttctgacctgcggcacctggtgcagagctaccgaccgtgtggggccctggagcgtggcgctggcctgggcctcttctgcgaacccgccccggagcctggccacccggccgcgctgtacggcccgaagcgggctgccggcggcgcgggggccggggcgccagggagctgcagcgcaggggccggtgccaccgctggccctggcctagggctctacggcgacttcgggtctgcggcagccgggctgtatgagaggcccacggcagcggcgggcttgctgtaccccgagcgtggccacgggctgcacgcagacaagggcgctggcgtcaaggtggagtcggagctgctgtgcacccgcctgctgctgggcggcggctcctacaagtgcatcaagtgcagcaaggtgttctccacgccgcacgggctcgaggtgcacgtgcgcaggtcccacagcggtaccagaccctttgcctgcgagatgtgcggcaagaccttcgggcacgcggtgagcctggagcagcacaaagccgtgcactcgcaggaacggagctttgactgtaagatctgtgggaagagcttcaagaggtcatccacactgtccacacacctgcttatccactcagacactcggccctacccctgtcagtactgtggcaagaggttccaccagaagtcagacatgaagaaacacactttcatccacactggtgagaagcctcacaagtgccaggtgtgcggcaaggcattcagccagagctccaacctcatcacccacagccgcaaacacacaggcttcaagcccttcggctgcgacctctgtgggaagggtttccagaggaaggtggacctccgaaggcaccgggagacgcagcatgggctcaaatgagcaccctggctggctgcaagcagcagctacacaacactacagagggcagcctccctgcttgccaccactctgctccctgcttgcctccactcccttctgactttccagaccccaggtccagtctgcagatcctaccaggttgctcctccttcgccttacctcctggagctgccagaagaaatgaggtaccttttcaaagtgcagccgagagtgagaaccaagtgactctctaggcttcggacacaaataggctcctctacacctgaagacaaaggcaaagtcaaatggggaccagaataaatcttagaccccacagtccttcccatttccagccctaatctacagacaggaatgcccttcaggtttcttccctcccccctcttgacctaccccagatatttgtgtggaagaggaggaatcaccatttacaaggtggacaaatgctaatatttttatctagaaagaagagtgagtgttaacttttatttttttccttctggggggtctgttgactcctttcttttgggtgctgcctataaatcttggaggaatcatttctcctcctcaaaaactgattcagaaactgacttggggaaggaatttaatactttgaagtcatgagatgcaccatcgaggctacccccaagaagaagcagaagagaagttggtaatgagaggggattagaggtcctcccttcagtagggctgtgaaaacctcatcactggaggtaaaagcacaagcaatgcctgtggacaagatgtcattcattcactcagcaaatgttcatggatcaccggctaccaaggtaccaggcaccatgctaggtattggggaagagagactgaagtcacaacccctgactgctcctcaaaagctaacggttgcacctccaagtggctgggtctgttcttactcttggagggaattctgagaagacagcacagaattgtaaaccttcccttttgacccttttggattttatcaggtgtaaacaaaaagctgaacagttacttcaaagatatgtgtgtatattcagttttttattgttaagctgatattttaaagatttctgagctagcaggcatgtgggaaggaaggctctgtcttcaactctttgaccctccatgtgtaccatagaggggggaaaggtggtattttcactttgatgaggttggtaaatgtttttagatcttctggtaagcattatgtttgttaatacatatttattagagtgatgttttaagttaataaagtattaagagtatt

SEQ ID NO: 12876 - DNA, 2693 bp, Homo sapiens
  source 1..2693: mol_type = unassigned DNA
aaagcaagattccgtttgaaaactctcctagcgcggtgcccgcgccgtgactccgcaggtctcctccgggctggggctgagcaagccctcggagtgaccgtgggtgacagcggctccagggactcttggggcgcagtggggaaagtgccggaccaccatgccgcgctcatttctcgtcaaaagcaagaaggctcacagctaccaccagccgcgctccccaggaccagactattccctccgtttagagaatgtaccggcgcctagccgagcagacagcacttcaaatgcaggcggggcgaaggcggagccccgggaccgtttgtcccccgaatcgcagctgaccgaagccccagacagagcctccgcatccccagacagctgcgaaggcagcgtctgcgaacggagctcggagtttgaggacttctggaggcccccgtcaccctccgcgtctccagcctcggagaagtcaatgtgcccatcgctggacgaagcccagcccttccccctgcctttcaaaccgtactcatggagcggcctggcgggttctgacctgcggcacctggtgcagagctaccgaccgtgtggggccctggagcgtggcgctggcctgggcctcttctgcgaacccgccccggagcctggccacccggccgcgctgtacggcccgaagcgggctgccggcggcgcgggggccggggcgccagggagctgcagcgcaggggccggtgccaccgctggccctggcctagggctctacggcgacttcgggtctgcggcagccgggctgtatgagaggcccacggcagcggcgggcttgctgtaccccgagcgtggccacgggctgcacgcagacaagggcgctggcgtcaaggtggagtcggagctgctgtgcacccgcctgctgctgggcggcggctcctacaagtgcatcaagtgcagcaaggtgttctccacgccgcacgggctcgaggtgcacgtgcgcaggtcccacagcggtaccagaccctttgcctgcgagatgtgcggcaagaccttcgggcacgcggtgagcctggagcagcacaaagccgtgcactcgcaggaacggagctttgactgtaagatctgtgggaagagcttcaagaggtcatccacactgtccacacacctgcttatccactcagacactcggccctacccctgtcagtactgtggcaagaggttccaccagaagtcagacatgaagaaacacactttcatccacactggtgagaagcctcacaagtgccaggtgtgcggcaaggcattcagccagagctccaacctcatcacccacagccgcaaacacacaggcttcaagcccttcggctgcgacctctgtgggaagggtttccagaggaaggtggacctccgaaggcaccgggagacgcagcatgggctcaaatgagcaccctggctggctgcaagcagcagctacacaacactacagagggcagcctccctgcttgccaccactctgctccctgcttgcctccactcccttctgactttccagaccccaggtccagtctgcagatcctaccaggttgctcctccttcgccttacctcctggagctgccagaagaaatgaggtaccttttcaaagtgcagccgagagtgagaaccaagtgactctctaggcttcggacacaaataggctcctctacacctgaagacaaaggcaaagtcaaatggggaccagaataaatcttagaccccacagtccttcccatttccagccctaatctacagacaggaatgcccttcaggtttcttccctcccccctcttgacctaccccagatatttgtgtggaagaggaggaatcaccatttacaaggtggacaaatgctaatatttttatctagaaagaagagtgagtgttaacttttatttttttccttctggggggtctgttgactcctttcttttgggtgctgcctataaatcttggaggaatcatttctcctcctcaaaaactgattcagaaactgacttggggaaggaatttaatactttgaagtcatgagatgcaccatcgaggctacccccaagaagaagcagaagagaagttggtaatgagaggggattagaggtcctcccttcagtagggctgtgaaaacctcatcactggaggtaaaagcacaagcaatgcctgtggacaagatgtcattcattcactcagcaaatgttcatggatcaccggctaccaaggtaccaggcaccatgctaggtattggggaagagagactgaagtcacaacccctgactgctcctcaaaagctaacggttgcacctccaagtggctgggtctgttcttactcttggagggaattctgagaagacagcacagaattgtaaaccttcccttttgacccttttggattttatcaggtgtaaacaaaaagctgaacagttacttcaaagatatgtgtgtatattcagttttttattgttaagctgatattttaaagatttctgagctagcaggcatgtgggaaggaaggctctgtcttcaactctttgaccctccatgtgtaccatagaggggggaaaggtggtattttcactttgatgaggttggtaaatgtttttagatcttctggtaagcattatgtttgttaatacatatttattagagtgatgttttaagttaataaagtattaagagtatt

SEQ ID NO: 12877 - DNA, 2449 bp, Homo sapiens
  source 1..2449: mol_type = unassigned DNA
tgcgaggctgagtatgatgggctccatccagcacgaacacaaagccctgtgagaggaggcagagtgagatgaagtcgaactgtgggatatgaaaggcattttgaaggagtaggcatcaggctggtttttgttcgaggaaagctactcaggagcttgggaggattgcttgagaccaggagttcaagaccagcctgggctacagagcaagaccccatctttttgaaacttcctgcaactcgcatctggaaaagtgctgttatttgaaagggtgccgacattgtgaaaaacacggagtattgatctctgaagctgagatttttgtcctaaagaatactcaagatgtgtccctggctgggcacagcagctcgtgcctgtaatcccagcactttgggaggctgaggcaggaggatcgcttgaggccaggagttcaagaccagcctattgtgaatagtaccactataaatagagaaagcgtgccgctccaagtgtcgagggttagaaatgagaattcgaagtcttgtgtcctggaaagttttgataagcaaatacggctgagctcccgcgctctcttcattggctgcttgttcaccgccagattttgacacaaataatcagattgaaaatcagggaggggaacagaagaggaaaaacacacagagagacagagcaaaaaggagaagtatctatttgtgcaaagagtcacacagttgacagagtggaggccagtcccgagagaggctttgcagttcccacctcgggaagctccggcagaacccaggcgagggacagctccggacaggtgtggggtgcacactgaaaatgccacgctccttcctggtgaagagcaagaaggctcacacctaccaccagccccgtgtgcaggaagatgaaccgctctggcctcctgcccttaccccggtgcccagagaccaggctccaagcaacagccctgtccttagcactctattcccaaaccagtgcctggactggaccaacctcaaacgagagccggagctggagcaggaccagaacttggccaggatggccccggcaccagagggccccattgtgctgtcccgaccccaggatggggactctccactgtccgactcacccccattctacaagcctagcttctcctgggacaccttggccacaacctatggccacagctaccggcaggccccctccaccatgcagtcagccttcctggagcactccgtcagcctgtacggcagtcctcttgtgcccagcactgagcccgccttggacttcagcctccgctactccccaggcatggatgcgtaccactgtgtgaagtgcaacaaggtcttctccacccctcacgggctcgaagtgcatgtgcgacgctcccatagtgggacccggcccttcgcctgtgacatctgcggcaaaaccttcggccacgctgtgagcctggagcagcacacgcacgtccactcccaggagcgcagcttcgagtgccgcatgtgcggcaaggccttcaagcgctcgtccacgctgtccacccacctgctcatccactcagacacgcggccctacccctgccagttctgcggcaagcgtttccaccagaagtccgacatgaagaagcacacctacatccacacaggtgagaagccgcacaagtgccaggtgtgcggaaaggccttcagccagagctccaacctcatcacccacagccgcaagcacacaggcttcaagcccttcagctgtgagctgtgcaccaaaggcttccagcgcaaggtggacctgcggcggcaccgcgagagccagcacaatctcaagtgaggctgcgccggctcccagctcctggccagcctgccctgcggtcctgtcacctggaggccagcctcacatgcccaaatctccagtctcctggaggtgggactggacaggagtctaccagcttgttttgagactcatgaaattgctgtgtgaccttgggcaagtcacttaccctgtctggatcaacatttctcctgctgccaagtgtgggagcctggctgggtctttctcagcagaagttgtttccaggtgtgctcaagtgccttcctctagcagagcacagaaagctagaatacccccagggagacagggatgccaagagtagaccagagctgggacccacagacagaacctccacctgcctgctgcccactgagctgggacctggtcaccttggattttagccggcctctttctggctataacaggcagagtcggagctgcctcccaccccagtcagaagcctggcaccccctctgcttcggccagatgtgctggctgactccgacttccgaccagcactcagctggcctctggggattctagctccacaaccaggccgtgaggctggagaaactggcagttattgctgtcaaaagcctgttctctcaactgctgtcaataaaattaaagatacaga

SEQ ID NO: 12878 - DNA, 1653 bp, Homo sapiens
  source 1..1653: mol_type = unassigned DNA
caggtgtggggtgcacactgaaaatgccacgctccttcctggtgaagagcaagaaggctcacacctaccaccagccccgtgtgcaggaagatgaaccgctctggcctcctgcccttaccccggtgcccagagaccaggctccaagcaacagccctgtccttagcactctattcccaaaccagtgcctggactggaccaacctcaaacgagagccggagctggagcaggaccagaacttggccaggatggccccggcaccagagggccccattgtgctgtcccgaccccaggatggggactctccactgtccgactcacccccattctacaagcctagcttctcctgggacaccttggccacaacctatggccacagctaccggcaggccccctccaccatgcagtcagccttcctggagcactccgtcagcctgtacggcagtcctcttgtgcccagcactgagcccgccttggacttcagcctccgctactccccaggcatggatgcgtaccactgtgtgaagtgcaacaaggtcttctccacccctcacgggctcgaagtgcatgtgcgacgctcccatagtgggacccggcccttcgcctgtgacatctgcggcaaaaccttcggccacgctgtgagcctggagcagcacacgcacgtccactcccaggagcgcagcttcgagtgccgcatgtgcggcaaggccttcaagcgctcgtccacgctgtccacccacctgctcatccactcagacacgcggccctacccctgccagttctgcggcaagcgtttccaccagaagtccgacatgaagaagcacacctacatccacacaggtgagaagccgcacaagtgccaggtgtgcggaaaggccttcagccagagctccaacctcatcacccacagccgcaagcacacaggcttcaagcccttcagctgtgagctgtgcaccaaaggcttccagcgcaaggtggacctgcggcggcaccgcgagagccagcacaatctcaagtgaggctgcgccggctcccagctcctggccagcctgccctgcggtcctgtcacctggaggccagcctcacatgcccaaatctccagtctcctggaggtgggactggacaggagtctaccagcttgttttgagactcatgaaattgctgtgtgaccttgggcaagtcacttaccctgtctggatcaacatttctcctgctgccaagtgtgggagcctggctgggtctttctcagcagaagttgtttccaggtgtgctcaagtgccttcctctagcagagcacagaaagctagaatacccccagggagacagggatgccaagagtagaccagagctgggacccacagacagaacctccacctgcctgctgcccactgagctgggacctggtcaccttggattttagccggcctctttctggctataacaggcagagtcggagctgcctcccaccccagtcagaagcctggcaccccctctgcttcggccagatgtgctggctgactccgacttccgaccagcactcagctggcctctggggattctagctccacaaccaggccgtgaggctggagaaactggcagttattgctgtcaaaagcctgttctctcaactgctgtcaataaaattaaagatacaga

SEQ ID NO: 12879 - DNA, 1515 bp, Homo sapiens
  source 1..1515: mol_type = unassigned DNA
caggtgtggggtgcacactgaaaatgccacgctccttcctggtgaagagcaagaaggctcacacctaccaccagccccgtgtgcaggaagatgaaccgctctggcctcctgcccttaccccggtgcccagagaccaggctccaagcaacagccctgtccttagcactctattcccaaaccagtgcctggactggaccaacctcaaacgagagccggagctggagcaggaccagaacttggccaggatggccccggcaccagagggccccattgtgctgtcccgaccccaggatggggactctccactgtccgactcacccccattctacaagcctagcttctcctgggacaccttggccacaacctatggccacagctaccggcaggccccctccaccatgcagtcagccttcctggagcactccgtcagcctgtacggcagtcctcttgtgcccagcactgagcccgccttggacttcagcctccgctactccccaggcatggatgcgtaccactgtgtgaagtgcaacaaggagcgcagcttcgagtgccgcatgtgcggcaaggccttcaagcgctcgtccacgctgtccacccacctgctcatccactcagacacgcggccctacccctgccagttctgcggcaagcgtttccaccagaagtccgacatgaagaagcacacctacatccacacaggtgagaagccgcacaagtgccaggtgtgcggaaaggccttcagccagagctccaacctcatcacccacagccgcaagcacacaggcttcaagcccttcagctgtgagctgtgcaccaaaggcttccagcgcaaggtggacctgcggcggcaccgcgagagccagcacaatctcaagtgaggctgcgccggctcccagctcctggccagcctgccctgcggtcctgtcacctggaggccagcctcacatgcccaaatctccagtctcctggaggtgggactggacaggagtctaccagcttgttttgagactcatgaaattgctgtgtgaccttgggcaagtcacttaccctgtctggatcaacatttctcctgctgccaagtgtgggagcctggctgggtctttctcagcagaagttgtttccaggtgtgctcaagtgccttcctctagcagagcacagaaagctagaatacccccagggagacagggatgccaagagtagaccagagctgggacccacagacagaacctccacctgcctgctgcccactgagctgggacctggtcaccttggattttagccggcctctttctggctataacaggcagagtcggagctgcctcccaccccagtcagaagcctggcaccccctctgcttcggccagatgtgctggctgactccgacttccgaccagcactcagctggcctctggggattctagctccacaaccaggccgtgaggctggagaaactggcagttattgctgtcaaaagcctgttctctcaactgctgtcaataaaattaaagatacaga

SEQ ID NO: 12880 - DNA, 2314 bp, Homo sapiens
  source 1..2314: mol_type = unassigned DNA
ctttattgcgaggctgagtatgatgggctccatccagcacgaacacaaagccctgtgagaggaggcagagtgagatgaagtcgaactgtgggatatgaaaggcattttgaaggagtaggcatcaggctggtttttgttcgaggaaagctactcaggagcttgggaggattgcttgagaccaggagttcaagaccagcctgggctacagagcaagaccccatctttttgaaacttcctgcaactcgcatctggaaaagtgctgttatttgaaagggtgccgacattgtgaaaaacacggagtattgatctctgaagctgagatttttgtcctaaagaatactcaagatgtgtccctggctgggcacagcagctcgtgcctgtaatcccagcactttgggaggctgaggcaggaggatcgcttgaggccaggagttcaagaccagcctattgtgaatagtaccactataaatagagaaagcgtgccgctccaagtgtcgagggttagaaatgagaattcgaagtcttgtgtcctggaaagttttgataagcaaatacggctgagctcccgcgctctcttcattggctgcttgttcaccgccagattttgacacaaataatcagattgaaaatcagggaggggaacagaagaggaaaaacacacagagagacagagcaaaaaggagaagtatctatttgtgcaaagagtcacacagttgacagagtggaggccagtcccgagagaggctttgcagttcccacctcgggaagctccggcagaacccaggcgagggacagctccggacaggtgtggggtgcacactgaaaatgccacgctccttcctggtgaagagcaagaaggctcacacctaccaccagccccgtgtgcaggaagatgaaccgctctggcctcctgcccttaccccggtgcccagagaccaggctccaagcaacagccctgtccttagcactctattcccaaaccagtgcctggactggaccaacctcaaacgagagccggagctggagcaggaccagaacttggccaggatggccccggcaccagagggccccattgtgctgtcccgaccccaggatggggactctccactgtccgactcacccccattctacaagcctagcttctcctgggacaccttggccacaacctatggccacagctaccggcaggccccctccaccatgcagtcagccttcctggagcactccgtcagcctgtacggcagtcctcttgtgcccagcactgagcccgccttggacttcagcctccgctactccccaggcatggatgcgtaccactgtgtgaagtgcaacaaggagcgcagcttcgagtgccgcatgtgcggcaaggccttcaagcgctcgtccacgctgtccacccacctgctcatccactcagacacgcggccctacccctgccagttctgcggcaagcgtttccaccagaagtccgacatgaagaagcacacctacatccacacaggtgagaagccgcacaagtgccaggtgtgcggaaaggccttcagccagagctccaacctcatcacccacagccgcaagcacacaggcttcaagcccttcagctgtgagctgtgcaccaaaggcttccagcgcaaggtggacctgcggcggcaccgcgagagccagcacaatctcaagtgaggctgcgccggctcccagctcctggccagcctgccctgcggtcctgtcacctggaggccagcctcacatgcccaaatctccagtctcctggaggtgggactggacaggagtctaccagcttgttttgagactcatgaaattgctgtgtgaccttgggcaagtcacttaccctgtctggatcaacatttctcctgctgccaagtgtgggagcctggctgggtctttctcagcagaagttgtttccaggtgtgctcaagtgccttcctctagcagagcacagaaagctagaatacccccagggagacagggatgccaagagtagaccagagctgggacccacagacagaacctccacctgcctgctgcccactgagctgggacctggtcaccttggattttagccggcctctttctggctataacaggcagagtcggagctgcctcccaccccagtcagaagcctggcaccccctctgcttcggccagatgtgctggctgactccgacttccgaccagcactcagctggcctctggggattctagctccacaaccaggccgtgaggctggagaaactggcagttattgctgtcaaaagcctgttctctcaactgctgtcaataaaattaaagatac

SEQ ID NO: 12881 - DNA, 1790 bp, Homo sapiens
  source 1..1790: mol_type = unassigned DNA
aaaaaggagaagtatctatttgtgcaaagagtcacacagttgacagagtggaggccagtcccgagagaggctttgcagttcccacctcgggaagctccggcagaacccaggcgagggacagctccggacaggtgtggggtgcacactgaaaatgccacgctccttcctggtgaagagcaagaaggctcacacctaccaccagccccgtgtgcaggaagatgaaccgctctggcctcctgcccttaccccggtgcccagagaccaggctccaagcaacagccctgtccttagcactctattcccaaaccagtgcctggactggaccaacctcaaacgagagccggagctggagcaggaccagaacttggccaggatggccccggcaccagagggccccattgtgctgtcccgaccccaggatggggactctccactgtccgactcacccccattctacaagcctagcttctcctgggacaccttggccacaacctatggccacagctaccggcaggccccctccaccatgcagtcagccttcctggagcactccgtcagcctgtacggcagtcctcttgtgcccagcactgagcccgccttggacttcagcctccgctactccccaggcatggatgcgtaccactgtgtgaagtgcaacaaggtcttctccacccctcacgggctcgaagtgcatgtgcgacgctcccatagtgggacccggcccttcgcctgtgacatctgcggcaaaaccttcggccacgctgtgagcctggagcagcacacgcacgtccactcccaggagcgcagcttcgagtgccgcatgtgcggcaaggccttcaagcgctcgtccacgctgtccacccacctgctcatccactcagacacgcggccctacccctgccagttctgcggcaagcgtttccaccagaagtccgacatgaagaagcacacctacatccacacaggtgagaagccgcacaagtgccaggtgtgcggaaaggccttcagccagagctccaacctcatcacccacagccgcaagcacacaggcttcaagcccttcagctgtgagctgtgcaccaaaggcttccagcgcaaggtggacctgcggcggcaccgcgagagccagcacaatctcaagtgaggctgcgccggctcccagctcctggccagcctgccctgcggtcctgtcacctggaggccagcctcacatgcccaaatctccagtctcctggaggtgggactggacaggagtctaccagcttgttttgagactcatgaaattgctgtgtgaccttgggcaagtcacttaccctgtctggatcaacatttctcctgctgccaagtgtgggagcctggctgggtctttctcagcagaagttgtttccaggtgtgctcaagtgccttcctctagcagagcacagaaagctagaatacccccagggagacagggatgccaagagtagaccagagctgggacccacagacagaacctccacctgcctgctgcccactgagctgggacctggtcaccttggattttagccggcctctttctggctataacaggcagagtcggagctgcctcccaccccagtcagaagcctggcaccccctctgcttcggccagatgtgctggctgactccgacttccgaccagcactcagctggcctctggggattctagctccacaaccaggccgtgaggctggagaaactggcagttattgctgtcaaaagcctgttctctcaactgctgtcaataaaattaaagatacagatttgctgcc

SEQ ID NO: 12882 - DNA, 1652 bp, Homo sapiens
  source 1..1652: mol_type = unassigned DNA
aaaaaggagaagtatctatttgtgcaaagagtcacacagttgacagagtggaggccagtcccgagagaggctttgcagttcccacctcgggaagctccggcagaacccaggcgagggacagctccggacaggtgtggggtgcacactgaaaatgccacgctccttcctggtgaagagcaagaaggctcacacctaccaccagccccgtgtgcaggaagatgaaccgctctggcctcctgcccttaccccggtgcccagagaccaggctccaagcaacagccctgtccttagcactctattcccaaaccagtgcctggactggaccaacctcaaacgagagccggagctggagcaggaccagaacttggccaggatggccccggcaccagagggccccattgtgctgtcccgaccccaggatggggactctccactgtccgactcacccccattctacaagcctagcttctcctgggacaccttggccacaacctatggccacagctaccggcaggccccctccaccatgcagtcagccttcctggagcactccgtcagcctgtacggcagtcctcttgtgcccagcactgagcccgccttggacttcagcctccgctactccccaggcatggatgcgtaccactgtgtgaagtgcaacaaggagcgcagcttcgagtgccgcatgtgcggcaaggccttcaagcgctcgtccacgctgtccacccacctgctcatccactcagacacgcggccctacccctgccagttctgcggcaagcgtttccaccagaagtccgacatgaagaagcacacctacatccacacaggtgagaagccgcacaagtgccaggtgtgcggaaaggccttcagccagagctccaacctcatcacccacagccgcaagcacacaggcttcaagcccttcagctgtgagctgtgcaccaaaggcttccagcgcaaggtggacctgcggcggcaccgcgagagccagcacaatctcaagtgaggctgcgccggctcccagctcctggccagcctgccctgcggtcctgtcacctggaggccagcctcacatgcccaaatctccagtctcctggaggtgggactggacaggagtctaccagcttgttttgagactcatgaaattgctgtgtgaccttgggcaagtcacttaccctgtctggatcaacatttctcctgctgccaagtgtgggagcctggctgggtctttctcagcagaagttgtttccaggtgtgctcaagtgccttcctctagcagagcacagaaagctagaatacccccagggagacagggatgccaagagtagaccagagctgggacccacagacagaacctccacctgcctgctgcccactgagctgggacctggtcaccttggattttagccggcctctttctggctataacaggcagagtcggagctgcctcccaccccagtcagaagcctggcaccccctctgcttcggccagatgtgctggctgactccgacttccgaccagcactcagctggcctctggggattctagctccacaaccaggccgtgaggctggagaaactggcagttattgctgtcaaaagcctgttctctcaactgctgtcaataaaattaaagatacagatttgctgcc

SEQ ID NO: 12883 - DNA, 2382 bp, Homo sapiens
  source 1..2382: mol_type = unassigned DNA
atgagggtcagggctgcgcggacccctatcccgcctgcggtcctcccggcaagcccagcgggagcgcccgctcggctgggtccccgcctccagcggcgccggggccgcccagaccctgggctcagcctcgcgccccggtgcccacctgaggaggcagcggtcccggcctcgcgtcccggatgggacggcgcgggagcaatgccagtggccccgagcgccccgggccacgcgcggggccggccagccgctctcgcgccctccccgccccctccgcgccttgcctcgccgcccgcggcccccacccaccggccgctcctcccctctccccaccctcctcctccgccccctcccctcccccgccgcctcgcagatagctcggccgcgcgtctcagccgccggggccccgagcgcaggcggcgaggccaccacacctgcagagcgctcgggctgcctagccggcacctcgcctcccgccgcgcaaaccccttctccccacgcgccgagtctcccatgacgcccgagccccccggccggcgacaatgaccacttccctgcaagatgggcagagcgccgcgagcagggcggctgcccgggattcgccgctggccgcccaggtgtgtggcgctgcccaggggaggggcgacgcccacgacctggcgccggccccctggctgcacgcgcgagcgctcctgccccttccggacgggacccgcggctgtgctgcagacaggagaaaaaagaaagatcttgatgttccggaaatgccatctattccaaacccttttcctgagctatgctgttctccatttacatctgtgttgtcagcagacctatttcccaaagcaaattcaaggaaaaaacaggtgattaaagtatacagtgaagatgaaaccagcagggctttagatgtacccagtgacataacggctcgagatgtttgtcagctgttgatcctgaagaatcattacattgatgaccacagctggaccctttttgagcacctgcctcacataggtgtagaaagaacaatagaagaccacgaactggtgattgaagtgctatccaactgggggatagaagaagaaaacaaactatactttagaaaaaattatgccaaatatgagttctttaaaaacccaatgtatttttttccagagcatatggtatcttttgcaactgaaaccaatggtgaaatatcccccacacagattttgcagatgtttctgagttcaagcacatatcctgaaattcatggtttcttacatgcgaaagaacagggaaagaagtcttggaaaaaaatttacttttttctaagaagatctggtttatatttttctactaaaggaacatcaaaggaaccgcggcatttgcagtttttcagcgaatttggcaatagtgatatttatgtgtcactggcaggcaaaaaaaaacatggagcaccgactaactatggattctgctttaagcctaacaaagcgggagggccccgagacctgaaaatgctctgtgcagaagaagagcagagtaggacgtgctgggtgaccgcgattagattgcttaagtatggcatgcagctgtaccagaattatatgcatccatatcaaggtagaagtggctgcagttcacagagcatatcacctatgagaagtatatcagagaattccctggtagcaatggacttctcaggccagaaaagcagagttatagaaaatcccactgaagccctttcagttgcggttgaagaaggactcgcttggaggaaaaaaggatgtttacgcctgggcactcacggtagccccactgcctcttcacagagctctgccacaaacatggctatccaccggtcccagccatggtttcaccacaaaatttctagagatgaggctcagcgattgattattcagcaaggacttgtggatggagttttcttggtacgggatagtcagagtaaccccaaaactttcgtactgtcaatgagtcatggacaaaaaataaagcactttcaaattataccagtagaagatgacggtgaaatgttccacacactggatgatggccacacaagatttacagatctaatacagctggtggagttctatcaactcaataagggcgttcttccttgcaagttgaaacattattgtgctaggattgctctctagacaagccagaagtgacttattaaactattgaaggaaaaggactcaagaaaaataataaaagaccataaataagggcgaaaacattaccatgtgaaaagaatgtatttcacctgcaagttacaaaaaaatagtttgtgcattgcaaataagcaaagacttggattgactttacattcatcatttaaaattcattagttaaaattaaaccttaggaaaaaaa

SEQ ID NO: 12884 - DNA, 1693 bp, Homo sapiens
  source 1..1693: mol_type = unassigned DNA
attactttcctagttgtttcattgcactgagccctgagattcccaaggagtaaccataaaagatttcttttattttgtccatgacctacgagacaggatcattctaagaagagcaggcatgagtttgagtgcaagaagagtcactctgcctgcaataacgccaataattctacagaaaagggtgattaaagtatacagtgaagatgaaaccagcagggctttagatgtacccagtgacataacggctcgagatgtttgtcagctgttgatcctgaagaatcattacattgatgaccacagctggaccctttttgagcacctgcctcacataggtgtagaaagaacaatagaagaccacgaactggtgattgaagtgctatccaactgggggatagaagaagaaaacaaactatactttagaaaaaattatgccaaatatgagttctttaaaaacccaatgtatttttttccagagcatatggtatcttttgcaactgaaaccaatggtgaaatatcccccacacagattttgcagatgtttctgagttcaagcacatatcctgaaattcatggtttcttacatgcgaaagaacagggaaagaagtcttggaaaaaaatttacttttttctaagaagatctggtttatatttttctactaaaggaacatcaaaggaaccgcggcatttgcagtttttcagcgaatttggcaatagtgatatttatgtgtcactggcaggcaaaaaaaaacatggagcaccgactaactatggattctgctttaagcctaacaaagcgggagggccccgagacctgaaaatgctctgtgcagaagaagagcagagtaggacgtgctgggtgaccgcgattagattgcttaagtatggcatgcagctgtaccagaattatatgcatccatatcaaggtagaagtggctgcagttcacagagcatatcacctatgagaagtatatcagagaattccctggtagcaatggacttctcaggccagaaaagcagagttatagaaaatcccactgaagccctttcagttgcggttgaagaaggactcgcttggaggaaaaaaggatgtttacgcctgggcactcacggtagccccactgcctcttcacagagctctgccacaaacatggctatccaccggtcccagccatggtttcaccacaaaatttctagagatgaggctcagcgattgattattcagcaaggacttgtggatggagttttcttggtacgggatagtcagagtaaccccaaaactttcgtactgtcaatgagtcatggacaaaaaataaagcactttcaaattataccagtagaagatgacggtgaaatgttccacacactggatgatggccacacaagatttacagatctaatacagctggtggagttctatcaactcaataagggcgttcttccttgcaagttgaaacattattgtgctaggattgctctctagacaagccagaagtgacttattaaactattgaaggaaaaggactcaagaaaaataataaaagaccataaataagggcgaaaacattaccatgtgaaaagaatgtatttcacctgcaagttacaaaaaaatagtttgtgcattgcaaataagcaaagacttggattgactttacattcatcatttaaaattcattagttaaaattaaaccttagg

SEQ ID NO: 12885 - DNA, 2228 bp, Homo sapiens
  source 1..2228: mol_type = unassigned DNA
cctggaatctggacacacagggctcccccccgcctctgacttctctgtccgaagtcgggacaccctcctaccacctgtagagaagcgggagtggatctgaaataaaatccaggaatctgggggttcctagacggagccagacttcggaacgggtgtcctgctactcctgctggggctcctccaggacaagggcacacaactggttccgttaagcccctctcttgctcagacgccatggagctggatctgtctccacctcatcttagcagctctccggaagacctttgcccagcccctgggacccctcctgggactccccggccccctgatacccctctgcctgaggaggtaaagaggtcccagcctctcctcatcccaaccaccggcaggaaacttcgagaggaggagaggcgtgccacctccctcccctctatccccaaccccttccctgagctctgcagtcctccctcacagagcccaattctcgggggcccctccagtgcaagggggctgctcccccgcgatgccagccgcccccatgtagtaaaggtgtacagtgaggatggggcctgcaggtctgtggaggtggcagcaggtgccacagctcgccacgtgtgtgaaatgctggtgcagcgagctcacgccttgagcgacgagacctgggggctggtggagtgccacccccacctagcactggagcggggtttggaggaccacgagtccgtggtggaagtgcaggctgcctggcccgtgggcggagatagccgcttcgtcttccggaaaaacttcgccaagtacgaactgttcaagagctccccacactccctgttcccagaaaaaatggtctccagctgtctcgatgcacacactggtatatcccatgaagacctcatccagaacttcctgaatgctggcagctttcctgagatccagggctttctgcagctgcggggttcaggacggaagctttggaaacgctttttctgcttcttgcgccgatctggcctctattactccaccaagggcacctctaaggatccgaggcacctgcagtacgtggcagatgtgaacgagtccaacgtgtacgtggtgacgcagggccgcaagctctacgggatgcccactgacttcggtttctgtgtcaagcccaacaagcttcgaaatggccacaaggggcttcggatcttctgcagtgaagatgagcagagccgcacctgctggctggctgccttccgcctcttcaagtacggggtgcagctgtacaagaattaccagcaggcacagtctcgccatctgcatccatcttgtttgggctccccacccttgagaagtgcctcagataataccctggtggccatggacttctctggccatgctgggcgtgtcattgagaacccccgggaggctctgagtgtggccctggaggaggcccaggcctggaggaagaagacaaaccaccgcctcagcctgcccatgccagcctccggcacgagcctcagtgcagccatccaccgcacccaactctggttccacgggcgcatttcccgtgaggagagccagcggcttattggacagcagggcttggtagacggcctgttcctggtccgggagagtcagcggaacccccagggctttgtcctctctttgtgccacctgcagaaagtgaagcattatctcatcctgccgagcgaggaggagggccgcctgtacttcagcatggatgatggccagacccgcttcactgacctgctgcagctcgtggagttccaccagctgaaccgcggcatcctgccgtgcttgctgcgccattgctgcacgcgggtggccctctgaccaggccgtggactggctcatgcctcagcccgccttcaggctgcccgccgcccctccacccatccagtggactctggggcgcggccacaggggacgggatgaggagcgggagggttccgccactccagttttctcctctgcttctttgcctccctcagatagaaaacagcccccactccagtccactcctgacccctctcctcaagggaaggccttgggtggccccctctccttctcctagctctggaggtgctgctctagggcagggaattatgggagaagtgggggcagcccaggcggtttcacgccccacactttgtacagaccgagaggccagttgatctgctctgttttatactagtgacaataaagattattttttgatacacctatga

SEQ ID NO: 12886 - DNA, 2146 bp, Homo sapiens
  source 1..2146: mol_type = unassigned DNA
ttttagtttccttgggcctggaatctggacacacagggctcccccccgcctctgacttctctgtccgaagtcgggacaccctcctaccacctgtagagaagcgggagtggatctgaaataaaatccaggaatctgggggttcctagacggagccagacttcggaacgggtgtcctgctactcctgctggggctcctccaggacaagggcacacaactggttccgttaagcccctctcttgctcagacgccatggagctggatctgtctccacctcatcttagcagctctccggaagacctttgcccagcccctgggacccctcctgggactccccggccccctgatacccctctgcctgaggaggtaaagaggtcccagcctctcctcatcccaaccaccggcaggaaacttcgagaggaggagaggcgtgccacctccctcccctctatccccaaccccttccctgagctctgcagtcctccctcacagagcccaattctcgggggcccctccagtgcaagggggctgctcccccgcgatgccagccgcccccatgtagtaaaggtgtacagtgaggatggggcctgcaggtctgtggaggtggcagcaggtgccacagctcgccacgtgtgtgaaatgctggtgcagcgagctcacgccttgagcgacgagacctgggggctggtggagtgccacccccacctagcactggagcggggtttggaggaccacgagtccgtggtggaagtgcaggctgcctggcccgtgggcggagatagccgcttcgtcttccggaaaaacttcgccaagtacgaactgttcaagagctccccacactccctgttcccagaaaaaatggtctccagctgtctcgatgcacacactggtatatcccatgaagacctcatccagaacttcctgaatgctggcagctttcctgagatccagggctttctgcagctgcggggttcaggacggaagctttggaaacgctttttctgcttcttgcgccgatctggcctctattactccaccaagggcacctctaaggatccgaggcacctgcagtacgtggcagatgtgaacgagtccaacgtgtacgtggtgacgcagggccgcaagctctacgggatgcccactgacttcggtttctgtgtcaagcccaacaagcttcgaaatggccacaaggggcttcggatcttctgcagtgaagatgagcagagccgcacctgctggctggctgccttccgcctcttcaagtacggggtgcagctgtacaagaattaccagcaggcacagtctcgccatctgcatccatcttgtttgggctccccacccttgagaagtgcctcagataataccctggtggccatggacttctctggccatgctgggcgtgtcattgagaacccccgggaggctctgagtgtggccctggaggaggcccaggcctggaggaagaagacaaaccaccgcctcagcctgcccatgccagcctccggcacgagcctcagtgcagcctgttcctggtccgggagagtcagcggaacccccagggctttgtcctctctttgtgccacctgcagaaagtgaagcattatctcatcctgccgagcgaggaggagggccgcctgtacttcagcatggatgatggccagacccgcttcactgacctgctgcagctcgtggagttccaccagctgaaccgcggcatcctgccgtgcttgctgcgccattgctgcacgcgggtggccctctgaccaggccgtggactggctcatgcctcagcccgccttcaggctgcccgccgcccctccacccatccagtggactctggggcgcggccacaggggacgggatgaggagcgggagggttccgccactccagttttctcctctgcttctttgcctccctcagatagaaaacagcccccactccagtccactcctgacccctctcctcaagggaaggccttgggtggccccctctccttctcctagctctggaggtgctgctctagggcagggaattatgggagaagtgggggcagcccaggcggtttcacgccccacactttgtacagaccgagaggccagttgatctgctctgttttatactagtgacaataaagattattttttgat

SEQ ID NO: 12887 - DNA, 1667 bp, Homo sapiens
  source 1..1667: mol_type = unassigned DNA
gacaagggcacacaactggttccgttaagcccctctcttgctcagacgccatggagctggatctgtctccacctcatcttagcagctctccggaagacctttgcccagcccctgggacccctcctgggactccccggccccctgatacccctctgcctgaggaggtaaagaggtcccagcctctcctcatcccaaccaccggcaggaaacttcgagaggaggagaggcgtgccacctccctcccctctatccccaaccccttccctgagctctgcagtcctccctcacagagcccaattctcgggggcccctccagtgcaagggggctgctcccccgcgatgccagccgcccccatgtagtaaaggtgtacagtgaggatggggcctgcaggtctgtggaggtggcagcaggtgccacagctcgccacgtgtgtgaaatgctggtgcagcgagctcacgccttgagcgacgagacctgggggctggtggagtgccacccccacctagcactggagcggggtttggaggaccacgagtccgtggtggaagtgcaggctgcctggcccgtgggcggagatagccgcttcgtcttccggaaaaacttcgccaagtacgaactgttcaagagctccccacactccctgttcccagaaaaaatggtctccagctgtctcgatgcacacactggtatatcccatgaagacctcatccagaacttcctgaatgctggcagctttcctgagatccagggctttctgcagctgcggggttcaggacggaagctttggaaacgctttttctgcttcttgcgccgatctggcctctattactccaccaagggcacctctaaggatccgaggcacctgcagtacgtggcagatgtgaacgagtccaacgtgtacgtggtgacgcagggccgcaagctctacgggatgcccactgacttcggtttctgtgtcaagcccaacaagcttcgaaatggccacaaggggcttcggatcttctgcagtgaagatgagcagagccgcacctgctggctggctgccttccgcctcttcaagtacggggtgcagctgtacaagaattaccagcaggcacagtctcgccatctgcatccatcttgtttgggctccccacccttgagaagtgcctcagataataccctggtggccatggacttctctggccatgctgggcgtgtcattgagaacccccgggaggctctgagtgtggccctggaggaggcccaggcctggaggaagaagacaaaccaccgcctcagcctgcccatgccagcctccggcacgagcctcagtgcagcctgttcctggtccgggagagtcagcggaacccccagggctttgtcctctctttgtgccacctgcagaaagtgaagcattatctcatcctgccgagcgaggaggagggccgcctgtacttcagcatggatgatggccagacccgcttcactgacctgctgcagctcgtggagttccaccagctgaaccgcggcatcctgccgtgcttgctgcgccattgctgcacgcgggtggccctctgaccaggccgtggactggctcatgcctcagcccgccttcaggctgcccgccgcccctccacccatccagtggactctggggcgcggccacaggggacgggatgaggag

SEQ ID NO: 12888 - DNA, 2197 bp, Homo sapiens
  source 1..2197: mol_type = unassigned DNA
tgcgggctgcggggagatgtggggagggccccctccactttggagggcagtgaaggagagggatcctctaaattgtcgaggcttcatctctccagattgtatgcccttctcagcaacaccgcctccggccctccgatgggaaagtggaggccgggacaagggcacacaactggttccgttaagcccctctcttgctcagacgccatggagctggatctgtctccacctcatcttagcagctctccggaagacctttgcccagcccctgggacccctcctgggactccccggccccctgatacccctctgcctgaggaggtaaagaggtcccagcctctcctcatcccaaccaccggcaggaaacttcgagaggaggagaggcgtgccacctccctcccctctatccccaaccccttccctgagctctgcagtcctccctcacagagcccaattctcgggggcccctccagtgcaagggggctgctcccccgcgatgccagccgcccccatgtagtaaaggtgtacagtgaggatggggcctgcaggtctgtggaggtggcagcaggtgccacagctcgccacgtgtgtgaaatgctggtgcagcgagctcacgccttgagcgacgagacctgggggctggtggagtgccacccccacctagcactggagcggggtttggaggaccacgagtccgtggtggaagtgcaggctgcctggcccgtgggcggagatagccgcttcgtcttccggaaaaacttcgccaagtacgaactgttcaagagctccccacactccctgttcccagaaaaaatggtctccagctgtctcgatgcacacactggtatatcccatgaagacctcatccagaacttcctgaatgctggcagctttcctgagatccagggctttctgcagctgcggggttcaggacggaagctttggaaacgctttttctgcttcttgcgccgatctggcctctattactccaccaagggcacctctaaggatccgaggcacctgcagtacgtggcagatgtgaacgagtccaacgtgtacgtggtgacgcagggccgcaagctctacgggatgcccactgacttcggtttctgtgtcaagcccaacaagcttcgaaatggccacaaggggcttcggatcttctgcagtgaagatgagcagagccgcacctgctggctggctgccttccgcctcttcaagtacggggtgcagctgtacaagaattaccagcaggcacagtctcgccatctgcatccatcttgtttgggctccccacccttgagaagtgcctcagataataccctggtggccatggacttctctggccatgctgggcgtgtcattgagaacccccgggaggctctgagtgtggccctggaggaggcccaggcctggaggaagaagacaaaccaccgcctcagcctgcccatgccagcctccggcacgagcctcagtgcagccatccaccgcacccaactctggttccacgggcgcatttcccgtgaggagagccagcggcttattggacagcagggcttggtagacggcctgttcctggtccgggagagtcagcggaacccccagggctttgtcctctctttgtgccacctgcagaaagtgaagcattatctcatcctgccgagcgaggaggagggccgcctgtacttcagcatggatgatggccagacccgcttcactgacctgctgcagctcgtggagttccaccagctgaaccgcggcatcctgccgtgcttgctgcgccattgctgcacgcgggtggccctctgaccaggccgtggactggctcatgcctcagcccgccttcaggctgcccgccgcccctccacccatccagtggactctggggcgcggccacaggggacgggatgaggagcgggagggttccgccactccagttttctcctctgcttctttgcctccctcagatagaaaacagcccccactccagtccactcctgacccctctcctcaagggaaggccttgggtggccccctctccttctcctagctctggaggtgctgctctagggcagggaattatgggagaagtgggggcagcccaggcggtttcacgccccacactttgtacagaccgagaggccagttgatctgctctgttttatactagtgacaataaagattattttttgatacacctatg

SEQ ID NO: 12889 - DNA, 2107 bp, Homo sapiens
  source 1..2107: mol_type = unassigned DNA
agttaagggcctggcgtctccctccctgaagacgtggtcccagccgggtgtcctgacgctcggggttcaggacaagggcacacaactggttccgttaagcccctctcttgctcagacgccatggagctggatctgtctccacctcatcttagcagctctccggaagacctttgcccagcccctgggacccctcctgggactccccggccccctgatacccctctgcctgaggaggtaaagaggtcccagcctctcctcatcccaaccaccggcaggaaacttcgagaggaggagaggcgtgccacctccctcccctctatccccaaccccttccctgagctctgcagtcctccctcacagagcccaattctcgggggcccctccagtgcaagggggctgctcccccgcgatgccagccgcccccatgtagtaaaggtgtacagtgaggatggggcctgcaggtctgtggaggtggcagcaggtgccacagctcgccacgtgtgtgaaatgctggtgcagcgagctcacgccttgagcgacgagacctgggggctggtggagtgccacccccacctagcactggagcggggtttggaggaccacgagtccgtggtggaagtgcaggctgcctggcccgtgggcggagatagccgcttcgtcttccggaaaaacttcgccaagtacgaactgttcaagagctccccacactccctgttcccagaaaaaatggtctccagctgtctcgatgcacacactggtatatcccatgaagacctcatccagaacttcctgaatgctggcagctttcctgagatccagggctttctgcagctgcggggttcaggacggaagctttggaaacgctttttctgcttcttgcgccgatctggcctctattactccaccaagggcacctctaaggatccgaggcacctgcagtacgtggcagatgtgaacgagtccaacgtgtacgtggtgacgcagggccgcaagctctacgggatgcccactgacttcggtttctgtgtcaagcccaacaagcttcgaaatggccacaaggggcttcggatcttctgcagtgaagatgagcagagccgcacctgctggctggctgccttccgcctcttcaagtacggggtgcagctgtacaagaattaccagcaggcacagtctcgccatctgcatccatcttgtttgggctccccacccttgagaagtgcctcagataataccctggtggccatggacttctctggccatgctgggcgtgtcattgagaacccccgggaggctctgagtgtggccctggaggaggcccaggcctggaggaagaagacaaaccaccgcctcagcctgcccatgccagcctccggcacgagcctcagtgcagccatccaccgcacccaactctggttccacgggcgcatttcccgtgaggagagccagcggcttattggacagcagggcttggtagacggcctgttcctggtccgggagagtcagcggaacccccagggctttgtcctctctttgtgccacctgcagaaagtgaagcattatctcatcctgccgagcgaggaggagggccgcctgtacttcagcatggatgatggccagacccgcttcactgacctgctgcagctcgtggagttccaccagctgaaccgcggcatcctgccgtgcttgctgcgccattgctgcacgcgggtggccctctgaccaggccgtggactggctcatgcctcagcccgccttcaggctgcccgccgcccctccacccatccagtggactctggggcgcggccacaggggacgggatgaggagcgggagggttccgccactccagttttctcctctgcttctttgcctccctcagatagaaaacagcccccactccagtccactcctgacccctctcctcaagggaaggccttgggtggccccctctccttctcctagctctggaggtgctgctctagggcagggaattatgggagaagtgggggcagcccaggcggtttcacgccccacactttgtacagaccgagaggccagttgatctgctctgttttatactagtgacaataaagattattttttgataca

SEQ ID NO: 12890 - DNA, 2197 bp, Homo sapiens; identical to SEQ ID NO: 12888
  source 1..2197: mol_type = unassigned DNA

SEQ ID NO: 12891 - DNA, 2405 bp, Homo sapiens
  source 1..2405: mol_type = unassigned DNA
gctggcctggaggctgacctggaggctcatctggaggccgagctgacccggcaggccttgcgcgggcaacatggcggcgcccggcgagcggggccgcttccacggcgggaacctcttcttcctgccggggggcgcgcgctccgagatgatggacgacctggcgaccgacgcgcggggccggggcgcggggcggagagacgcggccgcctcggcctcgacgccagcccaggcgccgacctccgattctcctgtcgccgaggacgcctcccggaggcggccgtgccgggcctgcgtcgacttcaagacgtggatgcggacgcagcagaagcgggacaccaagtttagggaggactgcccgccggatcgcgaggaactgggccgccacagctgggctgtcctccacaccctggccgcctactaccccgacctgcccaccccagaacagcagcaagacatggcccagttcatacatttattttctaagttttacccctgtgaggagtgtgctgaagacctaagaaaaaggctgtgcaggaaccacccagacacccgcacccgggcatgcttcacacagtggctgtgccacctgcacaatgaagtgaaccgcaagctgggcaagcctgacttcgactgctcaaaagtggatgagcgctggcgcgacggctggaaggatggctcctgtgactagagggtggtcagccagagctcatgggacagctagccaggcatggttggataggggcagggcactcattaaagtgcatcacagccagagcctgttgtgtctcagttgggtggtccccaggacactgcctgtggggacctgccctgcccctcttaggtttggagcagaagtggaggtgcccacagcaggtacccactggccccctcctcagtggagaccccaaggagctgcagctgaactgcaggggagggaaggaggagcagcctgggctgccccttgacattcaggatgtagcttcctgcccaccgcataccctggcgcctcactcctcacacgggaagacagcgggcctggctgggcatccctgtgcctgtccctggcggccaggccattgccttcccactatgcagccagggatgcccctgccccccatggctctgtgctgctcactttagggggctcaattctccactctgctcagtccctacagggaaagctcaggtcgggtctttctgagggtccaccagccatcctaccctctccctgcctggcacatgcctgccagcgttgtgtcatgcctgtccacaggggattcgtggggctcacttcatcagagtttgaagcccaaatgaaacgctgaagtgactgagaacctggcttcagtatattttctgctggggcttaataaagcagtagacagggcttgttccatccctctgtgctcagctgcatttcctgctggggtcctggttcctcaggagagagagaccacagggtgagagtgagccaggaacagcaaggacgttgattggttggggcaggggggccagagtagctgatgtaggagtactgggaggccagacggcacgaggtctccaaggccccagcaaagccatggcttctacccctagttcccctgacaggaagttcttggcgggtttggagccaggggatggcatggagtgatgtggctttgaagggtcctctggctgctgagctgggatgaggcaggtaagggtggaacaggaggggtggggaggaagccggggcagtcaccgagtgaccaccaagaggaagacccaccccacggcggggacagatgcggggtacgttaaagggagagccagagaactcatggggtgaggatggagtccgaggagactgctgggagccgccgtgtgggtcagagatggagaaggctgagtgcagcaaggtggggggtgactgggacccagcctttgggcctccccagccagagcagcccagcaacagtgtgtcctgtggtcataaaactccagggacctctatcctccaggagtctcagcctttccctgggcgcaggcccaccttggcatggccgcctcaggcctccatggagggagctgctatgtccccaccagattggccccgtgcggctgctggcttctgtagaggctgcccagaggggccaggtggcacaaataagagaggggagatggggggcagccaggagaggaggtgtcccttcctcgcccagacacagcgcgcttctctctggcctttcccgaggcctgtgagtgcctcaggaagcagctgggccctctgggaaggctgtgttcagcttaggaacataccgcctgtatctgctgtccctcccctgcccccctgccccccccaccgccttccctttttccctgtcttccttaaagtttcactcctgaataaaacttcactttgcctt

SEQ ID NO: 12892 - DNA, 376 bp, Homo sapiens
  source 1..376: mol_type = unassigned DNA
atgcggacgcagcagaagcgggacaccaagtttagggaggactgcccgccggatcgcgaggaactgggccgccacagctgggctgtcctccacaccctggccgcctactaccccgacctgcccaccccagaacagcagcaagacatggcccagttcatacatttattttctaagttttacccctgtgaggagtgtgctgaagacctaagaaaaaggctgtgcaggaaccacccagacacccgcacccgggcatgcttcacagtggctgtgccacctgcacaatgaagtgaaccgcaagctgggcaagcctgacttcgactgctcaaaagtggatgagcgctggcgcgacggctggaaggatggctcctgtgactag

SEQ ID NO: 12893 - DNA, 4560 bp, Homo sapiens
  source 1..4560: mol_type = unassigned DNA
gcggcggcggcggcagcggcagcagcagctgctacagtggcggtggcggcggcggctgctgctgagcccgggcggcggcggggaccccgggctggggccacgcgggccggaggccccggcaccattggccccagcgcagacgcgaacccgcgctctctgatcagaggcgaagctcggaggtcctacaggtatggatctctggcagctgctgttgaccttggcactggcaggatcaagtgatgctttttctggaagtgaggccacagcagctatccttagcagagcaccctggagtctgcaaagtgttaatccaggcctaaagacaaattcttctaaggagcctaaattcaccaagtgccgttcacctgagcgagagactttttcatgccactggacagatgaggttcatcatggtacaaagaacctaggacccatacagctgttctataccagaaggaacactcaagaatggactcaagaatggaaagaatgccctgattatgtttctgctggggaaaacagctgttactttaattcatcgtttacctccatctggataccttattgtatcaagctaactagcaatggtggtacagtggatgaaaagtgtttctctgttgatgaaatagtgcaaccagatccacccattgccctcaactggactttactgaacgtcagtttaactgggattcatgcagatatccaagtgagatgggaagcaccacgcaatgcagatattcagaaaggatggatggttctggagtatgaacttcaatacaaagaagtaaatgaaactaaatggaaaatgatggaccctatattgacaacatcagttccagtgtactcattgaaagtggataaggaatatgaagtgcgtgtgagatccaaacaacgaaactctggaaattatggcgagttcagtgaggtgctctatgtaacacttcctcagatgagccaatttacatgtgaagaagatttctactttccatggctcttaattattatctttggaatatttgggctaacagtgatgctatttgtattcttattttctaaacagcaaaggattaaaatgctgattctgcccccagttccagttccaaagattaaaggaatcgatccagatctcctcaaggaaggaaaattagaggaggtgaacacaatcttagccattcatgatagctataaacccgaattccacagtgatgactcttgggttgaatttattgagctagatattgatgagccagatgaaaagactgaggaatcagacacagacagacttctaagcagtgaccatgagaaatcacatagtaacctaggggtgaaggatggcgactctggacgtaccagctgttgtgaacctgacattctggagactgatttcaatgccaatgacatacatgagggtacctcagaggttgctcagccacagaggttaaaaggggaagcagatctcttatgccttgaccagaagaatcaaaataactcaccttatcatgatgcttgccctgctactcagcagcccagtgttatccaagcagagaaaaacaaaccacaaccacttcctactgaaggagctgagtcaactcaccaagctgcccatattcagctaagcaatccaagttcactgtcaaacatcgacttttatgcccaggtgagcgacattacaccagcaggtagtgtggtcctttccccgggccaaaagaataaggcagggatgtcccaatgtgacatgcacccggaaatggtctcactctgccaagaaaacttccttatggacaatgcctacttctgtgaggcagatgccaaaaagtgcatccctgtggctcctcacatcaaggttgaatcacacatacagccaagcttaaaccaagaggacatttacatcaccacagaaagccttaccactgctgctgggaggcctgggacaggagaacatgttccaggttctgagatgcctgtcccagactatacctccattcatatagtacagtccccacagggcctcatactcaatgcgactgccttgcccttgcctgacaaagagtttctctcatcatgtggctatgtgagcacagaccaactgaacaaaatcatgccttagcctttctttggtttcccaagagctacgtatttaatagcaaagaattgactggggcaataacgtttaagccaaaacaatgtttaaaccttttttgggggagtgacaggatggggtatggattctaaaatgccttttcccaaaatgttgaaatatgatgttaaaaaaataagaagaatgcttaatcagatagatattcctattgtgcaatgtaaatattttaaagaattgtgtcagactgtttagtagcagtgattgtcttaatattgtgggtgttaatttttgatactaagcattgaatggctatgtttttaatgtatagtaaatcacgctttttgaaaaagcgaaaaaatcaggtggcttttgcggttcaggaaaattgaatgcaaaccatagcacaggctaattttttgttgtttcttaaataagaaacttttttatttaaaaaactaaaaactagaggtgagaaatttaaactataagcaagaaggcaaaaatagtttggatatgtaaaacatttattttgacataaagttgataaagattttttaataatttagacttcaagcatggctattttatattacactacacactgtgtactgcagttggtatgacccctctaaggagtgtagcaactacagtctaaagctggtttaatgttttggccaatgcacctaaagaaaaacaaactcgttttttacaaagcccttttatacctccccagactccttcaacaattctaaaatgattgtagtaatctgcattattggaatataattgttttatctgaatttttaaacaagtatttgttaatttagaaaactttaaagcgtttgcacagatcaacttaccaggcaccaaaagaagtaaaagcaaaaaagaaaacctttcttcaccaaatcttggttgatgccaaaaaaaaatacatgctaagagaagtagaaatcatagctggttcacactgaccaagatacttaagtgctgcaattgcacgcggagtgagttttttagtgcgtgcagatggtgagagataagatctatagcctctgcagcggaatctgttcacacccaacttggttttgctacataattatccaggaagggaataaggtacaagaagcattttgtaagttgaagcaaatcgaatgaaattaactgggtaatgaaacaaagagttcaagaaataagtttttgtttcacagcctataaccagacacatactcatttttcatgataatgaacagaacatagacagaagaaacaaggttttcagtccccacagataactgaaaattatttaaaccgctaaaagaaactttctttctcactaaatcttttataggatttatttaaaatagcaaaagaagaagtttcatcattttttacttcctctctgagtggactggcctcaaagcaagcattcagaagaaaaagaagcaacctcagtaatttagaaatcattttgcaatcccttaatatcctaaacatcattcatttttgttgttgttgttgttgttgagacagagtctcgctctgtcgccaggctagagtgcggtggcgcgatcttgactcactgcaatctccacctcccacaggttcaggcgattcccgtgcctcagcctcctgagtagctgggactacaggcacgcaccaccatgccaggctaatttttttgtattttagcagagacggggtttcaccatgttggccaggatggtctcgatctcctgacctcgtgatccacccgactcggcctcccaaagtgctgggattacaggtgtaagccaccgtgcccagccctaaacatcattcttgagagcattgggatatctcctgaaaaggtttatgaaaaagaagaatctcatctcagtgaagaatacttctcattttttaaaaaagcttaaaactttgaagttagctttaacttaaatagtatttcccatttatcgcagaccttttttaggaagcaagcttaatggctgataattttaaattctctctcttgcaggaaggactatgaaaagctagaattgagtgtttaaagttcaacatgttatttgtaatagatgtttgatagattttctgctactttgctgctatggttttctccaagagctacataatttagtttcatataaagtatcatcagtgtagaacctaattcaattcaaagctgtgtgtttggaagactatcttactatttcacaacagcctgacaacatttctatagccaaaaatagctaaatacctcaatcagtctcagaatgtcattttggtactttggtggccacataagccattattcactagtatgactagttgtgtctggcagtttatatttaactctctttatgtctgtggattttttccttcaaagtttaataaatttattttcttggattcctgatagtgtgcttctgttatcaaacaccaacataaaaatgatctaaacc

SEQ ID NO: 12894 - DNA, 925 bp, Homo sapiens
  source 1..925: mol_type = unassigned DNA
ccgcgctctctgatcagaggcgaagctcggaggtcctacaggtatggatctctggcagctgctgttgaccttggcactggcaggatcaagtgatgctttttctggaagtgaggccacagcagctatccttagcagagcaccctggagtctgcaaagtgttaatccaggcctaaagacaaattcttctaaggagcctaaattcaccaagtgccgttcacctgagcgagagactttttcatgccactggacagatgaggttcatcatggtacaaagaacctaggacccatacagctgttctataccagaaggaacactcaagaatggactcaagaatggaaagaatgccctgattatgtttctgctggggaaaacagctgttactttaattcatcgtttacctccatctggataccttattgtatcaagctaactagcaatggtggtacagtggatgaaaagtgtttctctgttgatgaaatagtgcaaccagatccacccattgccctcaactggactttactgaacgtcagtttaactgggattcatgcagatatccaagtgagatgggaagcaccacgcaatgcagatattcagaaaggatggatggttctggagtatgaacttcaatacaaagaagtaaatgaaactaaatggaaaatgatggaccctatattgacaacatcagttccagtgtactcattgaaagtggataaggaatatgaagtgcgtgtgagatccaaacaacgaaactctggaaattatggcgagttcagtgaggtgctctatgtaacacttcctcagatgagccaatttacatgtgaagaagatttctactttccatggctcttaattattatctttggaatatttgggctaacagtgatgctatttgtattcttattttctaaacagcaaagtcaaaat

SEQ ID NO: 12895 - DNA, 4293 bp, Homo sapiens
  source 1..4293: mol_type = unassigned DNA
ccgcgctctctgatcagaggcgaagctcggaggtcctacaggtatggatctctggcagctgctgttgaccttggcactggcaggatcaagtgatgctttttctggaagtgaggattcttctaaggagcctaaattcaccaagtgccgttcacctgagcgagagactttttcatgccactggacagatgaggttcatcatggtacaaagaacctaggacccatacagctgttctataccagaaggaacactcaagaatggactcaagaatggaaagaatgccctgattatgtttctgctggggaaaacagctgttactttaattcatcgtttacctccatctggataccttattgtatcaagctaactagcaatggtggtacagtggatgaaaagtgtttctctgttgatgaaatagtgcaaccagatccacccattgccctcaactggactttactgaacgtcagtttaactgggattcatgcagatatccaagtgagatgggaagcaccacgcaatgcagatattcagaaaggatggatggttctggagtatgaacttcaatacaaagaagtaaatgaaactaaatggaaaatgatggaccctatattgacaacatcagttccagtgtactcattgaaagtggataaggaatatgaagtgcgtgtgagatccaaacaacgaaactctggaaattatggcgagttcagtgaggtgctctatgtaacacttcctcagatgagccaatttacatgtgaagaagatttctactttccatggctcttaattattatctttggaatatttgggctaacagtgatgctatttgtattcttattttctaaacagcaaaggattaaaatgctgattctgcccccagttccagttccaaagattaaaggaatcgatccagatctcctcaaggaaggaaaattagaggaggtgaacacaatcttagccattcatgatagctataaacccgaattccacagtgatgactcttgggttgaatttattgagctagatattgatgagccagatgaaaagactgaggaatcagacacagacagacttctaagcagtgaccatgagaaatcacatagtaacctaggggtgaaggatggcgactctggacgtaccagctgttgtgaacctgacattctggagactgatttcaatgccaatgacatacatgagggtacctcagaggttgctcagccacagaggttaaaaggggaagcagatctcttatgccttgaccagaagaatcaaaataactcaccttatcatgatgcttgccctgctactcagcagcccagtgttatccaagcagagaaaaacaaaccacaaccacttcctactgaaggagctgagtcaactcaccaagctgcccatattcagctaagcaatccaagttcactgtcaaacatcgacttttatgcccaggtgagcgacattacaccagcaggtagtgtggtcctttccccgggccaaaagaataaggcagggatgtcccaatgtgacatgcacccggaaatggtctcactctgccaagaaaacttccttatggacaatgcctacttctgtgaggcagatgccaaaaagtgcatccctgtggctcctcacatcaaggttgaatcacacatacagccaagcttaaaccaagaggacatttacatcaccacagaaagccttaccactgctgctgggaggcctgggacaggagaacatgttccaggttctgagatgcctgtcccagactatacctccattcatatagtacagtccccacagggcctcatactcaatgcgactgccttgcccttgcctgacaaagagtttctctcatcatgtggctatgtgagcacagaccaactgaacaaaatcatgccttagcctttctttggtttcccaagagctacgtatttaatagcaaagaattgactggggcaataacgtttaagccaaaacaatgtttaaaccttttttgggggagtgacaggatggggtatggattctaaaatgccttttcccaaaatgttgaaatatgatgttaaaaaaataagaagaatgcttaatcagatagatattcctattgtgcaatgtaaatattttaaagaattgtgtcagactgtttagtagcagtgattgtcttaatattgtgggtgttaatttttgatactaagcattgaatggctatgtttttaatgtatagtaaatcacgctttttgaaaaagcgaaaaaatcaggtggcttttgcggttcaggaaaattgaatgcaaaccatagcacaggctaattttttgttgtttcttaaataagaaacttttttatttaaaaaactaaaaactagaggtgagaaatttaaactataagcaagaaggcaaaaatagtttggatatgtaaaacatttattttgacataaagttgataaagattttttaataatttagacttcaagcatggctattttatattacactacacactgtgtactgcagttggtatgacccctctaaggagtgtagcaactacagtctaaagctggtttaatgttttggccaatgcacctaaagaaaaacaaactcgttttttacaaagcccttttatacctccccagactccttcaacaattctaaaatgattgtagtaatctgcattattggaatataattgttttatctgaatttttaaacaagtatttgttaatttagaaaactttaaagcgtttgcacagatcaacttaccaggcaccaaaagaagtaaaagcaaaaaagaaaacctttcttcaccaaatcttggttgatgccaaaaaaaaatacatgctaagagaagtagaaatcatagctggttcacactgaccaagatacttaagtgctgcaattgcacgcggagtgagttttttagtgcgtgcagatggtgagagataagatctatagcctctgcagcggaatctgttcacacccaacttggttttgctacataattatccaggaagggaataaggtacaagaagcattttgtaagttgaagcaaatcgaatgaaattaactgggtaatgaaacaaagagttcaagaaataagtttttgtttcacagcctataaccagacacatactcatttttcatgataatgaacagaacatagacagaagaaacaaggttttcagtccccacagataactgaaaattatttaaaccgctaaaagaaactttctttctcactaaatcttttataggatttatttaaaatagcaaaagaagaagtttcatcattttttacttcctctctgagtggactggcctcaaagcaagcattcagaagaaaaagaagcaacctcagtaatttagaaatcattttgcaatcccttaatatcctaaacatcattcatttttgttgttgttgttgttgttgagacagagtctcgctctgtcgccaggctagagtgcggtggcgcgatcttgactcactgcaatctccacctcccacaggttcaggcgattcccgtgcctcagcctcctgagtagctgggactacaggcacgcaccaccatgccaggctaatttttttgtattttagcagagacggggtttcaccatgttggccaggatggtctcgatctcctgacctcgtgatccacccgactcggcctcccaaagtgctgggattacaggtgtaagccaccgtgcccagccctaaacatcattcttgagagcattgggatatctcctgaaaaggtttatgaaaaagaagaatctcatctcagtgaagaatacttctcattttttaaaaaagcttaaaactttgaagttagctttaacttaaatagtatttcccatttatcgcagaccttttttaggaagcaagcttaatggctgataattttaaattctctctcttgcaggaaggactatgaaaagctagaattgagtgtttaaagttcaacatgttatttgtaatagatgtttgatagattttctgctactttgctgctatggttttctccaagagctacataatttagtttcatataaagtatcatcagtgtagaacctaattcaattcaaagctgtgtgtttggaagactatcttactatttcacaacagcctgacaacatttctatagccaaaaatagctaaatacctcaatcagtctcagaatgtcattttggtactttggtggccacataagccattattcactagtatgactagttgtgtctggcagtttatatttaactctctttatgtctgtggattttttccttcaaagtttaataaatttattttcttgg

SEQ ID NO: 12896 - DNA, 2173 bp, Homo sapiens
  source 1..2173: mol_type = unassigned DNA
gattgcaggtcctacaggtatggatctctggcagctgctgttgaccttggcactggcaggatcaagtgatgctttttctggaagtgaggccacagcagctatccttagcagagcaccctggagtctgcaaagtgttaatccaggcctaaagacaagaacactcaagaatggactcaagaatggaaagaatgccctgattatgtttctgctggggaaaacagctgttactttaattcatcgtttacctccatctggataccttattgtatcaagctaactagcaatggtggtacagtggatgaaaagtgtttctctgttgatgaaatagtgcaaccagatccacccattgccctcaactggactttactgaacgtcagtttaactgggattcatgcagatatccaagtgagatgggaagcaccacgcaatgcagatattcagaaaggatggatggttctggagtatgaacttcaatacaaagaagtaaatgaaactaaatggaaaatgatggaccctatattgacaacatcagttccagtgtactcattgaaagtggataaggaatatgaagtgcgtgtgagatccaaacaacgaaactctggaaattatggcgagttcagtgaggtgctctatgtaacacttcctcagatgagccaatttacatgtgaagaagatttctactttccatggctcttaattattatctttggaatatttgggctaacagtgatgctatttgtattcttattttctaaacagcaaaggattaaaatgctgattctgcccccagttccagttccaaagattaaaggaatcgatccagatctcctcaaggaaggaaaattagaggaggtgaacacaatcttagccattcatgatagctataaacccgaattccacagtgatgactcttgggttgaatttattgagctagatattgatgagccagatgaaaagactgaggaatcagacacagacagacttctaagcagtgaccatgagaaatcacatagtaacctaggggtgaaggatggcgactctggacgtaccagctgttgtgaacctgacattctggagactgatttcaatgccaatgacatacatgagggtacctcagaggttgctcagccacagaggttaaaaggggaagcagatctcttatgccttgaccagaagaatcaaaataactcaccttatcatgatgcttgccctgctactcagcagcccagtgttatccaagcagagaaaaacaaaccacaaccacttcctactgaaggagctgagtcaactcaccaagctgcccatattcagctaagcaatccaagttcactgtcaaacatcgacttttatgcccaggtgagcgacattacaccagcaggtagtgtggtcctttccccgggccaaaagaataaggcagggatgtcccaatgtgacatgcacccggaaatggtctcactctgccaagaaaacttccttatggacaatgcctacttctgtgaggcagatgccaaaaagtgcatccctgtggctcctcacatcaaggttgaatcacacatacagccaagcttaaaccaagaggacatttacatcaccacagaaagccttaccactgctgctgggaggcctgggacaggagaacatgttccaggttctgagatgcctgtcccagactatacctccattcatatagtacagtccccacagggcctcatactcaatgcgactgccttgcccttgcctgacaaagagtttctctcatcatgtggctatgtgagcacagaccaactgaacaaaatcatgccttagcctttctttggtttcccaagagctacgtatttaatagcaaagaattgactggggcaataacgtttaagccaaaacaatgtttaaaccttttttgggggagtgacaggatggggtatggattctaaaatgccttttcccaaaatgttgaaatatgatgttaaaaaaataagaagaatgcttaatcagatagatattcctattgtgcaatgtaaatattttaaagaattgtgtcagactgtttagtagcagtgattgtcttaatattgtgggtgttaatttttgatactaagcattgaatggctatgtttttaatgtatagtaaatcacgctttttgaaaaagcgaaaaaatcaggtggcttttgcggt

SEQ ID NO: 12897 - DNA, 461 bp, Homo sapiens
  source 1..461: mol_type = unassigned DNA
gtgaaggatgccactctgggtgttcttctttgtgatcctcaccctcagcaacagctcccactgctccccacctccccctttgaccctcaggatgcggcggtatgcagatgccatcttcaccaacagctaccggaaggtgctgggccagctgtccgcccgcaagctgctccaggacatcatgagcaggcagcagggagagagcaaccaagagcgaggagcaagggcacggcttggtcgtcaggtagacagcatgtgggcagaacaaaagcaaatggaattggagagcatcctggtggccctgctgcagaagcacagcaggaactcccagggatgaagattcctcctgtgacccgggctacctgtagccaaaatgcaactggatccagttaatcctctcatttctgacccactttttcctttgaaaatacaataaaattcccccataccggtgtgcatttaaa

SEQ ID NO: 12898 - DNA, 377 bp, Homo sapiens
  source 1..377: mol_type = unassigned DNA
atgccactctgggtgttcttctttgtgatcctcaccctcagcaacagctcccactgctccccacctccccctttgaccctcaggatgcggcggtatgcagatgccatcttcaccaacagctaccggaaggtgctgggccagctgtccgcccgcaagctgctccaggacatcatgagcaggcagcagggagagagcaaccaagagcgaggagcaagggcacggcttggtcgtcaggtagacagcatgtgggcagaacaaaagcaaatggaattggagagcatcctggtggccctgctgcagaagcacaggaactcccagggatgaagattcctcctgtgacccgggctacctgtagccaaaatgcaactggatccagt

SEQ ID NO: 12899 - DNA, 566 bp, Homo sapiens
  source 1..566: mol_type = unassigned DNA
tgggaacgccaggcggctgccagagcaaacacccagcccagggcccctggatttgagcagtgcctcggagcagagggatatctgccgcatcaggtgccaccccgggtgaaggatgccactctgggtgttcttctttgtgatcctcaccctcagcaacagctcccactgctccccacctccccctttgaccctcaggatgcggcggtatgcagatgccatcttcaccaacagctaccggaaggtgctgggccagctgtccgcccgcaagctgctccaggacatcatgagcaggcagcagggagagagcaaccaagagcgaggagcaagggcacggcttggtcgtcaggtagacagcatgtgggcagaacaaaagcaaatggaattggagagcatcctggtggccctgctgcagaagcacagcaggaactcccagggatgaagattcctcctgtgacccgggctacctgtagccaaaatgcaactggatccagttaatcctctcatttctgacccactttttcctttgaaaatacaataaaattcccccataccggtgtgcatttaaa

SEQ ID NO: 12900 - DNA, 1602 bp, Homo sapiens
  source 1..1602: mol_type = unassigned DNA
ccaaggcttactgaggctggtggagggagccactgctgggctcaccatggaccgccggatgtggggggcccacgtcttctgcgtgttgagcccgttaccgaccgtattgggccacatgcacccagaatgtgacttcatcacccagctgagagaggatgagagtgcctgtctacaagcagcagaggagatgcccaacaccaccctgggctgccctgcgacctgggatgggctgctgtgctggccaacggcaggctctggcgagtgggtcaccctcccctgcccggatttcttctctcacttcagctcagagtcaggggctgtgaaacgggattgtactatcactggctggtctgagccctttccaccttaccctgtggcctgccctgtgcctctggagctgctggctgaggaggaatcttacttctccacagtgaagattatctacaccgtgggccatagcatctctattgtagccctcttcgtggccatcaccatcctggttgctctcaggaggctccactgcccccggaactacgtccacacccagctgttcaccacttttatcctcaaggcgggagctgtgttcctgaaggatgctgcccttttccacagcgacgacactgaccactgcagcttctccactgttctatgcaaggtctctgtggccgcctcccatttcgccaccatgaccaacttcagctggctgttggcagaagccgtctacctgaactgcctcctggcctccacctcccccagctcaaggagagccttctggtggctggttctcgctggctgggggctgcccgtgctcttcactggcacgtgggtgagctgcaaactggccttcgaggacatcgcgtgctgggacctggacgacacctccccctactggtggatcatcaaagggcccattgtcctctcggtcggggtgaactttgggctttttctcaatattatccgcatcctggtgaggaaactggagccagctcagggcagcctccatacccagtctcagtattggcgtctctccaagtcgacacttttcctgatcccactctttggaattcactacatcatcttcaacttcctgccagacaatgctggcctgggcatccgcctccccctggagctgggactgggttccttccagggcttcattgttgccatcctctactgcttcctcaaccaagaggtgaggactgagatctcacggaagtggcatggccatgaccctgagcttctgccagcctggaggacccgtgctaagtggaccacgccttcccgctcggcggcaaaggtgctgacatctatgtgctaggctgcctcatcacgccactggagtccacacttgaatttgggcagctaccacgggtctgccatgctctggaggagcaagggggccacatccccaccccagctgttacccagcccggggcaggtgcagcccttcctccctgtctctgcatctgactctcttttgaggtccctgtatgtctacctctgacttctgtggtccctctgtgtctgctctcatccattcctcttactggggcctggggctctagcccaaggctcagaggagccaataaacctgtaaatgaa

SEQ ID NO: 12901 - DNA, 1228 bp, Homo sapiens
  source 1..1228: mol_type = unassigned DNA
tcacttccctggcctaggtgctgggacagtgagggcctcttttctccctactgcccttaggatgctggcagcccagctcaccactcctcacccctcaggggaataatcctctttgtgaagagatggcacctttgaagccagagaaggaaggccccatagtgtgtccctgggcaggctagacctgggccccaggcctctggagccaccctctctgttgctcagaggagctgtccatgcaaaccctgccagggtcacttgatggtccctggcacccccagccccctcctggggagagggaaggagttgtggctagagagtcttgcttgcctcccaggggctgtgaaacgggattgtactatcactggctggtctgagccctttccaccttaccctgtggcctgccctgtgcctctggagctgctggctgaggagggctgcccgtgctcttcactggcacgtgggtgagctgcaaactggccttcgaggacatcgcgtgctgggacctggacgacacctccccctactggtggatcatcaaagggcccattgtcctctcggtcggggtgaactttgggctttttctcaatattatccgcatcctggtgaggaaactggagccagctcagggcagcctccatacccagtctcagtattggcgtctctccaagtcgacacttttcctgatcccactctttggaattcactacatcatcttcaacttcctgccagacaatgctggcctgggcatccgcctccccctggagctgggactgggttccttccagggcttcattgttgccatcctctactgcttcctcaaccaagaggtgaggactgagatctcacggaagtggcatggccatgaccctgagcttctgccagcctggaggacccgtgctaagtggaccacgccttcccgctcggcggcaaaggtgctgacatctatgtgctaggctgcctcatcacgccactggagtccacacttgaatttgggcagctaccacgggtctgccatgctctggaggagcaagggggccacatccccaccccagctgttacccagcccggggcaggtgcagcccttcctccctgtctctgcatctgactctcttttgaggtccctgtatgtctacctctgacttctgtggtccctctgtgtctgctctcatccattcctcttactggggcctggggctctagcccaaggctcagaggagccaataaacct

SEQ ID NO: 12902 - DNA, 1459 bp, Homo sapiens
  source 1..1459: mol_type = unassigned DNA
tcacttccctggcctaggtgctgggacagtgagggcctcttttctccctactgcccttaggatgctggcagcccagctcaccactcctcacccctcaggggaataatcctctttgtgaagagatggcacctttgaagccagagaaggaaggccccatagtgtgtccctgggcaggctagacctgggccccaggcctctggagccaccctctctgttgctcagaggagctgtccatgcaaaccctgccagggtcacttgatggtccctggcacccccagccccctcctggggagagggaaggagttgtggctagagagtcttgcttgcctcccaggggctgtgaaacgggattgtactatcactggctggtctgagccctttccaccttaccctgtggcctgccctgtgcctctggagctgctggctgaggaggaatcttacttctccacagtgaagattatctacaccgtgggccatagcatctctattgtagccctcttcgtggccatcaccatcctggttgctctcaggaggctccactgcccccggaactacgtccacacccagctgttcaccacttttatcctcaaggcgggagctgtgttcctgaaggatgctgcccttttccacagcgacgacactgaccactgcagcttctccactggctgcccgtgctcttcactggcacgtgggtgagctgcaaactggccttcgaggacatcgcgtgctgggacctggacgacacctccccctactggtggatcatcaaagggcccattgtcctctcggtcggggtgaactttgggctttttctcaatattatccgcatcctggtgaggaaactggagccagctcagggcagcctccatacccagtctcagtattggcgtctctccaagtcgacacttttcctgatcccactctttggaattcactacatcatcttcaacttcctgccagacaatgctggcctgggcatccgcctccccctggagctgggactgggttccttccagggcttcattgttgccatcctctactgcttcctcaaccaagaggtgaggactgagatctcacggaagtggcatggccatgaccctgagcttctgccagcctggaggacccgtgctaagtggaccacgccttcccgctcggcggcaaaggtgctgacatctatgtgctaggctgcctcatcacgccactggagtccacacttgaatttgggcagctaccacgggtctgccatgctctggaggagcaagggggccacatccccaccccagctgttacccagcccggggcaggtgcagcccttcctccctgtctctgcatctgactctcttttgaggtccctgtatgtctacctctgacttctgtggtccctctgtgtctgctctcatccattcctcttactggggcctggggctctagcccaaggctcagaggagccaataaacct

SEQ ID NO: 12903 - DNA, 1292 bp, Homo sapiens
  source 1..1292: mol_type = unassigned DNA
tcacttccctggcctaggtgctgggacagtgagggcctcttttctccctactgcccttaggatgctggcagcccagctcaccactcctcacccctcaggggaataatcctctttgtgaagagatggcacctttgaagccagagaaggaaggccccatagggctgtgaaacgggattgtactatcactggctggtctgagccctttccaccttaccctgtggcctgccctgtgcctctggagctgctggctgaggaggaatcttacttctccacagtgaagattatctacaccgtgggccatagcatctctattgtagccctcttcgtggccatcaccatcctggttgctctcaggaggctccactgcccccggaactacgtccacacccagctgttcaccacttttatcctcaaggcgggagctgtgttcctgaaggatgctgcccttttccacagcgacgacactgaccactgcagcttctccactggctgcccgtgctcttcactggcacgtgggtgagctgcaaactggccttcgaggacatcgcgtgctgggacctggacgacacctccccctactggtggatcatcaaagggcccattgtcctctcggtcggggtgaactttgggctttttctcaatattatccgcatcctggtgaggaaactggagccagctcagggcagcctccatacccagtctcagtattggcgtctctccaagtcgacacttttcctgatcccactctttggaattcactacatcatcttcaacttcctgccagacaatgctggcctgggcatccgcctccccctggagctgggactgggttccttccagggcttcattgttgccatcctctactgcttcctcaaccaagaggtgaggactgagatctcacggaagtggcatggccatgaccctgagcttctgccagcctggaggacccgtgctaagtggaccacgccttcccgctcggcggcaaaggtgctgacatctatgtgctaggctgcctcatcacgccactggagtccacacttgaatttgggcagctaccacgggtctgccatgctctggaggagcaagggggccacatccccaccccagctgttacccagcccggggcaggtgcagcccttcctccctgtctctgcatctgactctcttttgaggtccctgtatgtctacctctgacttctgtggtccctctgtgtctgctctcatccattcctcttactggggcctggggctctagcccaaggctcagaggagccaataaacctgtaaatgaa

SEQ ID NO: 12904 - DNA, 1613 bp, Homo sapiens
  source 1..1613: mol_type = unassigned DNA
tcacttccctggcctaggtgctgggacagtgagggcctcttttctccctactgcccttaggatgctggcagcccagctcaccactcctcacccctcaggggaataatcctctttgtgaagagatggcacctttgaagccagagaaggaaggccccatagtgtgtccctgggcaggctagacctgggccccaggcctctggagccaccctctctgttgctcagaggagctgtccatgcaaaccctgccagggtcacttgatggtccctggcacccccagccccctcctggggagagggaaggagttgtggctagagagtcttgcttgcctcccaggggctgtgaaacgggattgtactatcactggctggtctgagccctttccaccttaccctgtggcctgccctgtgcctctggagctgctggctgaggaggaatcttacttctccacagtgaagattatctacaccgtgggccatagcatctctattgtagccctcttcgtggccatcaccatcctggttgctctcaggaggctccactgcccccggaactacgtccacacccagctgttcaccacttttatcctcaaggcgggagctgtgttcctgaaggatgctgcccttttccacagcgacgacactgaccactgcagcttctccactgttctatgcaaggtctctgtggccgcctcccatttcgccaccatgaccaacttcagctggctgttggcagaagccgtctacctgaactgcctcctggcctccacctcccccagctcaaggagagccttctggtggctggttctcgctggctgggggctgcccgtgctcttcactggcacgtgggtgagctgcaaactggccttcgaggacatcgcgtgctgggacctggacgacacctccccctactggtggatcatcaaagggcccattgtcctctcggtcggggtgaactttgggctttttctcaatattatccgcatcctggtgaggaaactggagccagctcagggcagcctccatacccagtctcagtattggcgtctctccaagtcgacacttttcctgatcccactctttggaattcactacatcatcttcaacttcctgccagacaatgctggcctgggcatccgcctccccctggagctgggactgggttccttccagggcttcattgttgccatcctctactgcttcctcaaccaagaggtgaggactgagatctcacggaagtggcatggccatgaccctgagcttctgccagcctggaggacccgtgctaagtggaccacgccttcccgctcggcggcaaaggtgctgacatctatgtgctaggctgcctcatcacgccactggagtccacacttgaatttgggcagctaccacgggtctgccatgctctggaggagcaagggggccacatccccaccccagctgttacccagcccggggcaggtgcagcccttcctccctgtctctgcatctgactctcttttgaggtccctgtatgtctacctctgacttctgtggtccctctgtgtctgctctcatccattcctcttactggggcctggggctctagcccaaggctcagaggagccaataaacct

SEQ ID NO: 12905 - DNA, 1172 bp, Homo sapiens
  source 1..1172: mol_type = unassigned DNA
cagcgcagtcacgtcccagagcctgttcagctgagccggcagcatgtggaacgcgacgcccagcgaagagccggggttcaacctcacactggccgacctggactgggatgcttcccccggcaacgactcgctgggcgacgagctgctgcagctcttccccgcgccgctgctggcgggcgtcacagccacctgcgtggcactcttcgtggtgggcatcgctggcaacctgctcaccatgctggtggtgtcgcgcttccgcgagctgcgcaccaccaccaacctctacctgtccagcatggccttctccgatctgctcatcttcctctgcatgcccctggacctcgttcgcctctggcagtaccggccctggaacttcggcgacctcctctgcaaactcttccaattcgtcagtgagagctgcacctacgccacggtgctcaccatcacagcgctgagcgtcgagcgctacttcgccatctgcttcccactccgggccaaggtggtggtcaccaaggggcgggtgaagctggtcatcttcgtcatctgggccgtggccttctgcagcgccgggcccatcttcgtgctagtcggggtggagcacgagaacggcaccgacccttgggacaccaacgagtgccgccccaccgagtttgcggtgcgctctggactgctcacggtcatggtgtgggtgtccagcatcttcttcttccttcctgtcttctgtctcacggtcctctacagtctcatcggcaggaagctgtggcggaggaggcgcggcgatgctgtcgtgggtgcctcgctcagggaccagaaccacaagcaaaccgtgaaaatgctggctgtagtggtgtttgccttcatcctctgctggctccccttccacgtagggcgatatttattttccaaatcctttgagcctggctccttggagattgctcagatcagccagtactgcaacctcgtgtcctttgtcctcttctacctcagtgctgccatcaaccccattctgtacaacatcatgtccaagaagtaccgggtggcagtgttcagacttctgggattcgaacccttctcccagagaaagctctccactctgaaagatgaaagttctcgggcctggacagaatctagtattaatacatgacctagcacattgcgagtacagtcaccgc

SEQ ID NO: 12906 - DNA, 912 bp, Homo sapiens
  source 1..912: mol_type = unassigned DNA
agcgcagtcacgtcccagagcctgttcagctgagccggcagcatgtggaacgcgacgcccagcgaagagccggggttcaacctcacactggccgacctggactgggatgcttcccccggcaacgactcgctgggcgacgagctgctgcagctcttccccgcgccgctgctggcgggcgtcacagccacctgcgtggcactcttcgtggtgggcatcgctggcaacctgctcaccatgctggtggtgtcgcgcttccgcgagctgcgcaccaccaccaacctctacctgtccagcatggccttctccgatctgctcatcttcctctgcatgcccctggacctcgttcgcctctggcagtaccggccctggaacttcggcgacctcctctgcaaactcttccaattcgtcagtgagagctgcacctacgccacggtgctcaccatcacagcgctgagcgtcgagcgctacttcgccatctgcttcccactccgggccaaggtggtggtcaccaaggggcgggtgaagctggtcatcttcgtcatctgggccgtggccttctgcagcgccgggcccatcttcgtgctagtcggggtggagcacgagaacggcaccgacccttgggacaccaacgagtgccgccccaccgagtttgcggtgcgctctggactgctcacggtcatggtgtgggtgtccagcatcttcttcttccttcctgtcttctgtctcacggtcctctacagtctcatcggcaggaagctgtggcggaggaggcgcggcgatgctgtcgtgggtgcctcgctcagggaccagaaccacaagcaaaccgtgaaaatgctgggtgggtctcagcgcgcgctcaggctttctctcgcgggtcctatcctctccctgtgccttctcccttctctctga

SEQ ID NO: 12907 - DNA, 8444 bp, Homo sapiens
  source 1..8444: mol_type = unassigned DNA
gaggcagctcctagtgaaacagtctaagaggtgtcaggctctgctgagtgctaaattagagaaagctgttacttatataacttcctgtaattgcccggcagtagctgcagctgaggacagccaccctttcttcgtctctgctgagcgaaggctacacggcccttcctccttgcagctgtttcaccttctaccttgcgtggagccaggcttttgcaccgaatctgagatgccattttaaacagaagactccatcctcttgaagatgggaaattcttacgctggacagctgaagacgacacgctttgaagaggtcttgcacaattccatcgaggcatccctgcggtccaacaacctggtgcccaggcccatcttttcccagctgtacctggaagctgagcagcagcttgccgctctagaaggtggtagccgagtggacaatgaggaagaggaagaagagggagaaggagggctggaaacaaatggccccccaaaccctttccagctgcaccctctgcctgaaggatgctgtaccacagacgggttttgccaggccgggaaggacctgcgccttgtctccatttccaacgagcccatggatgtccctgcgggctttctcctcgtgggggtcaagtcccccagcctgccggaccatctcctggtgtgcgccgttgacaagaggttcttgccagatgacaatggccacaatgctcttcttggtttctctgggaattgtgttggctgtggaaagaaaggcttctgttacttcacggaattctccaatcatataaatctgaaactgaccactcaacccaagaagcagaaacacttgaagtattacctggtccgtaatgcacaagggactctaaccaaaggacctttaatctgttggaaaggctcagagtttagaagccggcagatccccgccagtacttgttccagttccctcttcccagccctggagagcacggctgccttccccagcgagcccgttcctgggacgaaccccagcatcctgatgggagctcagcaggcaggaccagcttctgatcacccctcactaaacgcagcaatgggtccggctgttttcaacggcaaagattccccgaagtgccaacaactggcaaagaataacctgttggccctgccgcgaccatcggctttaggtatcttgtcaaactccgggccccccaaaaaacgccacaaagggtggtctccagaatctccatcagctccagatggtggctgcccccaaggtggtgggaacagagctaagtatgagagcgcaggcatgtcctgcgtgccgcaggttggcttggtgggaccagcttcagtcacctttccagtggtggcctctggagaaccagtgtctgttcctgacaacttgctgaaaatatgcaaggccaagccagtgatatttaaaggccatgggaacttcccttacctctgtgggaacctgaatgacgtcgtggtcagccccctcttgtacacgtgctaccagaattcccagtctgtctcacgggcatacgagcagtacggcgcctctgccatccagcccatctccgaggagatgcagctcctgcttaccgtctactacctggtccagctggccgcggaccaggtgcccttgatggaggacctggagcagatcttcctgcgctcttggcgcgagtcgcacctgaccgagatccggcagtaccagcaggcgccgccgcagcccttcccgcccgcgcccagcgccgcggcacccgtgacctccgcgcagctgccctggctggccagcctggccgccagctcctgcaacgacagcgtgcacgtcatcgagtgtgcttactccctggccgagggcctctccgagatgttccggctgttggtcgagggcaagcttgccaagaccaactacgtggtcatcatctgcgcctgccgcagcgcggccatcgactcctgcatcgccgtcaccggaaaataccaagcccggattctttccgagagccttctcactcctgcggagtaccagaaggaagtcaattacgagctggttacggggaaggtagactcgctgggggccttctttagcaccctctgtccagagggtgacattgacattttgctggacaaatttcaccaggaaaatcaaggccatatttcttcctcactcgctgcctcttctgtcactaaagcagcatccctggatgtcagtgggacaccggtgtgcacaagttacaatctggagccacacagcatccggcccttccagctggcagtagcgcagaagctcctctcccatgtgtgttccattgcggattccagcacccaaaatctggacctgggatcctttgagaaggtggactttctcatttgcattcccccctcagaagtgacctaccagcagactctgctccatgtgtggcattcaggggttttgctggagcttggtctgaagaaagagcacatgacgaagcagagggtggaacagtatgttctgaagctagacacggaggcacagacaaaatttaaggcttttctgcaaaactccttccagaacccgcatacactttttgtcctaatccatgaccatgcgcactgggatcttgtgagtagcactgttcataacctctattctcaaagtgacccgtcggtgggattggtggaccgattgctcaactgcagggaggtgaaggaggcccccaacattgtgacacttcacgtgacctccttcccgtatgcactgcagacacagcacaccctcatcagcccctacaacgagatccactggcctgcctcctgcagtaatggagtggacttatatcatgaaaataagaagtacttcgggctgtcggagtttattgaatccaccctttcaggacacagcctccccttgctcagatacgatagctcctttgaggccatggtcactgcattaggaaaaaggttcccccgcctgcacagcgcggtgatcaggacctttgttctcgtgcagcactacgcggccgccctgatggccgtaagcggcctcccgcagatgaagaactacacgtcggtggagacgctggagatcacgcagaacctcctcaactccccgaagcagtgcccctgcggccacgggctcatggtcctgctgcgggtgccctgttcgcccctggcggtggtggcctatgagcggctggcccacgtgcgggcccggctggcgctggaggagcactttgagatcatcctgggcagtcccagctcaggcgtcaccgtggggaagcacttcgtaaagcagctcaggatgtggcagaaaattgaggatgtggagtggagaccccagacttacttggagctggagggtctgccttgcatcctgatcttcagtgggatggacccgcatggggagtccttgccgaggtctttgaggtactgtgacctgcgattgataaactcctcctgcttggtgagaacagccttggagcaggagctgggcctggctgcctactttgtgagcaacgaggttcccttggagaagggggctaggaacgaggccttggagagtgatgctgagaagctgagcagcacagacaacgaggatgaggagctggggacagaaggctctacctcggagaagagaagccccatgaaaagggagaggtcccgctcccacgactcagcatcctcatccctctcctccaaggcttccggttcagcgctcggtggcgagtcctcggctcagcccacagcactcccccagggagagcatgccaggtcgccccagccccgtggccccgcagaggagggcagagcccctggtgagaaacagaggccccgggcaagtcaggggccaccctcggccatcagcaggcacagtcccgggccgacgccccagcccgactgtagcctcaggaccggccagaggagcgtccaggtgtcggtcacctcgtcgtgctcccagctgtcctcctcctcgggctcatcctcctcatccgtggcgcccgctgccggcacgtgggtcctgcaggcctcccagtgctccttgaccaaggcctgccgccagccacccattgtcttcttgcccaagctcgtgtacgacatggttgtgtccactgacagcagtggcctgcccaaggccgcctccctcctgccctccccctcggtcatgtgggccagctctttccgccccctgctcagcaagaccatgacatccaccgagcagtccctctactaccggcagtggacggtgccccggcccagccacatggactacggcaaccgggccgagggccgcgtggacggcttccacccccgcaggctgctgctcagcggcccccctcagatcgggaagacaggtgcctacctgcagttcctcagtgtcctgtccaggatgcttgttcggctcacagaagtggatgtctatgacgaggaggagatcaatatcaacctcagagaagaatctgactggcattatctccagcttagcgacccctggccagacctggagctgttcaagaagttgccctttgactacatcattcacgacccgaagtatgaagatgccagcctgatttgttcgcactatcagggtataaagagtgaagacagagggatgtcccggaagccggaggacctttatgtgcggcgtcagacggcacggatgagactgtccaagtacgcagcgtacaacacttaccaccactgtgagcagtgccaccagtacatgggcttccacccccgctaccagctgtatgagtccaccctgcacgcctttgccttctcttactccatgctaggagaggagatccagctgcacttcatcatccccaagtccaaggagcaccactttgtcttcagccaacctggaggccagctggagagcatgcgactacccctcgtgacagacaagagccatgaatatataaaaagtccgacattcactccaaccaccggccgtcacgaacatgggctctttaatctgtaccacgcaatggacggtgccagccatttgcacgtgctggttgtcaaggaatacgagatggcaatttataagaaatattggcccaaccacatcatgctggtgctccccagtatcttcaacagtgctggagttggtgctgctcatttcctcatcaaggagctgtcctaccataacctggagctcgagcggaaccggcaggaggagctgggaatcaagccgcaggacatctggcctttcattgtgatctctgatgactcctgcgtgatgtggaacgtggtggatgtcaactctgctggggagagaagcagggagttctcctggtcggaaaggaacgtgtctttgaagcacatcatgcagcacatcgaggcggcccccgacatcatgcactacgccctgctgggcctgcggaagtggtccagcaagacccgggccagcgaggtgcaagagcccttctcccgctgccacgtgcacaacttcatcatcctgaacgtggacctgacccagaacgtgcagtacaaccagaaccggttcctgtgtgacgatgtagacttcaacctgcgggtgcacagcgccggcctcctgctctgccggttcaaccgcttcagcgtgatgaagaagcagatcgtggtgggcggccacaggtccttccacatcacatccaaggtgtctgataactctgccgcggtcgtgccggcccagtacatctgtgccccggacagcaagcacacgttcctcgcagcgcccgcccagctcctgctggagaagttcctgcagcaccacagccacctcttcttcccgctgtccctgaagaaccatgaccacccagtgctgtctgtcgactgttacctgaacctgggatctcagatttctgtttgctatgtgagctccaggccccactctttaaacatcagctgctcggacttgctgttcagtgggctgctgctgtacctctgtgactcttttgtgggagctagctttttgaaaaagtttcattttctgaaaggtgcgacgttgtgtgtcatctgtcaggaccggagctcactgcgccagacggtcgtccgcctggagctcgaggacgagtggcagttccggctgcgcgatgagttccagaccgccaatgccagggaagaccggccgctcttttttctgacgggacgacacatctgaggaagacagcggcgagttttctgaagagatgagtgctcagagccctcatgctgttgaggctaaagggaggcctggaacggtggggcgtttgactggaatggaccccagggactgtccaggtgcagcccctcctagtacacatgggcccccgaggccgtggtcctgggagccaggaagactccgcagtgggtgagaatgaaaacttgagactcccaagttctgggccagcccattgctctgggctgttttaaagcccatttcacgaggaacaaagatttacttcctgtcctgccattcgtgtgcttccatggacaaacctgatttttttctcttagttctaaagaatcttgggttattttgtagcggtgccagtatttcagtagatgggatttcagccaagtaggttcccctgtaacctcctacaaagcaatattccaaaggaacattttaactgtaaaggctggagacaagaaaaaataagtagatcgttttaataacaattatttaattgcctataagtttgctgtttcagaggctagcccaaaggcatcaaatttaataaagttaaacaaattgatttacttcagagcaaatatgatcctattaaaataatatagggtaaataccctacctcttagaaagggcaaaaatgcaaagaagctttctttaaaactaaaagggttttttggggggggagttggcggggaggaaataaggctaacagaggttgacctaaaattagccttacaaaggagaaaggaccacattgcttacttgaaacagacaatgaaaacaaccaaagtgatatataaaatagttgatgagaactagacttatgactgtagtttactagagtttagttttcagttgctgaagtagctcattttctcttactaatgtttggttcctcagggaagaatctcacttgactagagaggaggtgggaacagaagagagaaggaggcagggagatgtatttcttagggctcaccccttcacagactgacagaatggttttgttttgttttgttttgttttgttttgtttttgagatggactctagctctgtcacccaggctggagtgcagtggtgcgatctcggctcactgcaagctccgcctcccgggttctcaccattctcctgcctcagcctcccgagtagctgggactacaggcgcccaccaccacgcccggctaattttttgtattttttagtagagacggggtttcaccatgttagccaggatggtctcgatctcctgacctcgtgatccgcccgcctcggcctcccaaagtgctgggattacaggcgtgagccaccgtgcctgccccagaatggtttttaaagccacagttgagaggccacccattgcccggcgcctggacagtgatcatcttgttcatcttgttcagtcctttcttgtgtgattggaattattcatcccctttgaaagatgagaaggttgagatgcaaagagtctacctttccaagttctcactgctggaaagagctagaagcacagttcaaagttctggcttctggactctgcagtccaggtctcccttctcccacttgcctaccctcaatgccacactgtttttgaagtggcccataacttgaaggaaaagtttaaagacagttcaatttaatcatcagaatgcattcttttttttttcggagacggagtttcactcttgctgcccaggctggagtgcaatggtgcaatgacctcggctcactgcaacctctgcctcctgggttcaagtgattctccagcctcagcctcccgagtagctgggattatgggcgcccaccaccatgcccagctaatttttgtattttttttttttagtagagatggggtttcgccaggttggccaggctggtcttgtgaactcctggcctcaggtgatctgcccacctcatcctccaaaagtgctgggattacaggcatgagccactgcgcctggcctcagaatgcattcttacacatctatcctagacatttataagcactctaatggataacaatccaagaataaatgattgtaaaagatgatgccgaagagttgatgtcaatctttttttcctaagaaaaaaagtccgcgagtattaaatatttagatcaatgtttataaaatgattactttgtatatctcattattcctattttggaataaaaactgaccttctttaatcatatacttgtcttttgtaaatagcagcttttgtgtcattctccccactttattagttaatttaaattggaaaaaaccctcaaactaatattcttgtctgttccagtcttataaataaaacttataatgcatg

SEQ ID NO: 12908 - DNA, 2448 bp, Homo sapiens
  source 1..2448: mol_type = unassigned DNA
gatactagctctgaaacttttcccctggctggcttggctgcctctccctgccgggcaggggccaggaagcctgggtgtcaggcagacccgagccaggctctgcacagcagggcattacgcgccccacgcatcctcttccatccccaggcacagatcaaaggcgcagcccaggaggcgggagcccctgcacactttccacctctgctgggcttagcctcttggctggttggtctgtggagtgcctgaagtgaccagctttttgtaagtagctgcagctgaggacagccaccctttcttcgtctctgctgagcgaaggctacacggcccttcctccttgcagctgtttcaccttctaccttgcgtggagccaggcttttgcaccgaatctgagatgccattttaaacagaagactccatcctcttgaagatgggaaattcttacgctggacagctgaagacgacacgctttgaagaggtcttgcacaattccatcgaggcatccctgcggtccaacaacctggtgcccaggcccatcttttcccagctgtacctggaagctgagcagcagcttgccgctctagaaggtggtagccgagtggacaatgaggaagaggaagaagagggagaaggagggctggaaacaaatggccccccaaaccctttccagctgcaccctctgcctgaaggatgctgtaccacagacgggttttgccaggccgggaaggacctgcgccttgtctccatttccaacgagcccatggatgtccctgcgggctttctcctcgtgggggtcaagtcccccagcctgccggaccatctcctggtgtgcgccgttgacaagaggttcttgccagatgacaatggccacaatgctcttcttggtttctctgggaattgtgttggctgtggaaagaaaggcttctgttacttcacggaattctccaatcatataaatctgaaactgaccactcaacccaagaagcagaaacacttgaagtattacctggtccgtaatgcacaagggactctaaccaaaggacctttaatctgttggaaaggctcagagtttagaagccggcagatccccgccagtacttgttccagttccctcttcccagccctggagagcacggctgccttccccagcgagcccgttcctgggacgaaccccagcatcctgatgggagctcagcaggcaggaccagcttctgatcacccctcactaaacgcagcaatgggtccggctgttttcaacggcaaagattccccgaagtgccaacaactggcaaagaataacctgttggccctgccgcgaccatcggctttaggtatcttgtcaaactccgggccccccaaaaaacgccacaaagggtggtctccagaatctccatcagctccagatggtggctgcccccaaggtggtgggaacagagctaagtatgagagcgcaggcatgtcctgcgtgccgcaggttggcttggtgggaccagcttcagtcacctttccagtggtggcctctggagaaccagtgtctgttcctgacaacttgctgaaaatatgcaaggccaagccagtgatatttaaagtatttgtaaatggtgctacccaaatggtagcccttggtccggcagaacctgcatcgccccggagcttatgagaggcgtgaattcatggacccatcctggaatcagaatcaggccccacttctgcatcagaagccctgggtggcaccagcaagtgtttggcaagcccttgagaagcagtgtctttgagaacgtgacctgtgccccaggcaccagctttactccccgagcccagcaggacatctgcatataacacacagccgaagtcagaaaatatatttttggtgactaaatggagtacctggagtacaagataacacacacacacacacacacacacacacacacacacacacacacacacgccacctttgggagctcagcagccccgagaggatttgatagcttcaccgcttcacctggttttacaaatgcggagactgaggtttagggcagttaagcttcttgcttagcatcatgtaggtaaagaatggtggaaagatatttgaacccgacctgggcaattccacctctgagggctgtcctcagaatgaatcttctgatgggctgggcacggtggctcacgcctgtaatcccagaactttgagaggccgaggcgggtagatcactttaggtcagaagttcaagatcagcctgggcaacatggtgaaaccttgtctctactaaaaatacaaaaattggccgggtgtggtggtgatgcgcacctgtcatcccagctactcgggaggctgaggtgggagaatcacttgaacttgggaggcagaggttgtggtgagccgagatcacgccactgcactccagcccggggacagagcaagacactgtctcaaaaaaaaaaaaagaa

SEQ ID NO: 12909 - DNA, 2347 bp, Homo sapiens
  source 1..2347: mol_type = unassigned DNA
gaaagaatcaaagcgcacatcttgtactttgatgcccataggaagggctctcctctggcccctctggctttgtttggagcagaaaacaacaaactgcagctgaggacagccaccctttcttcgtctctgctgagcgaaggctacacggcccttcctccttgcagctgtttcaccttctaccttgcgtggagccaggcttttgcaccgaatctgagatgccattttaaacagaagactccatcctcttgaagatgggaaattcttacgctggacagctgaagacgacacgctttgaagaggtcttgcacaattccatcgaggcatccctgcggtccaacaacctggtgcccaggcccatcttttcccagctgtacctggaagctgagcagcagcttgccgctctagaaggtggtagccgagtggacaatgaggaagaggaagaagagggagaaggagggctggaaacaaatggccccccaaaccctttccagctgcaccctctgcctgaaggatgctgtaccacagacgggttttgccaggccgggaaggacctgcgccttgtctccatttccaacgagcccatggatgtccctgcgggctttctcctcgtgggggtcaagtcccccagcctgccggaccatctcctggtgtgcgccgttgacaagaggttcttgccagatgacaatggccacaatgctcttcttggtttctctgggaattgtgttggctgtggaaagaaaggcttctgttacttcacggaattctccaatcatataaatctgaaactgaccactcaacccaagaagcagaaacacttgaagtattacctggtccgtaatgcacaagggactctaaccaaaggacctttaatctgttggaaaggctcagagtttagaagccggcagatccccgccagtacttgttccagttccctcttcccagccctggagagcacggctgccttccccagcgagcccgttcctgggacgaaccccagcatcctgatgggagctcagcaggcaggaccagcttctgatcacccctcactaaacgcagcaatgggtccggctgttttcaacggcaaagattccccgaagtgccaacaactggcaaagaataacctgttggccctgccgcgaccatcggctttaggtatcttgtcaaactccgggccccccaaaaaacgccacaaagggtggtctccagaatctccatcagctccagatggtggctgcccccaaggtggtgggaacagagctaagtatgagagcgcaggcatgtcctgcgtgccgcaggttggcttggtgggaccagcttcagtcacctttccagtggtggcctctggagaaccagtgtctgttcctgacaacttgctgaaaatatgcaaggccaagccagtgatatttaaaggccatgggaacttcccttacctctgtgggaacctgaatgacgtcgtggtcagccccctcttgtacacgtgctaccagaattcccagtctgtctcacgggcatacgagcagtacggcgcctctgccatccagcccatctccgaggagatgcagctcctgcttaccgtctactacctggtccagctggcacatcaaatacgaaatccggacgtataaaccagacaattcataaaagagaaaataccagaaggaaacaaatattgaaaagtattcagtctcactcatcatcaaagacatgcaaatcacaaatcaagtcatctttttctgaattaataacccaaatgatggtacccagtggtgcttaggtgcggtaaaaccagcgcttgtccgatgcaccgttcgcgtggtaaactgacgcattcaggctcttgggaagcaatctgatgatatgtagtagctggttctgtaaatccacctttgagaatttaggcgaaggaagtaacgttctatatgtcaagatgtgcattgcagagggatttataaaggtgaatatttggaagaaataagagaatccacaatagagaccttgctaagtaaacggtggtgctcacgtatgatgggacattatggacacactaacagcactctttatgttggctgaaaatggcactgaaactgatgatagggtcatggttaaggaaagaatgcaagacccaaagtttatactgacaatcattgcagctatttgtaaggacagttttaatactaattccagcaatacatgtttttattccctgtcctggagtaggagaaagcctatattcccaggctgaatgttctacacatttaccactgtatatgcacatagggacagtgtaacctgtctataccaccgtagttccagtcctaactttctgaattctgtttaaagaccttct

SEQ ID NO: 12910 - DNA, 8484 bp, Homo sapiens
  source 1..8484: mol_type = unassigned DNA
aaataaagttttttcaatggaaggcttgcagctcttgaggacctgccaaatggaagaaggacagagacctggagccctatggaaagttctgacaccatgtgtggaaggacatggcttttaacacgtgtggtgactggagtagctgcagctgaggacagccaccctttcttcgtctctgctgagcgaaggctacacggcccttcctccttgcagctgtttcaccttctaccttgcgtggagccaggcttttgcaccgaatctgagatgccattttaaacagaagactccatcctcttgaagatgggaaattcttacgctggacagctgaagacgacacgctttgaagaggtcttgcacaattccatcgaggcatccctgcggtccaacaacctggtgcccaggcccatcttttcccagctgtacctggaagctgagcagcagcttgccgctctagaaggtggtagccgagtggacaatgaggaagaggaagaagagggagaaggagggctggaaacaaatggccccccaaaccctttccagctgcaccctctgcctgaaggatgctgtaccacagacgggttttgccaggccgggaaggacctgcgccttgtctccatttccaacgagcccatggatgtccctgcgggctttctcctcgtgggggtcaagtcccccagcctgccggaccatctcctggtgtgcgccgttgacaagaggttcttgccagatgacaatggccacaatgctcttcttggtttctctgggaattgtgttggctgtggaaagaaaggcttctgttacttcacggaattctccaatcatataaatctgaaactgaccactcaacccaagaagcagaaacacttgaagtattacctggtccgtaatgcacaagggactctaaccaaaggacctttaatctgttggaaaggctcagagtttagaagccggcagatccccgccagtacttgttccagttccctcttcccagccctggagagcacggctgccttccccagcgagcccgttcctgggacgaaccccagcatcctgatgggagctcagcaggcaggaccagcttctgatcacccctcactaaacgcagcaatgggtccggctgttttcaacggcaaagattccccgaagtgccaacaactggcaaagaataacctgttggccctgccgcgaccatcggctttaggtatcttgtcaaactccgggccccccaaaaaacgccacaaagggtggtctccagaatctccatcagctccagatggtggctgcccccaaggtggtgggaacagagctaagtatgagagcgcaggcatgtcctgcgtgccgcaggttggcttggtgggaccagcttcagtcacctttccagtggtggcctctggagaaccagtgtctgttcctgacaacttgctgaaaatatgcaaggccaagccagtgatatttaaaggccatgggaacttcccttacctctgtgggaacctgaatgacgtcgtggtcagccccctcttgtacacgtgctaccagaattcccagtctgtctcacgggcatacgagcagtacggcgcctctgccatccagcccatctccgaggagatgcagctcctgcttaccgtctactacctggtccagctggccgcggaccaggtgcccttgatggaggacctggagcagatcttcctgcgctcttggcgcgagtcgcacctgaccgagatccggcagtaccagcaggcgccgccgcagcccttcccgcccgcgcccagcgccgcggcacccgtgacctccgcgcagctgccctggctggccagcctggccgccagctcctgcaacgacagcgtgcacgtcatcgagtgtgcttactccctggccgagggcctctccgagatgttccggctgttggtcgagggcaagcttgccaagaccaactacgtggtcatcatctgcgcctgccgcagcgcggccatcgactcctgcatcgccgtcaccggaaaataccaagcccggattctttccgagagccttctcactcctgcggagtaccagaaggaagtcaattacgagctggttacggggaaggtagactcgctgggggccttctttagcaccctctgtccagagggtgacattgacattttgctggacaaatttcaccaggaaaatcaaggccatatttcttcctcactcgctgcctcttctgtcactaaagcagcatccctggatgtcagtgggacaccggtgtgcacaagttacaatctggagccacacagcatccggcccttccagctggcagtagcgcagaagctcctctcccatgtgtgttccattgcggattccagcacccaaaatctggacctgggatcctttgagaaggtggactttctcatttgcattcccccctcagaagtgacctaccagcagactctgctccatgtgtggcattcaggggttttgctggagcttggtctgaagaaagagcacatgacgaagcagagggtggaacagtatgttctgaagctagacacggaggcacagacaaaatttaaggcttttctgcaaaactccttccagaacccgcatacactttttgtcctaatccatgaccatgcgcactgggatcttgtgagtagcactgttcataacctctattctcaaagtgacccgtcggtgggattggtggaccgattgctcaactgcagggaggtgaaggaggcccccaacattgtgacacttcacgtgacctccttcccgtatgcactgcagacacagcacaccctcatcagcccctacaacgagatccactggcctgcctcctgcagtaatggagtggacttatatcatgaaaataagaagtacttcgggctgtcggagtttattgaatccaccctttcaggacacagcctccccttgctcagatacgatagctcctttgaggccatggtcactgcattaggaaaaaggttcccccgcctgcacagcgcggtgatcaggacctttgttctcgtgcagcactacgcggccgccctgatggccgtaagcggcctcccgcagatgaagaactacacgtcggtggagacgctggagatcacgcagaacctcctcaactccccgaagcagtgcccctgcggccacgggctcatggtcctgctgcgggtgccctgttcgcccctggcggtggtggcctatgagcggctggcccacgtgcgggcccggctggcgctggaggagcactttgagatcatcctgggcagtcccagctcaggcgtcaccgtggggaagcacttcgtaaagcagctcaggatgtggcagaaaattgaggatgtggagtggagaccccagacttacttggagctggagggtctgccttgcatcctgatcttcagtgggatggacccgcatggggagtccttgccgaggtctttgaggtactgtgacctgcgattgataaactcctcctgcttggtgagaacagccttggagcaggagctgggcctggctgcctactttgtgagcaacgaggttcccttggagaagggggctaggaacgaggccttggagagtgatgctgagaagctgagcagcacagacaacgaggatgaggagctggggacagaaggctctacctcggagaagagaagccccatgaaaagggagaggtcccgctcccacgactcagcatcctcatccctctcctccaaggcttccggttcagcgctcggtggcgagtcctcggctcagcccacagcactcccccagggagagcatgccaggtcgccccagccccgtggccccgcagaggagggcagagcccctggtgagaaacagaggccccgggcaagtcaggggccaccctcggccatcagcaggcacagtcccgggccgacgccccagcccgactgtagcctcaggaccggccagaggagcgtccaggtgtcggtcacctcgtcgtgctcccagctgtcctcctcctcgggctcatcctcctcatccgtggcgcccgctgccggcacgtgggtcctgcaggcctcccagtgctccttgaccaaggcctgccgccagccacccattgtcttcttgcccaagctcgtgtacgacatggttgtgtccactgacagcagtggcctgcccaaggccgcctccctcctgccctccccctcggtcatgtgggccagctctttccgccccctgctcagcaagaccatgacatccaccgagcagtccctctactaccggcagtggacggtgccccggcccagccacatggactacggcaaccgggccgagggccgcgtggacggcttccacccccgcaggctgctgctcagcggcccccctcagatcgggaagacaggtgcctacctgcagttcctcagtgtcctgtccaggatgcttgttcggctcacagaagtggatgtctatgacgaggaggagatcaatatcaacctcagagaagaatctgactggcattatctccagcttagcgacccctggccagacctggagctgttcaagaagttgccctttgactacatcattcacgacccgaagtatgaagatgccagcctgatttgttcgcactatcagggtataaagagtgaagacagagggatgtcccggaagccggaggacctttatgtgcggcgtcagacggcacggatgagactgtccaagtacgcagcgtacaacacttaccaccactgtgagcagtgccaccagtacatgggcttccacccccgctaccagctgtatgagtccaccctgcacgcctttgccttctcttactccatgctaggagaggagatccagctgcacttcatcatccccaagtccaaggagcaccactttgtcttcagccaacctggaggccagctggagagcatgcgactacccctcgtgacagacaagagccatgaatatataaaaagtccgacattcactccaaccaccggccgtcacgaacatgggctctttaatctgtaccacgcaatggacggtgccagccatttgcacgtgctggttgtcaaggaatacgagatggcaatttataagaaatattggcccaaccacatcatgctggtgctccccagtatcttcaacagtgctggagttggtgctgctcatttcctcatcaaggagctgtcctaccataacctggagctcgagcggaaccggcaggaggagctgggaatcaagccgcaggacatctggcctttcattgtgatctctgatgactcctgcgtgatgtggaacgtggtggatgtcaactctgctggggagagaagcagggagttctcctggtcggaaaggaacgtgtctttgaagcacatcatgcagcacatcgaggcggcccccgacatcatgcactacgccctgctgggcctgcggaagtggtccagcaagacccgggccagcgaggtgcaagagcccttctcccgctgccacgtgcacaacttcatcatcctgaacgtggacctgacccagaacgtgcagtacaaccagaaccggttcctgtgtgacgatgtagacttcaacctgcgggtgcacagcgccggcctcctgctctgccggttcaaccgcttcagcgtgatgaagaagcagatcgtggtgggcggccacaggtccttccacatcacatccaaggtgtctgataactctgccgcggtcgtgccggcccagtacatctgtgccccggacagcaagcacacgttcctcgcagcgcccgcccagctcctgctggagaagttcctgcagcaccacagccacctcttcttcccgctgtccctgaagaaccatgaccacccagtgctgtctgtcgactgttacctgaacctgggatctcagatttctgtttgctatgtgagctccaggccccactctttaaacatcagctgctcggacttgctgttcagtgggctgctgctgtacctctgtgactcttttgtgggagctagctttttgaaaaagtttcattttctgaaaggtgcgacgttgtgtgtcatctgtcaggaccggagctcactgcgccagacggtcgtccgcctggagctcgaggacgagtggcagttccggctgcgcgatgagttccagaccgccaatgccagggaagaccggccgctcttttttctgacgggacgacacatctgaggaagacagcggcgagttttctgaagagatgagtgctcagagccctcatgctgttgaggctaaagggaggcctggaacggtggggcgtttgactggaatggaccccagggactgtccaggtgcagcccctcctagtacacatgggcccccgaggccgtggtcctgggagccaggaagactccgcagtgggtgagaatgaaaacttgagactcccaagttctgggccagcccattgctctgggctgttttaaagcccatttcacgaggaacaaagatttacttcctgtcctgccattcgtgtgcttccatggacaaacctgatttttttctcttagttctaaagaatcttgggttattttgtagcggtgccagtatttcagtagatgggatttcagccaagtaggttcccctgtaacctcctacaaagcaatattccaaaggaacattttaactgtaaaggctggagacaagaaaaaataagtagatcgttttaataacaattatttaattgcctataagtttgctgtttcagaggctagcccaaaggcatcaaatttaataaagttaaacaaattgatttacttcagagcaaatatgatcctattaaaataatatagggtaaataccctacctcttagaaagggcaaaaatgcaaagaagctttctttaaaactaaaagggttttttggggggggagttggcggggaggaaataaggctaacagaggttgacctaaaattagccttacaaaggagaaaggaccacattgcttacttgaaacagacaatgaaaacaaccaaagtgatatataaaatagttgatgagaactagacttatgactgtagtttactagagtttagttttcagttgctgaagtagctcattttctcttactaatgtttggttcctcagggaagaatctcacttgactagagaggaggtgggaacagaagagagaaggaggcagggagatgtatttcttagggctcaccccttcacagactgacagaatggttttgttttgttttgttttgttttgttttgtttttgagatggactctagctctgtcacccaggctggagtgcagtggtgcgatctcggctcactgcaagctccgcctcccgggttctcaccattctcctgcctcagcctcccgagtagctgggactacaggcgcccaccaccacgcccggctaattttttgtattttttagtagagacggggtttcaccatgttagccaggatggtctcgatctcctgacctcgtgatccgcccgcctcggcctcccaaagtgctgggattacaggcgtgagccaccgtgcctgccccagaatggtttttaaagccacagttgagaggccacccattgcccggcgcctggacagtgatcatcttgttcatcttgttcagtcctttcttgtgtgattggaattattcatcccctttgaaagatgagaaggttgagatgcaaagagtctacctttccaagttctcactgctggaaagagctagaagcacagttcaaagttctggcttctggactctgcagtccaggtctcccttctcccacttgcctaccctcaatgccacactgtttttgaagtggcccataacttgaaggaaaagtttaaagacagttcaatttaatcatcagaatgcattcttttttttttcggagacggagtttcactcttgctgcccaggctggagtgcaatggtgcaatgacctcggctcactgcaacctctgcctcctgggttcaagtgattctccagcctcagcctcccgagtagctgggattatgggcgcccaccaccatgcccagctaatttttgtattttttttttttagtagagatggggtttcgccaggttggccaggctggtcttgtgaactcctggcctcaggtgatctgcccacctcatcctccaaaagtgctgggattacaggcatgagccactgcgcctggcctcagaatgcattcttacacatctatcctagacatttataagcactctaatggataacaatccaagaataaatgattgtaaaagatgatgccgaagagttgatgtcaatctttttttcctaagaaaaaaagtccgcgagtattaaatatttagatcaatgtttataaaatgattactttgtatatctcattattcctattttggaataaaaactgaccttctttaatcatatacttgtcttttgtaaatagcagcttttgtgtcattctccccactttattagttaatttaaattggaaaaaaccctcaaactaatattcttgtctgttccagtcttataaataaaacttataatgcatgta

SEQ ID NO: 12911 - DNA, 1933 bp, Homo sapiens
  source 1..1933: mol_type = unassigned DNA
ccggctggcatcccccagccgccgccagccccgccgaggggagccagcgccgtctctgaggggcgtccggcgccggagccatgaccctccgccgactcaggaagctgcagcagaaggaggaggcggcggccaccccggaccccgccgcccggactcccgactcggaagtcgcgcccgccgctccggtcccgaccccgggaccccctgccgcagccgccacccctgggcccccagcggacgagctgtacgcggcgctggaggactatcaccctgccgagctgtaccgcgcgctcgccgtgtccgggggcaccctgccccgccgaaagggctcaggattccgctggaagaatctcagccagagtcctgaacagcagcggaaagtgctgacgttggagaaggaggataaccagaccttcggctttgagatccagacttatggccttcaccaccgggaggagcagcgtgtggaaatggtgacctttgtctgccgagttcatgagtctagccctgcccagctggctgggctcacaccaggggacaccatcgccagcgtcaatggcctgaatgtggaaggcatccggcatcgagagattgtggacatcattaaggcgtcaggcaatgttctcagactggaaactctatatgggacatcaattcggaaggcagaactggaggctcgtctgcagtacctgaagcaaaccctgtatgagaagtggggagagtacaggtccctaatggtgcaggagcagcggctggtgcatggcctggtggtgaaggaccccagcatctacgacacgctggagtcggtgcgctcctgcctctacggcgcgggcctgctcccgggctcgctgcccttcgggcctctgctcgccgtgcccgggcgtccccgcggaggcgcccgacgggccaggggcgacgccgacgacgccgtctaccacacgtgcttcttcggggactccgagccgccggcgctgccgcccccgccgcccccggcccgcgccttcggcccgggccccgccgagacccctgccgtggggccgggccctgggccgcgggccgcgctgagccgcagcgccagtgtgcggtgcgcgggccctggcgggggcggaggcgggggcgcgccgggcgcgctctggactgaggctcgcgagcaggccctatgcggccccggcctgcgcaaaaccaagtaccgcagcttccgccggcggctgctcaagttcatccccggactcaaccgctccctggaggaggaggagagccagctgtaggggcgggggcgggcagggaggtatttatttatttattcgcaacagccagcgctaaaagagggggaggccgagccaagaggaccccaggagcccagagcagcgggagagggtccttcctagcctcggcccgccgggtcggttcctggctggtgtctgctgagggagtggggggcccagccccttctcttctcccccgccaaaccacagtgggagctggggcagggggagagccaggcaatcgggggccaaagatgggggtgctcgcctacagtctgcatctgtagtgccttgtggggtatccaggaacaccctcccagcaggggatgggaaccctgtcccatgaagccctctcctcagctttacttgctcccccgcccttagccttggggagaaatggcccgtggtgggctgaccccccaccctccacacacacagttccatgacccagcgggcccccaggggcatcaggtgctggtcctcctccctcctggcctcgacccctaagggcttcgcccctcccaggggcctgtaactaagtcgggtcctgccaggcagggggcctgtgttctgtgccccttgggagacaggaactggcgagttcaggtggggtggggacagcacagactgttccaccgttgtgcatattgttgcttctgaaccacaaa

SEQ ID NO: 12912 - DNA, 1424 bp, Homo sapiens
  source 1..1424: mol_type = unassigned DNA
atgaccttactcccaagcaaagggggggacaccatcgccagcgtcaatggcctgaatgtggaaggcatccggcatcgagagattgtggacatcattaaggcgtcaggcaatgttctcagactggaaactctatatgggacatcaattcggaaggcagaactggaggctcgtctgcagtacctgaagcaaaccctgtatgagaagtggggagagtacaggtccctaatggtgcaggagcagcggctggtgcatggcctggtggtgaaggaccccagcatctacgacacgctggagtcggtgcgctcctgcctctacggcgcgggcctgctcccgggctcgctgcccttcgggcctctgctcgccgtgcccgggcgtccccgcggaggcgcccgacgggccaggggcgacgccgacgacgccgtctaccacacgtgcttcttcggggactccgagccgccggcgctgccgcccccgccgcccccggcccgcgccttcggcccgggccccgccgagacccctgccgtggggccgggccctgggccgcgggccgcgctgagccgcagcgccagtgtgcggtgcgcgggccctggcgggggcggaggcgggggcgcgccgggcgcgctctggactgaggctcgcgagcaggccctatgcggccccggcctgcgcaaaaccaagtaccgcagcttccgccggcggctgctcaagttcatccccggactcaaccgctccctggaggaggaggagagccagctgtaggggcgggggcgggcagggaggtatttatttatttattcgcaacagccagcgctaaaagagggggaggccgagccaagaggaccccaggagcccagagcagcgggagagggtccttcctagcctcggcccgccgggtcggttcctggctggtgtctgctgagggagtggggggcccagccccttctcttctcccccgccaaaccacagtgggagctggggcagggggagagccaggcaatcgggggccaaagatgggggtgctcgcctacagtctgcatctgtagtgccttgtggggtatccaggaacaccctcccagcaggggatgggaaccctgtcccatgaagccctctcctcagctttacttgctcccccgcccttagccttggggagaaatggcccgtggtgggctgaccccccaccctccacacacacagttccatgacccagcgggcccccaggggcatcaggtgctggtcctcctccctcctggcctcgacccctaagggcttcgcccctcccaggggcctgtaactaagtcgggtcctgccaggcagggggcctgtgttctgtgccccttgggagacaggaactggcgagttcaggtggggtggggacagcacagactgttccaccgttgtgcatattgttgcttctgaaccacaaa

SEQ ID NO: 12913 - DNA, 1688 bp, Homo sapiens
  source 1..1688: mol_type = unassigned DNA
gaggctccaggctgtggctgaatttcgggccttagctagtcagaaagtgctgacgttggagaaggaggataaccagaccttcggctttgagatccagacttatggccttcaccaccgggaggagcagcgtgtggaaatggtgacctttgtctgccgagttcatgagtctagccctgcccagctggctgggctcacaccaggtggggcctgagcccaggacacccaggtctgggaaggggatatgaccttactcccaagcaaagggggggacaccatcgccagcgtcaatggcctgaatgtggaaggcatccggcatcgagagattgtggacatcattaaggcgtcaggcaatgttctcagactggaaactctatatgggacatcaattcggaaggcagaactggaggctcgtctgcagtacctgaagcaaaccctgtatgagaagtggggagagtacaggtccctaatggtgcaggagcagcggctggtgcatggcctggtggtgaaggaccccagcatctacgacacgctggagtcggtgcgctcctgcctctacggcgcgggcctgctcccgggctcgctgcccttcgggcctctgctcgccgtgcccgggcgtccccgcggaggcgcccgacgggccaggggcgacgccgacgacgccgtctaccacacgtgcttcttcggggactccgagccgccggcgctgccgcccccgccgcccccggcccgcgccttcggcccgggccccgccgagacccctgccgtggggccgggccctgggccgcgggccgcgctgagccgcagcgccagtgtgcggtgcgcgggccctggcgggggcggaggcgggggcgcgccgggcgcgctctggactgaggctcgcgagcaggccctatgcggccccggcctgcgcaaaaccaagtaccgcagcttccgccggcggctgctcaagttcatccccggactcaaccgctccctggaggaggaggagagccagctgtaggggcgggggcgggcagggaggtatttatttatttattcgcaacagccagcgctaaaagagggggaggccgagccaagaggaccccaggagcccagagcagcgggagagggtccttcctagcctcggcccgccgggtcggttcctggctggtgtctgctgagggagtggggggcccagccccttctcttctcccccgccaaaccacagtgggagctggggcagggggagagccaggcaatcgggggccaaagatgggggtgctcgcctacagtctgcatctgtagtgccttgtggggtatccaggaacaccctcccagcaggggatgggaaccctgtcccatgaagccctctcctcagctttacttgctcccccgcccttagccttggggagaaatggcccgtggtgggctgaccccccaccctccacacacacagttccatgacccagcgggcccccaggggcatcaggtgctggtcctcctccctcctggcctcgacccctaagggcttcgcccctcccaggggcctgtaactaagtcgggtcctgccaggcagggggcctgtgttctgtgccccttgggagacaggaactggcgagttcaggtggggtggggacagcacagactgttccaccgttgtgcatattgttgcttctgaaccacaaactgtataaatggatggttttttg

SEQ ID NO: 12914 - DNA, 2775 bp, Homo sapiens
  source 1..2775: mol_type = unassigned DNA
aagatgctcttccgtgacccacaattattggtgactattgcctgtccataacaggaaaagcgattacggattggctgaggcgaagtagtagggcagaaaagtgggtatagctgcctgcacgcacgcttggtgcgtgcgcggcgactgcgacgggcagtggcagtcatggcggctcagtgcgtgaggttggcgcggcgcagtcttcctgctttggcgttgtctctcaggccatctccccggttgttgtgcacagccacgaaacaaaagaacagtggccagaacctggaagaggacatgggtcagagtgaacagaaggcagatcctcctgctacagagaagaccctcctggaagagaaggtcaagttggaggaacagctgaaggagactgtggaaaaatataaacgagctttggcagacactgagaacttacggcagaggagccagaaattggtggaggaggcaaaattatacggcattcaagccttctgcaaggacttgttggaggtggcagacgttctggagaaggcaacacagtgtgttccaaaagaagaaattaaagacgataaccctcacctgaagaacctctatgaggggctggtcatgactgaagtccagatccagaaggtgttcacaaagcatggcttgctcaagttgaaccctgtcggagccaagttcgacccttatgaacatgaggccttgttccacacaccggttgaggggaaggagccaggcacagtggccctagttagcaaagtggggtacaagctgcatgggcgcactctgagacccgccctggtgggggtggtgaaggaagcttagctgctgttgatggggtgggtgtttttaaactcacttgatgtaactctcaaggctggttcattgtttctcatctatgagtacgtgtgaccttttcccaaaccttattggaaaccttaagtaaccagtggctaaacagaaaagccggttgcccaactgcattaatgaactctaattcgggagtctgttcccttttagtgccacgcgttgaatagttccacatactttcagaagagctcagcagggccctgcctggtctcccgagcatcatgagtaacgtgtctgctcagactctgctgacaccaaagtattttaaacaaataaaaggtcttggggaattctgtttggctacctgggcacgccagtctgcaccatgtgtccctgcggcgcatgagtgactggcgtatttagcccgtcacatttcattcgctgaaggaaaggcaagagagttgaaacatttttcttacttaaaaaaaatgatctttgtgaagaacatagtgagttcgtttgtcttcagtcaacagcggctgaaactgaccactgagaaatgggtgtgggcactgacagttctcccccattatttggccaggaattgagcttggcttggcaaagttccttttaccctgttctgttcatctaaatgcagacatatttaaatcatattcaactagttactaatgacctcaagttgtattccctggcaaaatggactttctcaaaataggactgcacgcttggtgtactttaaatgttaatgtttaatttaaaatttttatttaagaggattaaagccctaatgtttattttcctactttctgaaaacaattttgtgtcctctcatggagatccttgccgctgaggcaagcatggcttagccttcccattctctactccagcccagaagctgtcagcttgacacgtgcgtgcgtgcacattcacgtacacacatatacaggcttctacacagaaagggagagccacactcccccagtgcagctgcagcccgtccggtaagaatacgaaacacccaggagccacagcaagggcacaggatttgcaaaatcatcttgccaaagggctgttcctcatttacacggtcatccagggcttagaaaaaggctgaatgattggcgtctgttacaaaaaagagaaaagaacctttcgctgcctttgcttctagaatggaagatacttgtgaaagccatttgctgcacaggaaagatggggcagtttatttcacttctaattttaaaagacgcaagtaatggtcccataatacttcatcttgggataccattcccaaacatgttccacctttaagatgccttaagttaatttggtcagaaacaactaaaggcagcatcgtgtattgaagaaaacatgactgggagctccagcgctgcctgttttcacgctgtggggttgtgagtgcatcatcacccctggagctcccgagttaaatggaggctaagaaaagtaatttatcaactcatttctgtgaatgtttgcagtctcctaccgtctcaactacagctgcagttgctaaaaagcacttaactcgtaacctagaggcaatatagcttaagtagcaaaatatttttttacagtaagcttcagtcatccatagtcactataagttggttatcatctgaaatgcttagaaccagaattgtttcaaacttggggggttttcggattttggaatatagtcaagcatggcttaaccacagggatgtgttctgagaaatgcgctgtcaggcagtttttcctgtgaacaccatgtgtacctacatggacctaaaaaacaggtggtggagcctcctccacacctaggctatatggtgtatgtagcctgttgctctagactggagggcacgttactgtactgatactgtaggcaactgttaacacaatggtatctgtgtatctgaacataacatagtaaaggtacagtgcaaa

SEQ ID NO: 12915 - DNA, 1293 bp, Homo sapiens
  source 1..1293: mol_type = unassigned DNA
gtgcgcggcgactgcgacgggcagtggcagtcatggcggctcagtgcgtgaggttggcgcggcgcagtcttcctgctttggcgttgtctctcaggccatctccccggttgttgtgcacagccacgaaacaaaagaacagtggccagaacctggaagaggacatgggtcagagtgaacagctgaaggagactgtggaaaaatataaacgagctttggcagacactgagaacttacggcagaggagccagaaattggtggaggaggcaaaattatacggcattcaagccttctgcaaggacttgttggaggtggcagacgttctggagaaggcaacacagtgtgttccaaaagaagaaattaaagacgataaccctcacctgaagaacctctatgaggggctggtcatgactgaagtccagatccagaaggtgttcacaaagcatggcttgctcaagttgaaccctgtcggagccaagttcgacccttatgaacatgaggccttgttccacacaccggttgaggggaaggagccaggcacagtggccctagttagcaaagtggggtacaagctgcatgggcgcactctgagacccgccctggtgggggtggtgaaggaagcttagctgctgttgatggggtgggtgtttttaaactcacttgatgtaactctcaaggctggttcattgtttctcatctatgagtacgtgtgaccttttcccaaaccttattggaaaccttaagtaaccagtggctaaacagaaaagccggttgcccaactgcattaatgaactctaattcgggagtctgttcccttttagtgccacgcgttgaatagttccacatactttcagaagagctcagcagggccctgcctggtctcccgagcatcatgagtaacgtgtctgctcagactctgctgacaccaaagtattttaaacaaataaaaggtcttggggaattctgtttggctacctgggcacgccagtctgcaccatgtgtccctgcggcgcatgagtgactggcgtatttagcccgtcacatttcattcgctgaaggaaaggcaagagagttgaaacatttttcttacttaaaaaaaatgatctttgtgaagaacatagtgagttcgtttgtcttcagtcaacagcggctgaaactgaccactgagaaatgggtgtgggcactgacagttctcccccattatttggccaggaattgagcttggcttggcaaagttccttttaccctgttctgttcatctaaatgcagacatatttaaatcatattcaactagtt

SEQ ID NO: 12916 - DNA, 3430 bp, Homo sapiens
  source 1..3430: mol_type = unassigned DNA
taaatggcagccaatggagggtggtgttgcgcggggctgggattagggccggggcgaatggctggcaatcttactgggattacagaacaaagagcctccccgcgctcccgctctccgctcctctccccgcgccgccccgccctccgccgcagcccgcgccgggggtgggggccgccgagcgccagccccccggccggccgattccccccccgcgccccctccccgcgcctccctccccgccctcgccgcgccgccgtcctcgcctccctctgcctctccttcccccattctcccggattaattaaggaggcagcggcaggaggctgagtcctggccgcgggccggggccggggcgccgctggcaggagcgcttggggatcctccaaggcgaccatggccttgctgggtaagcgctgtgacgtccccaccaacggctgcggacccgaccgctggaactccgcgttcacccgcaaagacgagatcatcaccagcctcgtgtctgccttagactccatgtgctcagcgctgtccaaactgaacgccgaggtggcctgtgtcgccgtgcacgatgagagcgcctttgtggtgggcacagagaaggggagaatgttcctgaatgcccggaaggagctacagtcagacttcctcaggttctgccgagggcccccgtggaaggatccggaggcagagcaccccaagaaggtgcagcggggcgagggtggaggccgtagcctccctcggtcctccctggaacatggctcagatgtgtaccttctgcggaagatggtagaggaggtgtttgatgttctttatagcgaggccctgggaagggccagtgtggtgccactgccctatgagaggctgctcagggagccagggctgctggccgtgcaggggctgcccgaaggcctggccttccgaaggccagccgagtatgaccccaaggccctcatggccatcctggaacacagccaccgcatccgcttcaagctcaagaggccacttgaggatggcgggcgggactcgaaggccctggtggagctgaacggtgtctccctgattcccaaggggtcacgggactgtggcctgcatggccaggcccccaaggtgccaccccaggacctgcccccaaccgccacctcctcctccatggccagcttcctgtacagcacggcgctccccaaccacgccatccgagagctcaagcaggaagcaccttcctgcccccttgcccccagcgacctgggcctgagtcggcccatgccagagcccaaggccaccggtgcccaagacttctccgactgttgtggacagaagcccactgggcctggtgggcctctcatccagaacgtccatgcctccaagcgcattctcttctccatcgtccatgacaagtcagagaagtgggacgccttcataaaggaaaccgaggacatcaacacgctccgggagtgtgtgcagatcctgtttaacagcagatatgcggaagccctgggcctggaccacatggtccccgtgccctaccggaagattgcctgtgacccggaggctgtggagatcgtgggcatcccggacaagatccccttcaagcgcccctgcacttatggagtccccaagctgaagcggatcctggaggagcgccatagtatccacttcatcattaagaggatgtttgatgagcgaattttcacagggaacaagtttaccaaagacaccacgaagctggagccagccagcccgccagaggacacctctgcagaggtctctagggccaccgtccttgaccttgctgggaatgctcggtcagacaagggcagcatgtctgaagactgtgggccaggaacctccggggagctgggcgggctgaggccgatcaaaattgagccagaggatctggacatcattcaggtcaccgtcccagacccctcgccaacctctgaggaaatgacagactcgatgcctgggcacctgccatcggaggattctggttatgggatggagatgctgacagacaaaggtctgagtgaggacgcgcggcccgaggagaggcccgtggaggacagccacggtgacgtgatccggcccctgcggaagcaggtggagctgctcttcaacacacgatacgccaaggccattggcatctcggagcccgtcaaggtgccgtactccaagtttctgatgcacccggaggagctgtttgtggtgggactgcctgaaggcatctccctccgcaggcccaactgcttcgggatcgccaagctccggaagattctggaggccagcaacagcatccagtttgtcatcaagaggcccgagctgctcactgagggagtcaaagagcccatcatggatagtcaaggaactgcctcctcacttggcttctctccccctgccctgcccccagagagggattccggggaccctctggtggacgagagcctgaagagacagggctttcaagaaaattatgacgcgaggctctcacggatcgacatcgccaacacactaagggagcaggtccaggaccttttcaataagaaatacggggaagccttgggcatcaagtacccggtccaggtcccctacaagcggatcaagagtaaccccggctccgtgatcatcgaggggctgcccccaggaatcccgttccgaaagccctgtaccttcggctcccagaacctggagaggattcttgctgtggctgacaagatcaagttcacagtcaccaggcctttccaaggactcatcccaaagcctgatgaagatgacgccaacagactcggggagaaggtgatcctgcgggagcaggtgaaggaactcttcaacgagaaatacggtgaggccctgggcctgaaccggccggtgctggtcccttataaactaatccgggacagcccagacgccgtggaggtcacgggtctgcctgatgacatccccttccggaaccccaacacgtacgacatccaccggctggagaagatcctgaaggcccgagagcatgtccgcatggtcatcattaaccagctccaaccctttgcagaaatctgcaatgatgccaaggtgccagccaaagacagcagcattcccaagcgcaagagaaagcgggtctcggaaggaaattccgtctcctcttcctcctcgtcttcctcttcctcgtcctctaacccggattcagtggcatcggccaaccagatctcactcgtgcaatggccaatgtacatggtggactatgccggcctgaacgtgcagctcccgggacctcttaattactagacctcagtactgaatcaggacctcactcagaaagactaaaggaaatgtaatttatgtacaaaatgtatattcggatatgtatcgatgccttttagtttttccaatgatttttacactatattcctgccaccaaggcctttttaaataagtaaaaaaa

SEQ ID NO: 12917 - DNA, 3077 bp, Homo sapiens
  source 1..3077: mol_type = unassigned DNA
gaggctgagtcctggccgcgggccggggccggggcgccgctggcaggagcgcttggggatcctccaaggcgaccatggccttgctgggtaagcgctgtgacgtccccaccaacggctgcggacccgaccgctggaactccgcgttcacccgcaaagacgagatcatcaccagcctcgtgtctgccttagactccatgtgctcagcgctgtccaaactgaacgccgaggtggcctgtgtcgccgtgcacgatgagagcgcctttgtggtgggcacagagaaggggagaatgttcctgaatgcccggaaggagctacagtcagacttcctcaggttctgccgagggcccccgtggaaggatccggaggcagagcaccccaagaaggtgcagcggggcgagggtggaggccgtagcctccctcggtcctccctggaacatggctcagatgtgtaccttctgcggaagatggtagaggaggtgtttgatgttctttatagcgaggccctgggaagggccagtgtggtgccactgccctatgagaggctgctcagggagccagggctgctggccgtgcaggggctgcccgaaggcctggccttccgaaggccagccgagtatgaccccaaggccctcatggccatcctggaacacagccaccgcatccgcttcaagctcaagaggccacttgaggatggcgggcgggactcgaaggccctggtggagctgaacggtgtctccctgattcccaaggggtcacgggactgtggcctgcatggccaggcccccaaggtgccaccccaggacctgcccccaaccgccacctcctcctccatggccagcttcctgtacagcacggcgctccccaaccacgccatccgagagctcaagcaggaagcaccttcctgcccccttgcccccagcgacctgggcctgagtcggcccatgccagagcccaaggccaccggtgcccaagacttctccgactgttgtggacagaagcccactgggcctggtgggcctctcatccagaacgtccatgcctccaagcgcattctcttctccatcgtccatgacaagtcagagaagtgggacgccttcataaaggaaaccgaggacatcaacacgctccgggagtgtgtgcagatcctgtttaacagcagatatgcggaagccctgggcctggaccacatggtccccgtgccctaccggaagattgcctgtgacccggaggctgtggagatcgtgggcatcccggacaagatccccttcaagcgcccctgcacttatggagtccccaagctgaagcggatcctggaggagcgccatagtatccacttcatcattaagaggatgtttgatgagcgaattttcacagggaacaagtttaccaaagacaccacgaagctggagccagccagcccgccagaggacacctctgcagaggtctctagggccaccgtccttgaccttgctgggaatgctcggtcagacaagggcagcatgtctgaagactgtgggccaggaacctccggggagctgggcgggctgaggccgatcaaaattgagccagaggatctggacatcattcaggtcaccgtcccagacccctcgccaacctctgaggaaatgacagactcgatgcctgggcacctgccatcggaggattctggttatgggatggagatgctgacagacaaaggtctgagtgaggacgcgcggcccgaggagaggcccgtggaggacagccacggtgacgtgatccggcccctgcggaagcaggtggagctgctcttcaacacacgatacgccaaggccattggcatctcggagcccgtcaaggtgccgtactccaagtttctgatgcacccggaggagctgtttgtggtgggactgcctgaaggcatctccctccgcaggcccaactgcttcgggatcgccaagctccggaagattctggaggccagcaacagcatccagtttgtcatcaagaggcccgagctgctcactgagggagtcaaagagcccatcatggatagtcaagagagggattccggggaccctctggtggacgagagcctgaagagacagggctttcaagaaaattatgacgcgaggctctcacggatcgacatcgccaacacactaagggagcaggtccaggaccttttcaataagaaatacggggaagccttgggcatcaagtacccggtccaggtcccctacaagcggatcaagagtaaccccggctccgtgatcatcgaggggctgcccccaggaatcccgttccgaaagccctgtaccttcggctcccagaacctggagaggattcttgctgtggctgacaagatcaagttcacagtcaccaggcctttccaaggactcatcccaaagcctgatgaagatgacgccaacagactcggggagaaggtgatcctgcgggagcaggtgaaggaactcttcaacgagaaatacggtgaggccctgggcctgaaccggccggtgctggtcccttataaactaatccgggacagcccagacgccgtggaggtcacgggtctgcctgatgacatccccttccggaaccccaacacgtacgacatccaccggctggagaagatcctgaaggcccgagagcatgtccgcatggtcatcattaaccagctccaaccctttgcagaaatctgcaatgatgccaaggtgccagccaaagacagcagcattcccaagcgcaagagaaagcgggtctcggaaggaaattccgtctcctcttcctcctcgtcttcctcttcctcgtcctctaacccggattcagtggcatcggccaaccagatctcactcgtgcaatggccaatgtacatggtggactatgccggcctgaacgtgcagctcccgggacctcttaattactagacctcagtactgaatcaggacctcactcagaaagactaaaggaaatgtaatttatgtacaaaatgtatattcggatatgtatcgatgccttttagtttttccaatgatttttacactatattcctgccaccaaggcctttttaaataagtaaaaaaagaaaaaaaaaa

SEQ ID NO: 12918 - DNA, 3315 bp, Homo sapiens
  source 1..3315: mol_type = unassigned DNA
gccagccccccggccggccgattccccccccgcgccccctccccgcgcctccctccccgccctcgccgcgccgccgtcctcgcctccctctgcctctccttcccccattctcccggattaattaaggaggcagcggcaggaggctgagtcctggccgcgggccggggccggggcgccgctggcaggagcgcttggggatcctccaaggcgaccatggccttgctgggtaagcgctgtgacgtccccaccaacggctgcggacccgaccgctggaactccgcgttcacccgcaaagacgagatcatcaccagcctcgtgtctgccttagactccatgtgctcagcgctgtccaaactgaacgccgaggtggcctgtgtcgccgtgcacgatgagagcgcctttgtggtgggcacagagaaggggagaatgttcctgaatgcccggaaggagctacagtcagacttcctcaggttctgcctctccgcagctcagcacagggcagcgacatcccagctcgaaggccgggtggtgagacgggtgctcactgtggcctcgcgtgctctgtgtcccacaggagggcccccgtggaaggatccggaggcagagcaccccaagaaggtgcagcggggcgagggtggaggccgtagcctccctcggtcctccctggaacatggctcagatgtgtaccttctgcggaagatggtagaggaggtgtttgatgttctttatagcgaggccctgggaagggccagtgtggtgccactgccctatgagaggctgctcagggagccagggctgctggccgtgcaggggctgcccgaaggcctggccttccgaaggccagccgagtatgaccccaaggccctcatggccatcctggaacacagccaccgcatccgcttcaagctcaagaggccacttgaggatggcgggcgggactcgaaggccctggtggagctgaacggtgtctccctgattcccaaggggtcacgggactgtggcctgcatggccaggcccccaaggtgccaccccaggacctgcccccaaccgccacctcctcctccatggccagcttcctgtacagcacggcgctccccaaccacgccatccgagagctcaagcaggaagcaccttcctgcccccttgcccccagcgacctgggcctgagtcggcccatgccagagcccaaggccaccggtgcccaagacttctccgactgttgtggacagaagcccactgggcctggtgggcctctcatccagaacgtccatgcctccaagcgcattctcttctccatcgtccatgacaagtcagagaagtgggacgccttcataaaggaaaccgaggacatcaacacgctccgggagtgtgtgcagatcctgtttaacagcagatatgcggaagccctgggcctggaccacatggtccccgtgccctaccggaagattgcctgtgacccggaggctgtggagatcgtgggcatcccggacaagatccccttcaagcgcccctgcacttatggagtccccaagctgaagcggatcctggaggagcgccatagtatccacttcatcattaagaggatgtttgatgagcgaattttcacagggaacaagtttaccaaagacaccacgaagctggagccagccagcccgccagaggacacctctgcagaggtctctagggccaccgtccttgaccttgctgggaatgctcggtcagacaagggcagcatgtctgaagactgtgggccaggaacctccggggagctgggcgggctgaggccgatcaaaattgagccagaggatctggacatcattcaggtcaccgtcccagacccctcgccaacctctgaggaaatgacagactcgatgcctgggcacctgccatcggaggattctggttatgggatggagatgctgacagacaaaggtctgagtgaggacgcgcggcccgaggagaggcccgtggaggacagccacggtgacgtgatccggcccctgcggaagcaggtggagctgctcttcaacacacgatacgccaaggccattggcatctcggagcccgtcaaggtgccgtactccaagtttctgatgcacccggaggagctgtttgtggtgggactgcctgaaggcatctccctccgcaggcccaactgcttcgggatcgccaagctccggaagattctggaggccagcaacagcatccagtttgtcatcaagaggcccgagctgctcactgagggagtcaaagagcccatcatggatagtcaagagagggattccggggaccctctggtggacgagagcctgaagagacagggctttcaagaaaattatgacgcgaggctctcacggatcgacatcgccaacacactaagggagcaggtccaggaccttttcaataagaaatacggggaagccttgggcatcaagtacccggtccaggtcccctacaagcggatcaagagtaaccccggctccgtgatcatcgaggggctgcccccaggaatcccgttccgaaagccctgtaccttcggctcccagaacctggagaggattcttgctgtggctgacaagatcaagttcacagtcaccaggcctttccaaggactcatcccaaagcctgatgaagatgacgccaacagactcggggagaaggtgatcctgcgggagcaggtgaaggaactcttcaacgagaaatacggtgaggccctgggcctgaaccggccggtgctggtcccttataaactaatccgggacagcccagacgccgtggaggtcacgggtctgcctgatgacatccccttccggaaccccaacacgtacgacatccaccggctggagaagatcctgaaggcccgagagcatgtccgcatggtcatcattaaccagctccaaccctttgcagaaatctgcaatgatgccaaggtgccagccaaagacagcagcattcccaagcgcaagagaaagcgggtctcggaaggaaattccgtctcctcttcctcctcgtcttcctcttcctcgtcctctaacccggattcagtggcatcggccaaccagatctcactcgtgcaatggccaatgtacatggtggactatgccggcctgaacgtgcagctcccgggacctcttaattactagacctcagtactgaatcaggacctcactcagaaagactaaaggaaatgtaatttatgtacaaaatgtatattcggatatgtatcgatgccttttagtttttccaatgatttttacactatattcctgccaccaaggcctttttaaataagtaaaaaaagaaaaaaaaaaaaa

SEQ ID NO: 12919 - DNA, 5126 bp, Homo sapiens
  source 1..5126: mol_type = unassigned DNA
ttgggatttgggcctcattaattattcattaggtacttgaaagctctgcagggattggtggctgagaggcctagtcgactgtttcttagctagaggtacgtgtcacccagtacgcggctggagttttgcataaattattccgataaggagcggggcggggctctgtgcatagattagtcaaatgagcctgggagggagggaagccggctacgaattagcctaagttattaaagatggcgacggagcgcagtcgctccgcgatggactcgccggtcccggcctctatgttcgcccccgagcccagctccccgggggcggccagggccgcggcggccgccgcccgactccacggcggctttgactcggactgcagcgaggacggcgaggcgctcaacggcgagccagagctggacctcaccagcaagctggttctagtgagccctacatcagagcagtatgacagcctacttcggcagatgtgggagaggatggacgagggatgcggagagaccatatatgtcattgggcagggatcagatgggactgagtatgggctgagtgaagctgacatggaggcctcctacgccacagtgaagagcatggcggaacagatagaggccgatgtcatccttctgcgggaacggcaagaagctgggggccgcgtgcgtgattacctggtccggaaacgagtaggagacaatgacttcctggaggtcagggtagcagtggtgggcaacgtggatgctggcaaaagcacgcttctgggggtcctgacacatggggagctggacaatggccgaggctttgcccgccagaaactcttccgccacaaacatgaaattgaatctggtcgcaccagcagtgtgggcaacgacattctgggctttgacagtgaaggcaatgtagtgaacaagcctgacagccacggcggcagcctggagtggaccaagatctgtgagaagtccacgaaagtcattaccttcatcgacttggctggtcatgagaagtacctgaaaaccactgtcttcggcatgacaggccatctgcctgacttctgcatgctcatggtgggcagcaatgctggcatcgtggggatgaccaaagaacacctgggcttggcactggcactcaatgtacctgtctttgtggtagtcaccaagattgacatgtgtcctgccaacatcctgcaagaaaccctgaagctgttacagcgcctgctgaagtcaccaggctgccggaagatccccgtgctggtgcagagcaaagatgatgtgattgtcacagcctccaacttcagctctgaaaggatgtgcccgatattccagatctccaacgttacaggcgagaacctagatctgctgaagatgttcctcaacctcctctccccccgcaccagctacagggaggaggagcctgctgagtttcagattgatgacacctactccgtcccgggtgtggggacagtggtttcggggacaacactgagaggcctgatcaagctgaatgacacgctgctgctgggcccagaccccttgggtaacttcctgtccattgctgtcaaatccatccatcgcaagcgcatgcctgtcaaggaggtgcggggtggccagacagcatcctttgcgctgaagaagatcaagcgctcgtccatccggaagggcatggtgatggtttccccacgtttgaatccccaagcctcctgggagtttgaggccgagattctcgtcctccaccaccccaccacaattagcccgcgctaccaggccatggtgcactgtgggagcatcaggcagacagccaccattctgagcatggacaaggactgtctgcgcactggggacaaggccactgtacacttccgcttcatcaagacccctgagtacctgcacatagaccagcggctggtgttccgggaaggccgcaccaaggctgtcggcaccatcaccaagctcctccagaccaccaacaactccccaatgaactccaagccgcagcagattaaaatgcagtcgacgaaaaagggccccctgacgaaacgagacgaggggggcccgtctggtgggccagcagtaggagcacccccacctggagatgaagcctcctctgtaggggcagggcaaccagctgcgtccagcaatctccagcctcagcctaagcccagcagtggaggccggcgacgagggggccagcgccacaaggtgaagtcccagggggcctgtgtgactcctgccagcggctgctgaaccttcccctggcccaccctcaccacccaaggggtcatcatctctggccaccactccaccagatgggcagagcagctatgaccgccacccagccctcccgctcaggccacagccggagcctccgcattgcccccacccccattttccaggggggttgtaatttataagctgacgaaggtagccagacttccggaggactgaccatctctcactgtcctccccaccttcttcctcactcacacattttttgtacatctgggcccttagtttttattctgtttattatatgtctctgtctctctctattgtgtgtgtgtgtgtgtgtgtgtgtgtgtgtgtgtgtgtggtgcaggagtgccacccccagggccctgtcaacctctcttttctcctccatggctgtctgcctgcgtatctgtctctgagaatcctcggggcggtcaggggatgtcaggaggggaaggagccgccctccctatcttgctgctcctcttggcactcaggggcaccttccatggagccagaccgggtggaggggcttctgggatttggtgtctgctgctgccagagcaggaacccccagtctaggacttgggcattttaacagggagaaagtagtggcttcccttttctctctctcctcctttttccctttaagcccacagattcaggtcatgccaaaagctctctggttgtaacctggagacatgtggaggggaatggcgatgggattataggactctccccatctcgggccctgaccctgacccttgccaccaacccaaagacagctggtgggtttccccttggagacaatcctgcgtttgcctgggccggccctggctgccctcagctttcgctgatctgcccggcctggagcctcccatcaccccgcttcttgttgggcctcaggcactggttaccagaagggggtctgggtctgctcaggatcatgttttgtagcacctcctgttggaggggtggagggatgttcccctgagccaggctgagactagaaccccatcttccctgagccaggctgagactagaaccccatcttccccaccacgccacccctgtggctgctacaggagcacagtagtgaaggcctgagctccaggtttgaaagacccaactggagcgtggggcgggcaggcaggggttagtgaaaggacacttccagggttaggacagagcatttagccttctggaagaacccctgcctggggtgggactgtgcaggccagagaaggtggcatgggcctgaacccacctggactgacttctgcactgaagccacagatggagggtaggctggtgggtgggggtggttcgttctctagccggggcagacacccagctggctgggtccttcctcagccttgcctcctcctgtccccaaccctttcctttcctcctgcttgcggactgctggtcccctctccttccctccttccagctgtttctagttaccacctacccctggccgtggactgatcagaccagcattcaaaataaaagtttgttccaagttgacagtgtggtgctccctgcccagcccctccaggtggaggtgctgccacgggaacgcagttgctctgcctgccctggggcccctggcgacagctgggagcagggcagtgctgtgaggagcccagctttcccagtcaggcaggcatggcttccgtgttcaggctccctcaccagctggtgacacgggacaagcttacaaaccttctctgaacctcagttttctcatttacaagaggcaaagccatccatcaccttgtgtggattcagagaatgtgaggccctggggtgtcctacacaagggaaaggcttgctcagtgagcggtctgcacaccgttagccaccctgccacctctgtgccctgggcaggctccaaaggaaagctctggctgggactgccaggagtctcacacgctcctgttgacattcccagcagccgcccctgaggtcgatgtttgttctgtttttctttttcttttttgagacggagtctcgctgtgttgccaggctggagtgcagtggtgtgatctctgctcactgcaacctccgcctgccagtttcaagtgattctctgcctcagccttctgagtagctgggactacaggtgcacgccaccacgcccagctaactttttgtattttagtagagacagggtttcgccatgtcggccagggtggtcttgatctcctgacctcatgatccacccgcctcagcctcccaaagtgctgggattacaggtatgagccaccgcaccgggcctgttctatttttctagttaagggaactgaagctcagagaggtgtcaccagcaggtgttcattcccatgccagccttgccccccggcttttcccaggcaggctcctgcgtgcccactggctccagcctggtcctctgtctcttggctgcttcactcctgctctttgtcccgactctggccctgcttacaggggccactacctgctggtgcctccataacaagcgtctggcgttgagacccctggcatggcaggggctttggggtctggtttccacaaggcttagccatggcagaacctcgttttattttaactctttgcccctacaaacaaacagcagtacttgccagaaccattcttgggattcaggagctcgggcgactgccttggcctctggccgcacccaggagggtggggttggatctgtgtagttgccaggcccacacctgccagcagggggctgactggatccatgctttactgtgtttaatgggggtaacaggggtccctacagccctcccagctaaacatttggaacaaaacaccagcccttttgtagtggatgcagaataaaattgttaatccaatcacctccaa

SEQ ID NO: 12920 - DNA, 2045 bp, Homo sapiens
  source 1..2045: mol_type = unassigned DNA
gtttcctagaccagtgacaaagaaaggttttaacagcctgggcacagaggagacatagacttctgggaaaagcaggctgaagatggaaacattgaatataaattgaagctggtgaatccatcccagtaccgctttgagcacctggtgacacaaatgaagtggcggctccaggagggacgtggtgaggccgtctaccagattggggtagaggacaatgggctgctggtggggctggctgaggaggaaatgcgagcttcgctcaagaccctgcaccggatggcagagaaggttggggcagacataaccgttcttcgagagcgagaagtggattatgatagcgacatgccccggaagatcaccgaggtgctagtacgaaaggtccctgacaaccaacagttcctagacctccgtgtggccgtcctggggaatgtggactctgggaagtcaactctgcttggagtcctgacccagggagagctggacaatgggcggggccgggctcggctcaaccttttccgccacctgcatgagattcagtctggccgaacctccagcatcagcttcgagatcctgggctttaacagcaagggagaggtggtgaattacagcgactcacggacagcagaagagatctgtgagagcagctccaagatgatcaccttcatcgacctggcaggccaccataagtacctacacaccaccatctttggcctcacatcatactgccccgactgcgccctgctcctcgtcagtgccaacactgggattgctggcaccacaagggaacatctggggctggccctggccctgaaagtgcccttcttcatcgtggtcagcaagatcgacctatgtgccaagaccacagtggagaggacagtacgccagctggagcgggtcctcaagcagcctggctgccacaaggtccccatgctggtcacctctgaggatgatgccgtcactgctgcccagcagtttgctcagtcacccaatgtcacccccatcttcacattgtccagtgtgtctggagagagtctggacctcctcaaagtctttctgaatattctgccgccactcaccaacagcaaagagcaggaggaactcatgcagcagctgacggagttccaggtggatgaaatctacacagtaccagaggtggggactgttgttggaggaacactttccagtgggatttgccgtgagggggaccagctggtggtgggccccacggatgatggctgcttcctggagctgagagtatgcagcatccagcgcaaccgctctgcctgtcgtgtgctgcgagctggtcaggctgctacactggcgcttggggactttgaccgtgcactgcttcgcaagggcatggtgatggtgagcccggagatgaatcctaccatctgctcggtgtttgaggcagagatagtcttactgttccatgccaccaccttccgacgaggattccaggtgacagtacacgtgggcaacgtacgtcagacggcagtggtggaaaagatccatgccaaggacaaactgcggacaggcgagaaggcagtggtacgtttccgcttcctgaaacacccagagtacctgaaggtgggcgccaaactgctgttccgggagggtgtcaccaagggcatcggccatgtcactgatgtacaagccattacagcaggagaagcccaggccaacatgggcttctgaacccttcaggcagggacagttctattgctgtccctacaatatataaggtgacttctggccatgctgccctgccattggcggctctgtgtgttaataggctagggagagaggggtgctgtctgccacttgctccctgccaactttctggagaggtgccaaacttggtgtggccaggaaagggcagtcctgagggagaagacaggattcagggcagtgctccgaagctgtgtgctcacctggttggctcatcaaacctggcaaccctgtggcctgtctgccggagctgactggatccactcatcaattcttcgtccccactactaagactgggcatgttttgctggtgt

SEQ ID NO: 12921 - DNA, 2933 bp, Homo sapiens
  source 1..2933: mol_type = unassigned DNA
atggactcgcgggtatcggagctgttcggcggctgctgccggcccggagggggcccggccgtgggcggaaccctcaaggctaggggggccggcagcagcagcggctgcggggggccaaagggaaagaagaagaacggaaggaacagagggggcaaagccaacaaccccccgtatttgccccccgaggctgaagatggaaacattgaatataaattgaagctggtgaatccatcccagtaccgctttgagcacctggtgacacaaatgaagtggcggctccaggagggacgtggtgaggccgtctaccagattggggtagaggacaatgggctgctggtggggctggctgaggaggaaatgcgagcttcgctcaagaccctgcaccggatggcagagaaggttggggcagacataaccgttcttcgagagcgagaagtggattatgatagcgacatgccccggaagatcaccgaggtgctagtacgaaaggtccctgacaaccaacagttcctagacctccgtgtggccgtcctggggaatgtggactctgggaagtcaactctgcttggagtcctgacccagggagagctggacaatgggcggggccgggctcggctcaaccttttccgccacctgcatgagattcagtctggccgaacctccagcatcagcttcgagatcctgggctttaacagcaagggagaggtggtgaattacagcgactcacggacagcagaagagatctgtgagagcagctccaagatgatcaccttcatcgacctggcaggccaccataagtacctacacaccaccatctttggcctcacatcatactgccccgactgcgccctgctcctcgtcagtgccaacactgggattgctggcaccacaagggaacatctggggctggccctggccctgaaagtgcccttcttcatcgtggtcagcaagatcgacctatgtgccaagaccacagtggagaggacagtacgccagctggagcgggtcctcaagcagcctggctgccacaaggtccccatgctggtcacctctgaggatgatgccgtcactgctgcccagcagtttgctcagtcacccaatgtcacccccatcttcacattgtccagtgtgtctggagagagtctggacctcctcaaagtctttctgaatattctgccgccactcaccaacagcaaagagcaggaggaactcatgcagcagctgacggagttccaggtggatgaaatctacacagtaccagaggtggggactgttgttggaggaacactttccagtgggatttgccgtgagggggaccagctggtggtgggccccacggatgatggctgcttcctggagctgagagtatgcagcatccagcgcaaccgctctgcctgtcgtgtgctgcgagctggtcaggctgctacactggcgcttggggactttgaccgtgcactgcttcgcaagggcatggtgatggtgagcccggagatgaatcctaccatctgctcggtgtttgaggcagagatagtcttactgttccatgccaccaccttccgacgaggattccaggtgacagtacacgtgggcaacgtacgtcagacggcagtggtggaaaagatccatgccaaggacaaactgcggacaggcgagaaggcagtggtacgtttccgcttcctgaaacacccagagtacctgaaggtgggcgccaaactgctgttccgggagggtgtcaccaagggcatcggccatgtcactgatgtacaagccattacagcaggagaagcccaggccaacatgggcttctgaacccttcaggcagggacagttctattgctgtccctacaatatataaggtgacttctggccatgctgccctgccattggcggctctgtgtgttaataggctagggagagaggggtgctgtctgccacttgctccctgccaactttctggagaggtgccaaacttggtgtggccaggaaagggcagtcctgagggagaagacaggattcagggcagtgctccgaagctgtgtgctcacctggttggctcatcaaacctggcaaccctgtggcctgtctgccggagctgactggatccactcatcaattcttcgtccccactactaagactgggcatgttttgctggtgtggtctctgcacttcaggaatggtcacaacagggggtagccctcaaaagcactcctttttctatacctcttctcaaggccatgtaagttgcccatctctacctggctgtggacaaaaggttatctgctcttggccatctggtggtggtggcggcccagagtctgaagaaatggcacagggacagtgaatggtagtgttgccaccctgtgctgaggcctgaggcctcttcctcagctttatctccctttccttcactcaagggccatttccccagtccctatctcccccatcccctcccggcttataggccccacaggtgctatttgttgtgctggcccaggcgtggggctaccaagcaaaggcttggcatataccaaaggccagctgcatgcccatcagtctggtctttttcctctgcggtcatgttggctttcatgctggatcaaatgttttactttcccagactggtggcatctgagttccccatcctaccactctcaccccactttcctgccccacctaaaccctcgttttagtaatttgtagtgactgttcccttccctctgttgcagggaaccaggaggaaagggaaagatgttgccatatttcctactctttaggcatggactctcctttccctttgttagtgtcctgggttcccatggactcagggatttgttggctaaggtttctctgtgcatatatatatatatacatatgtatatatatttaaatacacatatatattgtacagaataaaaatgttttattgaataca

SEQ ID NO: 12922 - DNA, 1867 bp, Homo sapiens
  source 1..1867: mol_type = unassigned DNA
atgaagtggcggctccaggagggacgtggtgaggccatcttcacattgtccagtgtgtctggagagagtctggacctcctcaaagtctttctgaatattctgccgccactcaccaacagcaaagagcaggaggaactcatgcagcagctgacggagttccaggtggatgaaatctacacagtaccagaggtggggactgttgttggaggaacactttccagtgggatttgccgtgagggggaccagctggtggtgggccccacggatgatggctgcttcctggagctgagagtatgcagcatccagcgcaaccgctctgcctgtcgtgtgctgcgagctggtcaggctgctacactggcgcttggggactttgaccgtgcactgcttcgcaagggcatggtgatggtgagcccggagatgaatcctaccatctgctcggtgtttgaggcagagatagtcttactgttccatgccaccaccttccgacgaggattccaggtgacagtacacgtgggcaacgtacgtcagacggcagtggtggaaaagatccatgccaaggacaaactgcggacaggcgagaaggcagtggtacgtttccgcttcctgaaacacccagagtacctgaaggtgggcgccaaactgctgttccgggagggtgtcaccaagggcatcggccatgtcactgatgtacaagccattacagcaggagaagcccaggccaacatgggcttctgaacccttcaggcagggacagttctattgctgtccctacaatatataaggtgacttctggccatgctgccctgccattggcggctctgtgtgttaataggctagggagagaggggtgctgtctgccacttgctccctgccaactttctggagaggtgccaaacttggtgtggccaggaaagggcagtcctgagggagaagacaggattcagggcagtgctccgaagctgtgtgctcacctggttggctcatcaaacctggcaaccctgtggcctgtctgccggagctgactggatccactcatcaattcttcgtccccactactaagactgggcatgttttgctggtgtggtctctgcacttcaggaatggtcacaacagggggtagccctcaaaagcactcctttttctatacctcttctcaaggccatgtaagttgcccatctctacctggctgtggacaaaaggttatctgctcttggccatctggtggtggtggcggcccagagtctgaagaaatggcacagggacagtgaatggtagtgttgccaccctgtgctgaggcctgaggcctcttcctcagctttatctccctttccttcactcaagggccatttccccagtccctatctcccccatcccctcccggcttataggccccacaggtgctatttgttgtgctggcccaggcgtggggctaccaagcaaaggcttggcatataccaaaggccagctgcatgcccatcagtctggtctttttcctctgcggtcatgttggctttcatgctggatcaaatgttttactttcccagactggtggcatctgagttccccatcctaccactctcaccccactttcctgccccacctaaaccctcgttttagtaatttgtagtgactgttcccttccctctgttgcagggaaccaggaggaaagggaaagatgttgccatatttcctactctttaggcatggactctcctttccctttgttagtgtcctgggttcccatggactcagggatttgttggctaaggtttctctgtgcatatatatatatatacatatgtatatatatttaaatacacatatatattgtacagaataaaaatgttttattgaatacactgtgctt

SEQ ID NO: 12923 - DNA, 1394 bp, Homo sapiens
  source 1..1394: mol_type = unassigned DNA
tgggatttgccgtgagggggaccagctggtggtgggccccacggatgatggctgcttcctggagctgagagtatgcagcatccagcgcaaccgctctgcctgtcgtgtgctgcgagctggtcaggctgctacactggcgcttggggactttgaccgtgcactgcttcgcaagggcatggtgatggtgagcccggagatgaatcctaccatctgctcggtgtttgaggcagagatagtcttactgttccatgccaccaccttccgacgaggattccaggtgacagtacacgtgggcaacgtacgtcagacggcagtggtggaaaagatccatgccaaggacaaactgcggacaggcgagaaggcagtggctagggagagaggggtgctgtctgccacttgctccctgccaactttctggagaggtgccaaacttggtgtggccaggaaagggcagtcctgagggagaagacaggattcagggcagtgctccgaagctgtgtgctcacctggttggctcatcaaacctggcaaccctgtggcctgtctgccggagctgactggatccactcatcaattcttcgtccccactactaagactgggcatgttttgctggtgtggtctctgcacttcaggaatggtcacaacagggggtagccctcaaaagcactcctttttctatacctcttctcaaggccatgtaagttgcccatctctacctggctgtggacaaaaggttatctgctcttggccatctggtggtggtggcggcccagagtctgaagaaatggcacagggacagtgaatggtagtgttgccaccctgtgctgaggcctgaggcctcttcctcagctttatctccctttccttcactcaagggccatttccccagtccctatctcccccatcccctcccggcttataggccccacaggtgctatttgttgtgctggcccaggcgtggggctaccaagcaaaggcttggcatataccaaaggccagctgcatgcccatcagtctggtctttttcctctgcggtcatgttggctttcatgctggatcaaatgttttactttcccagactggtggcatctgagttccccatcctaccactctcaccccactttcctgccccacctaaaccctcgttttagtaatttgtagtgactgttcccttccctctgttgcagggaaccaggaggaaagggaaagatgttgccatatttcctactctttaggcatggactctcctttccctttgttagtgtcctgggttcccatggactcagggatttgttggctaaggtttctctgtgcatatatatatatatacatatgtatatatatttaaatacacatatatattgtacagaataaaaatgttttattgaataca

SEQ ID NO: 12924 - DNA, 1850 bp, Homo sapiens
  source 1..1850: mol_type = unassigned DNA
tgggatttgccgtgagggggaccagctggtggtgggccccacggatgatggctgcttcctggagctgagagtatgcagcatccagcgcaaccgctctgcctgtcgtgtgctgcgagctggtcaggctgctacactggcgcttggggactttgaccgtgcactgcttcgcaagggcatggtgatggtgagcccggagatgaatcctaccatctgctcggtgtttgaggcagagatagtcttactgttccatgccaccaccttccgacgaggattccaggtgacagtacacgtgggcaacgtacgtcagacggcagtggtggaaaagatccatgccaaggtgagagggacctggccttccatttctccagaggtcagaaaagagggaggcctgccccagactggcagagaactccttgatcccacaatgggaataaaaccccacttagggtgggtagcggcctgataggcctctggagggtggagagccacggctggcagagaatgggacagaaggcactggccaggggagtgaccacttatttgctgcaggacaaactgcggacaggcgagaaggcagtggtacgtttccgcttcctgaaacacccagagtacctgaaggtgggcgccaaactgctgttccgggagggtgtcaccaagggcatcggccatgtcactgatgtacaagccattacagcaggagaagcccaggccaacatgggcttctgaacccttcaggcagggacagttctattgctgtccctacaatatataaggtgacttctggccatgctgccctgccattggcggctctgtgtgttaataggctagggagagaggggtgctgtctgccacttgctccctgccaactttctggagaggtgccaaacttggtgtggccaggaaagggcagtcctgagggagaagacaggattcagggcagtgctccgaagctgtgtgctcacctggttggctcatcaaacctggcaaccctgtggcctgtctgccggagctgactggatccactcatcaattcttcgtccccactactaagactgggcatgttttgctggtgtggtctctgcacttcaggaatggtcacaacagggggtagccctcaaaagcactcctttttctatacctcttctcaaggccatgtaagttgcccatctctacctggctgtggacaaaaggttatctgctcttggccatctggtggtggtggcggcccagagtctgaagaaatggcacagggacagtgaatggtagtgttgccaccctgtgctgaggcctgaggcctcttcctcagctttatctccctttccttcactcaagggccatttccccagtccctatctcccccatcccctcccggcttataggccccacaggtgctatttgttgtgctggcccaggcgtggggctaccaagcaaaggcttggcatataccaaaggccagctgcatgcccatcagtctggtctttttcctctgcggtcatgttggctttcatgctggatcaaatgttttactttcccagactggtggcatctgagttccccatcctaccactctcaccccactttcctgccccacctaaaccctcgttttagtaatttgtagtgactgttcccttccctctgttgcagggaaccaggaggaaagggaaagatgttgccatatttcctactctttaggcatggactctcctttccctttgttagtgtcctgggttcccatggactcagggatttgttggctaaggtttctctgtgcatatatatatatatacatatgtatatatatttaaatacacatatatattgtacagaataaaaatgttttattgaataca

SEQ ID NO: 12925 - DNA, 1792 bp, Homo sapiens
  source 1..1792: mol_type = unassigned DNA
ggggaggggccgggcggggggctggcggcagcggcggatggactcgcgggtatcggagctgttcggcggctgctgccggcccggagggggcccggccgtgggcggaaccctcaaggctaggggggccggcagcagcagcggctgcggggggccaaagggaaagaagaagaacggaaggaacagagggggcaaagccaacaaccccccgtatttgccccccgaggctgaagatggaaacattgaatataaattgaagctggtgaatccatcccagtaccgctttgagcacctggtgacacaaatgaagtggcggctccaggagggacgtggtgaggccgtctaccagattggggtagaggacaatgggctgctggtggggctggctgaggaggaaatgcgagcttcgctcaagaccctgcaccggatggcagagaaggttggggcagacataaccgttcttcgagagcgagaagtggattatgatagcgacatgccccggaagatcaccgaggtgctagtacgaaaggtccctgacaaccaacagttcctagacctccgtgtggccgtcctggggaatgtggactctgggaagtcaactctgcttggagtcctgacccagggagagctggacaatgggcggggccgggctcggctcaaccttttccgccacctgcatgagattcagtctggccgaacctccagcatcagcttcgagatcctgggctttaacagcaagggagaggtggtgaattacagcgactcacggacagcagaagagatctgtgagagcagctccaagatgatcaccttcatcgacctggcaggccaccataagtacctacacaccaccatctttggcctcacatcatactgccccgactgcgccctgctcctcgtcagtgccaacactgggattgctggcaccacaagggaacatctggggctggccctggccctgaaagtgcccttcttcatcgtggtcagcaagatcgacctatgtgccaagaccacagtggagaggacagtacgccagctggagcgggtcctcaagcagcctggctgccacaaggtccccatgctggtcacctctgaggatgatgccgtcactgctgcccagcagtttgctcagtcacccaatgtcacccccatcttcacattgtccagtgtgtctggagagagtctggacctcctcaaagtctttctgaatattctgccgccactcaccaacagcaaagagcaggaggaactcatgcagcagctgacggagttccaggtggatgaaatctacacagtaccagaggtggggactgttgttggaggaacactttccagtgggatttgccgtgagggggaccagctggtggtgggccccacggatgatggctgcttcctggagctgagagtatgcagcatccagcgcaaccgctctgcctgtcgtgtgctgcgagctggtcaggctgctacactggcgcttggggactttgaccgtgcactgcttcgcaagggcatggtgatggtgagcccggagatgaatcctaccatctgctcggtgtttgaggcagagatagtcttactgttccatgccaccaccttccgacgaggattccaggtgacagtacacgtgggcaacgtacgtcagacggcagtggtggaaaagatccatgccaaggacaaactgcggacaggcgagaaggcagtggctagggagagaggggtgctgtctgccacttgctccctgccaactttctggagaggtgccaaacttggtgtggccaggaaagggcagtcctga

SEQ ID NO: 12926 - DNA, 946 bp, Homo sapiens
  source 1..946: mol_type = unassigned DNA
cccagggaggaggggcacgggaggagaacacctctttcaggtcccgggaccccagggaggaagggcagagactggactctcaggctgaagatggaaacattgaatataaattgaagctggtgaatccatcccagtaccgctttgagcacctggtgacacaaatgaagtggcggctccaggagggacgtggtgaggccgtctaccagattggggtagaggacaatgggctgctggtggggctggctgaggaggaaatgcgagcttcgctcaagaccctgcaccggatggcagagaaggttggggcagacataaccgttcttcgagagcgagaagtggattatgatagcgacatgccccggaagatcaccgaggtgctagtacgaaaggtccctgacaaccaacagttcctagacctccgtgtggccgtcctggggaatgtggactctgggaagtcaactctgcttggagtcctgacccagggagagctggacaatgggcggggccgggctcggctcaaccttttccgccacctgcatgagattcagtctggccgaacctccagcatcagcttcgagatcctgggctttaacagcaagggagaggtggtgaattacagcgactcacggacagcagaagagatctgtgagagcagctccaagatgatcaccttcatcgacctggcaggccaccataagtacctacacaccaccatctttggcctcacatcatactgccccgactgcgccctgctcctcgtcagtgccaacactgggattgctggcaccacaagggaacatctggggctggccctggccctgaaagtgcccttcttcatcgtggtcagcaagatcgacctatgtgccaagaccacagtggagaggacagtacgccagctggagcgggtcctcaagcagcctggctgccacaaggtccccatgctggtcac

SEQ ID NO: 12927 - DNA, 681 bp, Homo sapiens
  source 1..681: mol_type = unassigned DNA
atggactcgcgggtatcggagctgttcggcggctgctgccggcccggagggggcccggccgtgggcggaaccctcaaggctaggggggccggcagcagcagcggctgcggggggccaaagggaaagaagaagaacggaaggaacagagggggcaaagccaacaaccccccgtatttgccccccgaggctgaagatggaaacattgaatataaataccgctttgagcacctggtgacacaaatgaagtggcggctccaggagggacgtggtgaggccgtctaccagattggggtagaggacaatgggctgctggtggggctggctgaggaggaaatgcgagcttcgctcaagaccctgcaccggatggcagagaaggttggggcagacataaccgttcttcgagagcgagaagtggattatgatagcgacatgccccggaagatcaccgaggtgctagtacgaaaggtccctgacaaccaacagttcctagacctccgtgtggccgtcctggggaatgtggactctgggaagtcaactctgcttggagtcctgacccagggagagctggacaatgggcggggccgggctcggctcaaccttttccgccacctgcatgagattcagtctggccgaacctccagcatcagcttcgagatcctgggctttaacagcaagggagag

SEQ ID NO: 12928 - DNA, 2929 bp, Homo sapiens
  source 1..2929: mol_type = unassigned DNA
ctttcccgagccggggccatggcacctgcaaggtgtttctcagcaagattgaggaccgtgtttcagggcgtggggcattgggctttgtccacatgggctggcctgaagcccagccggctactgccacagcgggcttctcccaggctgctctcggtcggccgtgcggacctcgccaagcatcaggaactcccggggaagaagctgctctctgagaaaaagctgaaaaggtactttgtggactatcggagagtgcttgtctgtggaggaaacggaggcgctggggcaagctgcttccacagtgagccccgcaaggagtttggaggccctgatggaggggacggaggcaacggtggacacgtcattctgagagttgaccagcaagtcaagtccctgtcgtcggtcctgtcgcggtaccagggtttcagtggagaagatggagggagtaaaaactgcttcgggcgcagtggcgccgtcctctacatccgggtccccgtgggcacgctggtgaaggagggaggcagagttgtggccgacctgtcttgcgtgggagatgagtacattgccgcgctgggcggggcaggagggaaaggcaaccgcttcttcctggccaacaacaaccgtgcccctgtgacctgtacccctggacagccaggacagcagcgagttctccacctggagctcaagacggtggcccacgccggaatggtgggattccccaacgccgggaagtcctcactgctccgggccatttcaaacgccagacccgccgtggcttcctacccgttcaccaccctgaagccccacgtcgggatcgtccactacgaaggccacctacaaatagcagtggccgacatccccggcatcatacgaggcgcccaccagaacaggggtctggggtccgccttcctcaggcacatcgagcgctgccgctttctcttgttcgtggtggatctttctcagcctgagccgtggactcaagttgacgatttaaaatatgaactggagatgtatgaaaagggcctgtctgcgaggccccacgcaatcgtcgcaaacaagattgacctccctgaagcccaagccaatctgtcccagctccgggatcacttgggacaggaggtcatcgtgctgtcggcgttgaccggcgagaacctggagcagctgctgttgcacctgaaggtgctgtatgacgcctacgcggaggccgagctgggccagggccgccagccgctcaggtggtagccacgccagagcggggtcgcctctgggcctctgtctgagcaaacctgggtgtgaattcggtggttttgaatgcataaagtgccttgtggacacgggggagttgtggtgcttctgggtctctgggccccgcctgctggcctgagatgccctcatgttgggaagcattccgtgccccctaccccgcctgccctccgtatttcctgcacctgtcagcctgcaccgactgatgagccagttgctcatttgtgctgattaacacccctaataaggggttggggtgcccataacggggtggccctgccgctgactcaggtctccgccatgcacgcgtggactctcggatgagctcagcagaaccgcacagccagagccccaggtcagaagtgcagaccagggttctcagcacagtgcccgtcgtgcttccatggcttgctacggagagagacctctggatccacactggggctgcgtctggcccgttgtccagcagccctgcggtaccgcaagcccaggcaccagtgtctcggggggcctcactgctgcgcaaggggtggggccgaggatgcaagtccaggcagagcggcgcaggcagctgtgagcttttctccatcagccgtctgagaagagcagtgaggccagctgcttcctgtccttcagaacacttctctgtgctcagtgggagccaggaagcctcaggcttcacgactgaatgcacccaatatccgacctggctgcgtgtttctggctgggctgccgtgtgcacagcaagttaactagaggggctgtgggccatggaactgtcagcgttattctcagaaggcggccgtggcatgggcagggtatagtgaggagtggaaggagacgtgtgcctggtaatatggggcggaatttccactcagctccatttgctggggatttaaagagaacccttgtgctacgccaggcagttaccgagccgaagggagatgatgggccttcgcccctcagtgggatggcagctgagggggccctgcatttgaccgtcgagactgcagcagcgcctttcctgtctgtggtttaagtctttgcagtcaagtactgatgcatccaagccaggcccatgcctggtgtctccctgactgcagaggagccccagggcaaggacagctcagctgctggcagcctgcctggcccatagacatcccccaagtagtctcaggcctctgacatgtccctgaggggcccctaagaaagaaagtggaggggacactccagaggctgtcgtgggaggatcatgtgagcctgggaggtcaaggctgcagtgagccgtgattgcaccactgcactccagcctgagtgacagagcgagaccctgtctcaaaaaacaaacaaacaaacaaacaaaaacagaacattctgggcacggtggctcatgcctgtagtcccagcactttgggaggccgaggctggtggatcacaaggtcaggagattgagaccatcctggctaacacagtgaaaccccgtctctactaaaaatacaaaaaaattagccaggcgtggtggcggtcacctgtagtcccagctactcgggaggctgaagcaggagaatggcgtgaacctgggaggcggagcttgcagtgagccgagatcacaccactgcactccagcctgagcgacagagcaagactccatctcaaaaaaaaaaaaaaa

SEQ ID NO: 12929 - DNA, 1547 bp, Homo sapiens
  source 1..1547: mol_type = unassigned DNA
gtgctttcccgagccggggccatggcacctgcaaggtgtttctcagcaagattgaggaccgtgtttcagggcgtggggcattgggctttgtccacatgggctggcctgaagcccagccggctactgccacagcgggcttctcccaggctgctctcggtcggccgtgcggacctcgccaagcatcaggaactcccggggaagaagctgctctctgagaaaaagctgaaaaggtactttgtggactatcggagagtgcttgtctgtggaggaaacggaggcgctggggcaagctgcttccacagtgagccccgcaaggagtttggaggccctgatggaggggacggaggcaacggtggacacgtcattctgagagtggccgacatccccggcatcatacgaggcgcccaccagaacaggggtctggggtccgccttcctcaggcacatcgagcgctgccgctttctcttgttcgtggtggatctttctcagcctgagccgtggactcaagttgacgatttaaaatatgaactggagatgtatgaaaagggcctgtctgcgaggccccacgcaatcgtcgcaaacaagattgacctccctgaagcccaagccaatctgtcccagctccgggatcacttgggacaggaggtcatcgtgctgtcggcgttgaccggcgagaacctggagcagctgctgttgcacctgaaggtgctgtatgacgcctacgcggaggccgagctgggccagggccgccagccgctcaggtggtagccacgccagagcggggtcgcctctgggcctctgtctgagcaaacctgggtgtgaattcggtggttttgaatgcataaagtgccttgtggacacgggggagttgtggtgcttctgggtctctgggccccgcctgctggcctgagatgccctcatgttgggaagcattccgtgccccctaccccgcctgccctccgtatttcctgcacctgtcagcctgcaccgactgatgagccagttgctcatttgtgctgattaacacccctaataaggggttggggtgcccataacggggtggccctgccgctgactcaggtctccgccatgcacgcgtggactctcggatgagctcagcagaaccgcacagccagagccccaggtcagaagtgcagaccagggttctcagcacagtgcccgtcgtgcttccatggcttgctacggagagagacctctggatccacactggggctgcgtctggcccgttgtccagcagccctgcggtaccgcaagcccaggcaccagtgtctcggggggcctcactgctgcgcaaggggtggggccgaggatgcaagtccaggcagagcggcgcaggcagctgtgagcttttctccatcagccgtctgagaagagcagtgaggccagctgcttcctgtccttcagaacacttctctgtgctcagtgggagccaggaagcctcaggcttcacgactgaatgcacccaatatccgacctggctgcgtgtttctggctgggctgccgtgtgcacagcaagttaactagag

SEQ ID NO: 12930 - DNA, 727 bp, Homo sapiens
  source 1..727: mol_type = unassigned DNA
cgagccgatatttttgacgtgaggggccatggcacctgcaaggtgtttctcagcaagattgaggaccgtgtttcagggcgtggggcattgggctttgtccacatgggctggcctgaagcccagccggctactgccacagcgggcttctcccaggctgctctcggtcggccgtgcggacctcgccaagcatcaggaactcccggggaagaagctgctctctgagaaaaagctgaaaaggtactttgtggactatcggagagtgcttgtctgtggaggaaacggaggcgctggggcaagctgcttccacagtgagccccgcaaggagtttggaggccctgatggaggggacggaggcaacggtggacacgtcattctgagagttgaccagcaagtcaagtccctgtcgtcggtcctgtcgcggtaccagggtttcagtggagaagatggagggagtaaaaactgcttcgggcgcagtggcgccgtcctctacatccgggtccccgtgggcacgctggtgaaggagggaggcagagttgtggccgacctgtcttgcgtgggagatgagtacattgccgcgctgggcggggcaggagggaaaggcaaccgcttcttcctggccaacaacaaccgtgcccctgtgacctgtacccctggacagccaggacagcagcgagttctccacctggagctcaagacggtggcccacgccggaatggtgggattcccc

SEQ ID NO: 12931 - DNA, 1427 bp, Homo sapiens
  source 1..1427: mol_type = unassigned DNA
gtgacgtgctttcccgagccgaaaaggtactttgtggactatcggagagtgcttgtctgtggaggaaacggaggcgctggggcaagctgcttccacagtgagccccgcaaggagtttggaggccctgatggaggggacggaggcaacggtggacacgtcattctgagagttgaccagcaagtcaagtccctgtcgtcggtcctgtcgcggtaccagggtttcagtggagaagatggagggagtaaaaactgcttcgggcgcagtggcgccgtcctctacatccgggtccccgtgggcacgctggtgaaggagggaggcagagttgtggccgacctgtcttgcgtgggagatgagtacattgccgcgctgggcggggcaggagggaaaggcaaccgcttcttcctggccaacaacaaccgtgcccctgtgacctgtacccctggacagccaggacagcagcgagttctccacctggagctcaagacggtggcccacgccggaatggtgggattccccaacgccgggaagtcctcactgctccgggccatttcaaacgccagacccgccgtggcttcctacccgttcaccaccctgaagccccacgtcgggatcgtccactacgaaggccacctacaaatagcagtggccgacatccccggcatcatacgaggcgcccaccagaacaggggtctggggtccgccttcctcaggcacatcgagcgctgccgctttctcttgttcgtggtggatctttctcagcctgagccgtggactcaagttgacgatttaaaatatgaactggagatgtatgaaaagggcctgtctgcgaggccccacgcaatcgtcgcaaacaagattgacctccctgaagcccaagccaatctgtcccagctccgggatcacttgggacaggaggtcatcgtgctgtcggcgttgaccggcgagaacctggagcagctgctgttgcacctgaaggtgctgtatgacgcctacgcggaggccgagctgggccagggccgccagccgctcaggtggtagccacgccagagcggggtcgcctctgggcctctgtctgagcaaacctgggtgtgaattcggtggttttgaatgcataaagtgccttgtggacacgggggagttgtggtgcttctgggtctctgggccccgcctgctggcctgagatgccctcatgttgggaagcattccgtgccccctaccccgcctgccctccgtatttcctgcacctgtcagcctgcaccgactgatgagccagttgctcatttgtgctgattaacacccctaataaggggttggggtgcccataacggggtggccctgccgctgactcaggtctccgccatgcacgcgtggactctcggatgagctcagcagaaccgcacagccagagccccaggtcagaagtgcag

SEQ ID NO: 12932 - DNA, 1527 bp, Homo sapiens
  source 1..1527: mol_type = unassigned DNA
aggtcgaacttgaaaagggacgtcgcccacctgtaccgaggagtcggctcgcgctacatcatggggtcaggagaatccttcatgcagctgcagcagcgtctcctgagagagaaggaggccaagatcaggaaggccttggacaggcttcgcaagaagaggcacctgctccgccggcagcggacgaggcgggagttccccgtgatctccgtggtggggtacaccaactgcggaaagaccacgctgatcaaggcactgacgggcgatgccgccatccagccacgggaccagctgtttgccacgctggacgtcacggcccacgcgggcacgctgccctcacgcatgaccgtcctgtacgtggacaccatcggcttcctctcccagctgccgcacggcctcatcgagtccttctccgccaccctggaagacgtggcccactcggatctcatcttgcacgtgagggacgtcagccaccccgaggcggagctccagaaatgcagcgttctgtccacgctgcgtggcctgcagctgcccgccccgctcctggactccatggtggaggttcacaacaaggtggacctcgtgcccgggtacagccccacggaaccgaacgtcgtgcccgtgtctgccctgcggggccacgggctccaggagctgaaagctgagctcgatgcggcggttttgaaggcgacggggagacagatcctcactctccgtgtgaggctcgcaggggcgcagctcagctggctgtataaggaggccacagttcaggaggtggacgtgatccctgaggacggggcggccgacgtgagggtcatcatcagcaactcagcctacggcaaattccggaagctctttccaggatgaacggacgcccacagaggcctgcggggtgggggcatcgctgcctggggagctgaggcgttaccgctgtgttgggggcagcttggtgtcaggtgcagcagggtcctccttgtctggttctgcacccgtctcgctcccagccatttgctgggatgaccgtgcaggccggtgacacggccgcacctgccccaaagcgggccgcccgagcgtccactccaagcctgagcatccacacaattccagtgggccctcggtgcctgctgtgaactgctttccctcggaatgtttccgtaacaggacattaaacctttgattttacttccgtgagcagcatttccagttcctcctgcacctgccgtgagccgtggccctggtgggcaccgacggcccctccgcccggctgtctgtgttcacagatggtctcgtttcccatggtggtgtcggggaaatgacgaaaaatcaggtttcccggcagcacagagaacccttccacaaaagtagaagggaaagcaaatagttttactaaagaagcagcttcaaaccagaccgtgagccaccgcacccggcctcctgaattaacattttctaaagatgcttctggcgtgctatcctgaaagctgccagaggtgtcttggctgcattggtggtaataaaattcatactcat

SEQ ID NO: 12933 - DNA, 1186 bp, Homo sapiens
  source 1..1186: mol_type = unassigned DNA
gtcgaacttgaaaagggacgtcgcccacctgtaccgaggagtcggctcgcgctacatcatggggtcaggagaatccttcatgcagctgcagcagcgtctcctgagagagaaggaggccaagatcaggaaggccttggacaggcttcgcaagaagaggcacctgctccgccggcagcggacgaggcgggagttccccgtgatctccgtggtggggtacaccaactgcggaaagaccacgctgatcaaggcactgacgggcgatgccgccatccagccacgggaccagctgtttgccacgctggacgtcacggcccacgcgggcacgctgccctcacgcatgaccgtcctgtacgtggacaccatcggcttcctctcccagctgccgcacggcctcatcgagtccttctccgccaccctggaagacgtggcccactcggatctcatcttgcacgtgagggacgtcagccaccccgaggcggagctccagaaatgcagcgttctgtccacgctgcgtggcctgcagctgcccgccccgctcctggactccatggtggaggttcacaacaaggtggacctcgtgcccgggtacagccccacggaaccgaacgtcgtgcccgtgtctgccctgcggggccacgggctccaggagctgaaagctgagctcgatgcggcggttttgaaggcgacggggagacagatcctcactctccgtgtgaggctcgcaggggcgcagctcagctggctgtataaggaggccacagttcaggaggtggacgtgatccctgaggacggggcggccgacgtgagggtcatcatcagcaactcagcctacggcaaattccggaagctctttccaggatgaacggacgcccacagaggcctgcggggtgggggcatcgctgcctggggagctgaggcgttaccgctgtgttgggggcagcttggtgtcaggtgcagcagggtcctccttgtctggttctgcacccgtctcgctcccagccatttgctgggatgaccgtgcaggccggtgacacggccgcacctgccccaaagcgggccgcccgagcgtccactccaagcctgagcatccacacaattccagtgggccctcggtgcctgctgtgaactgctttccctcggaatgtttccgtaacaggacattaaacctttgattttacttccgtga

SEQ ID NO: 12934 - DNA, 2208 bp, Homo sapiens
  source 1..2208: mol_type = unassigned DNA
ataaaccgcccggccgcggcggctgcaggcggcgggcaaggacggcgggcacagcgcagcactccccgctcgttggcccgggtatcccagcgcggacccacgcgatacgctgacgccccgacgccgatccggccgagccaagtaagggggacggcccgagacggagaagggagagagtgggagtttcccagcccgcagaactttcgaagttgagaaaagaacccctggaacgtgcgctcagcactgggattttctggactcaacgatgactctgaataatgtcaccatgcgccagggcactgtgggcatgcagccacagcagcagcgctggagcatcccagctgatggcaggcatctgatggtccagaaagagccccaccagtacagccaccgcaaccgccattctgctacccctgaggaccactgccgccgaagctggtcctctgactccacagactcagtcatctcctctgagtcagggaacacctactaccgagtggtgctcataggggagcagggggtgggcaagtccactctggccaacatctttgcaggtgtgcatgacagcatggacagcgactgcgaggtgctgggagaagatacatatgaacgaaccctgatggttgatggggaaagtgcaacgattatactcctggatatgtgggaaaataagggggaaaatgaatggctccatgaccactgcatgcaggtcggggacgcatacctgattgtctactcaatcacagaccgagcgagcttcgagaaggcatctgagctgcgaatccagctccgcagggcccggcagacagaggacattcccataattttggttggcaacaaaagtgacttagtgcggtgccgagaagtgtctgtatcagaagggagagcctgtgcagtggtgtttgactgcaagttcatcgagacctctgcagctgtccagcacaacgtgaaggagctgtttgagggcattgtgcgacaggtgcgccttcggcgggacagcaaggagaagaatgaacggcggctggcctaccagaaaaggaaggagagcatgcccaggaaagccaggcgcttctggggcaagatcgtggccaaaaacaacaagaatatggccttcaagctcaagtccaaatcctgccatgacctctctgtactctaggaacccagggtcacccagatgtccctttgatggccgttgttgaaggccattgggaccaataatctatattagattgaatacttaagttagatgtggtttcccccattgtagcagggagctagcgtattagccttgtgggcaacatgatgcatgggaaatgaaagatttttgtaaaaagtcagtatttatttccaggaaaagcctgaccttgctatttgaacacccaagactctttagaggatgtgtttggtgttcacatgtgtttcttctattttggatagtagagaagtaaagcttacaaagaatgcctagaacaagaacttttcatcattaaaaatttttcccagtgttctgatatgtgactttgaggccaatgagtcataaacaaatataagaaagctgtcaatgagtttcttcaaaggagggaaaactttctacgaatctaagatccatggagctagaattgtagaactaggctcatcagaatcgtgactattattgctccatcaaactgtgaaaagaaatgatgtggaccttgctggaaacaaaggcttagcaaacaatttttgttcaatgcccaccaagacatatagaattgggaactgatacatgtgtcccttataggctcaaaaattatatcttacaatttcttatttagggggaaattatttgaatcagattctatttagtcaaaccaccttttatgttttattatttttgaattcatggagccatcataaaaatatttttaaaatcagaattattgataccctgtagtgcaaaatgtcaatttttaatgtataatcagaagtctgaatttttataaaacatatagcataaaaacttccagtactttggttgacccttgtatgtcacagctctgctctatttattattattttgcaaaataaccattttaacatttgataaagcatatttatgaacatatttcttaataagaaaaatatccattttattaccattttctatctttttcaaaatatgcaagtttttacctatatgtcttataataaaagaaataaaatatttga

SEQ ID NO: 12935 - DNA, 2103 bp, Homo sapiens
  source 1..2103: mol_type = unassigned DNA
tggttataaaccgcccggccgcggcggctgcaggcggcgggcaaggacggcgggcacagcgcagcactccccgctcgttggcccgggtatcccagcgcggacccacgcgatacgctgacgccccgacgccgatccggccgagccaagactcaacgatgactctgaataatgtcaccatgcgccagggcactgtgggcatgcagccacagcagcagcgctggagcatcccagctgatggcaggcatctgatggtccagaaagagccccaccagtacagccaccgcaaccgccattctgctacccctgaggaccactgccgccgaagctggtcctctgactccacagactcagtcatctcctctgagtcagggaacacctactaccgagtggtgctcataggggagcagggggtgggcaagtccactctggccaacatctttgcaggtgtgcatgacagcatggacagcgactgcgaggtgctgggagaagatacatatgaacgaaccctgatggttgatggggaaagtgcaacgattatactcctggatatgtgggaaaataagggggaaaatgaatggctccatgaccactgcatgcaggtcggggacgcatacctgattgtctactcaatcacagaccgagcgagcttcgagaaggcatctgagctgcgaatccagctccgcagggcccggcagacagaggacattcccataattttggttggcaacaaaagtgacttagtgcggtgccgagaagtgtctgtatcagaagggagagcctgtgcagtggtgtttgactgcaagttcatcgagacctctgcagctgtccagcacaacgtgaaggagctgtttgagggcattgtgcgacaggtgcgccttcggcgggacagcaaggagaagaatgaacggcggctggcctaccagaaaaggaaggagagcatgcccaggaaagccaggcgcttctggggcaagatcgtggccaaaaacaacaagaatatggccttcaagctcaagtccaaatcctgccatgacctctctgtactctaggaacccagggtcacccagatgtccctttgatggccgttgttgaaggccattgggaccaataatctatattagattgaatacttaagttagatgtggtttcccccattgtagcagggagctagcgtattagccttgtgggcaacatgatgcatgggaaatgaaagatttttgtaaaaagtcagtatttatttccaggaaaagcctgaccttgctatttgaacacccaagactctttagaggatgtgtttggtgttcacatgtgtttcttctattttggatagtagagaagtaaagcttacaaagaatgcctagaacaagaacttttcatcattaaaaatttttcccagtgttctgatatgtgactttgaggccaatgagtcataaacaaatataagaaagctgtcaatgagtttcttcaaaggagggaaaactttctacgaatctaagatccatggagctagaattgtagaactaggctcatcagaatcgtgactattattgctccatcaaactgtgaaaagaaatgatgtggaccttgctggaaacaaaggcttagcaaacaatttttgttcaatgcccaccaagacatatagaattgggaactgatacatgtgtcccttataggctcaaaaattatatcttacaatttcttatttagggggaaattatttgaatcagattctatttagtcaaaccaccttttatgttttattatttttgaattcatggagccatcataaaaatatttttaaaatcagaattattgataccctgtagtgcaaaatgtcaatttttaatgtataatcagaagtctgaatttttataaaacatatagcataaaaacttccagtactttggttgacccttgtatgtcacagctctgctctatttattattattttgcaaaataaccattttaacatttgataaagcatatttatgaacatatttcttaataagaaaaatatccattttattaccattttctatctttttcaaaatatgcaagtttttacctatatgtcttataataaaagaaataaaatatttgaaaaaa

SEQ ID NO: 12936 - DNA, 363 bp, Homo sapiens
  source 1..363: mol_type = unassigned DNA
gttaaccgtatttgttttcccatgcaaatgatagtctgcctgaggagctggttactgacagtgtgggcagcatgactcaacgatgactctgaataatgtcaccatgcgccagggcactgtgggcatgcagccacagcagcagcgctggagcatcccagctgatggcaggcatctgatggtccagaaagagccccaccagtacagccaccgcaaccgccattctgctacccctgaggaccactgccgccgaagctggtcctctgactccacagactcagtcatctcctctgagtcagggaacacctactaccgagtggtgctcataggggagcagggggtgggcaagtccactctggccaacat

SEQ ID NO: 12937 - DNA, 2310 bp, Homo sapiens
  source 1..2310: mol_type = unassigned DNA
gtgcggacgcagttgcgtgaggggtttgtactatcctcggtgctgtggtgcagagctagttcctctccagctcagccgcgtaggtttggacatatttgactcttttccccccaggttgaattgaccaaagcaatggtgatggagaagcctagtcccctgctggtcgggcgggaatttgtgagacagtattacacactgctgaaccaggccccagacatgctgcatagattttatggaaagaactcttcttatgtccatgggggattggattcaaatggaaagccagcagatgcagtctacggacagaaagaagtagaggaacctgaagaaagacagcaaacacctgaggtggtacctgatgattctggaactttctatgatcaggcagttgtcagtaatgacatggaagaacatttagaggagcctgttgctgaaccagagcctgatcctgaaccagaaccagaacaagaacctgtatctgaaatccaagaggaaaagcctccccgtccagagtctaagcctgaatctcagattccaccacaaagacctcagcgggatcaaagagtgcgagaacaacgaataaatattcctccccaaaggggacccagaccaatccgtgaggctggtgagcaaggtgacattgaaccccgaagaatggtgagacaccctgacagtcaccaactcttcattggcaacctgcctcatgaagtggacaaatcagagcttaaagatttctttcaaagttatggaaacgtggtggagttgcgcattaacagtggtgggaaattacccaattttggttttgttgtgtttgatgattctgagcctgttcagaaagtccttagcaacaggcccatcatgttcagaggtgaggtccgtctgaatgtcgaagagaagaagactcgagctgccagggaaggcgaccgacgagataatcgccttcggggacctggaggccctcgaggtgggctgggtggtggaatgagaggccctccccgtggaggcatggtgcagaaaccaggatttggagtgggaagggggcttgcgccacggcagtgaatcttcatggatcttcatgcagccatacaaaccctggttccaacagaatggtgaattttcgacagcctttggtatcttggagtatgaccccagtctgttataaactgcttaagtttgtataattttactttttttgtgtgttaatggtgtgtgctccctctccctctcttccctttcctgacctttagtctttcacttccaattttgtggaatgatattttaggaataacggacttttaaagaagcaaaaaaaaagactgaatttccttgcttactttgcatatacagactggattttttttttttttttacagccatttccccaaaggaatgtcttgcatattactgacatttggtatgtttcattcattggaatatttcttattttctacgtgtttgaaaagcctgtaagaaatacaggatttgataatattttgaaggcaggaaaaacccaaattgtttcttctttgagagtcatgactaccttctggtgtggagaaattgccattggaaaatttgacaattttgattctcactggtatgtttaaaaactgaataaaaggaatagaatttttttttgataaaggatcacaaaacaattctaaaacctaactgtttttaccattgaaatttaaattgtgataataggttttaaatgtctagaatgcaactgataggcttttcttgaactgttagtttttttgaagtagttttttcatgtttaatttgtatttgtaaaaaaacaaaaagcaaaaaaattcccaaaacccagataacaaccagagcaaaactgttgtgccttctatttatctttgatttcagtcttggcaattgtttaaaaaaaaaatctagatttgttttattaggttcagagtatgtggggaattatagaatccctctttcatcactttgtgtatgtcttttgttaacatatttgttatgccttattctaaaattgagtctcaaactggaatgcctttgaagacagatgcttctatagaggttctttgacctaaatagttcagcatttgtatttttattctggtatctaatcagattcctaatcatagcccgtaagaaggaatgttactttaatattggactttgctcatgtgctcgtgtccgcatttttttttttcttaaaatcatagccatatggtaaattttctattttgttatggttctcttttattgatgggcatgcagtgggtgttacttggaaatggccaatttttattaaaatatttctgg

SEQ ID NO: 12938 - DNA, 2803 bp, Homo sapiens
  source 1..2803: mol_type = unassigned DNA
agcacgcgtgtgtgcggacgcagttgcgtgaggggtttgtactatcctcggtgctgtggtgcagagctagttcctctccagctcagccgcgtaggtttggacatatttgactcttttccccccaggttgaattgaccaaagcaatggtgatggagaagcctagtcccctgctggtcgggcgggaatttgtgagacagtattacacactgctgaaccaggccccagacatgctgcatagattttatggaaagaactcttcttatgtccatgggggattggattcaaatggaaagccagcagatgcagtctacggacagaaagaaatccacaggaaagtgatgtcacaaaacttcaccaactgccacaccaagattcgccatgttgatgctcatgccacgctaaatgatggtgtggtagtccaggtgatggggcttctctctaacaacaaccaggctttgaggagattcatgcaaacgtttgtccttgctcctgaggggtctgttgcaaataaattctatgttcacaatgatatcttcagataccaagatgaggtctttggtgggtttgtcactgagcctcaggaggagtctgaagaagaagtagaggaacctgaagaaagacagcaaacacctgaggtggtacctgatgattctggaactttctatgatcaggcagttgtcagtaatgacatggaagaacatttagaggagcctgttgctgaaccagagcctgatcctgaaccagaaccagaacaagaacctgtatctgaaatccaagaggaaaagcctgagccagtattagaagaaactgcccctgaggatgctcagaagagttcttctccagcacctgcagacatagctcagacagtacaggaagacttgaggacattttcttgggcatctgtgaccagtaagaatcttccacccagtggagctgttccagttactgggataccacctcatgttgttaaagtaccagcttcacagccccgtccagagtctaagcctgaatctcagattccaccacaaagacctcagcgggatcaaagagtgcgagaacaacgaataaatattcctccccaaaggggacccagaccaatccgtgaggctggtgagcaaggtgacattgaaccccgaagaatggtgagacaccctgacagtcaccaactcttcattggcaacctgcctcatgaagtggacaaatcagagcttaaagatttctttcaaagttatggaaacgtggtggagttgcgcattaacagtggtgggaaattacccaattttggttttgttgtgtttgatgattctgagcctgttcagaaagtccttagcaacaggcccatcatgttcagaggtgaggtccgtctgaatgtcgaagagaagaagactcgagctgccagggaaggcgaccgacgagataatcgccttcggggacctggaggccctcgaggtgggctgggtggtggaatgagaggccctccccgtggaggcatggtgcagaaaccaggatttggagtgggaagggggcttgcgccacggcagtgaatcttcatggatcttcatgcagccatacaaaccctggttccaacagaatggtgaattttcgacagcctttggtatcttggagtatgaccccagtctgttataaactgcttaagtttgtataattttactttttttgtgtgttaatggtgtgtgctccctctccctctcttccctttcctgacctttagtctttcacttccaattttgtggaatgatattttaggaataacggacttttaaagaagcaaaaaaaaagactgaatttccttgcttactttgcatatacagactggattttttttttttttttacagccatttccccaaaggaatgtcttgcatattactgacatttggtatgtttcattcattggaatatttcttattttctacgtgtttgaaaagcctgtaagaaatacaggatttgataatattttgaaggcaggaaaaacccaaattgtttcttctttgagagtcatgactaccttctggtgtggagaaattgccattggaaaatttgacaattttgattctcactggtatgtttaaaaactgaataaaaggaatagaatttttttttgataaaggatcacaaaacaattctaaaacctaactgtttttaccattgaaatttaaattgtgataataggttttaaatgtctagaatgcaactgataggcttttcttgaactgttagtttttttgaagtagttttttcatgtttaatttgtatttgtaaaaaaacaaaaagcaaaaaaattcccaaaacccagataacaaccagagcaaaactgttgtgccttctatttatctttgatttcagtcttggcaattgtttaaaaaaaaaatctagatttgttttattaggttcagagtatgtggggaattatagaatccctctttcatcactttgtgtatgtcttttgttaacatatttgttatgccttattctaaaattgagtctcaaactggaatgcctttgaagacagatgcttctatagaggttctttgacctaaatagttcagcatttgtatttttattctggtatctaatcagattcctaatcatagcccgtaagaaggaatgttactttaatattggactttgctcatgtgctcgtgtccgcatttttttttttcttaaaatcatagccatatggtaaattttctattttgttatggttctcttttattgatgggcatgcagtgggtgttacttggaaatggccaatttttattaaaatatttctggaagaaaat

SEQ ID NO: 12939 - DNA, 10240 bp, Homo sapiens
  source 1..10240: mol_type = unassigned DNA
agggtgagtggcagttatatagaccggcggcggagcacgcgtgtgtgcggacgcagttgcgtgaggggtttgtactatcctcggtgctgtggtgcagagctagttcctctccagctcagccgcgtaggttgaattgaccaaagcaatggtgatggagaagcctagtcccctgctggtcgggcgggaatttgtgagacagtattacacactgctgaaccaggccccagacatgctgcatagattttatggaaagaactcttcttatgtccatgggggattggattcaaatggaaagccagcagatgcagtctacggacagaaagaaatccacaggaaagtgatgtcacaaaacttcaccaactgccacaccaagattcgccatgttgatgctcatgccacgctaaatgatggtgtggtagtccaggtgatggggcttctctctaacaacaaccaggctttgaggagattcatgcaaacgtttgtccttgctcctgaggggtctgttgcaaataaattctatgttcacaatgatatcttcagataccaagatgaggtctttggtgggtttgtcactgagcctcaggaggagtctgaagaagaagtagaggaacctgaagaaagacagcaaacacctgaggtggtacctgatgattctggaactttctatgatcaggcagttgtcagtaatgacatggaagaacatttagaggagcctgttgctgaaccagagcctgatcctgaaccagaaccagaacaagaacctgtatctgaaatccaagaggaaaagcctgagccagtattagaagaaactgcccctgaggatgctcagaagagttcttctccagcacctgcagacatagctcagacagtacaggaagacttgaggacattttcttgggcatctgtgaccagtaagaatcttccacccagtggagctgttccagttactgggataccacctcatgttgttaaagtaccagcttcacagccccgtccagagtctaagcctgaatctcagattccaccacaaagacctcagcgggatcaaagagtgcgagaacaacgaataaatattcctccccaaaggggacccagaccaatccgtgaggctggtgagcaaggtgacattgaaccccgaagaatggtgagacaccctgacagtcaccaactcttcattggcaacctgcctcatgaagtggacaaatcagagcttaaagatttctttcaaagttatggaaacgtggtggagttgcgcattaacagtggtgggaaattacccaattttggttttgttgtgtttgatgattctgagcctgttcagaaagtccttagcaacaggcccatcatgttcagaggtgaggtccgtctgaatgtcgaagagaagaagactcgagctgccagggaaggcgaccgacgagataatcgccttcggggacctggaggccctcgaggtgggctgggtggtggaatgagaggccctccccgtggaggcatggtgcagaaaccaggatttggagtgggaagggggcttgcgccacggcagtgaatcttcatggatcttcatgcagccatacaaaccctggttccaacagaatggtgaattttcgacagcctttggtatcttggagtatgaccccagtctgttataaactgcttaagtttgtataattttactttttttgtgtgttaatggtgtgtgctccctctccctctcttccctttcctgacctttagtctttcacttccaattttgtggaatgatattttaggaataacggacttttaaagaagcaaaaaaaaagactgaatttccttgcttactttgcatatacagactggattttttttttttttttacagccatttccccaaaggaatgtcttgcatattactgacatttggtatgtttcattcattggaatatttcttattttctacgtgtttgaaaagcctgtaagaaatacaggatttgataatattttgaaggcaggaaaaacccaaattgtttcttctttgagagtcatgactaccttctggtgtggagaaattgccattggaaaatttgacaattttgattctcactggtatgtttaaaaactgaataaaaggaatagaatttttttttgataaaggatcacaaaacaattctaaaacctaactgtttttaccattgaaatttaaattgtgataataggttttaaatgtctagaatgcaactgataggcttttcttgaactgttagtttttttgaagtagttttttcatgtttaatttgtatttgtaaaaaaacaaaaagcaaaaaaattcccaaaacccagataacaaccagagcaaaactgttgtgccttctatttatctttgatttcagtcttggcaattgtttaaaaaaaaaatctagatttgttttattaggttcagagtatgtggggaattatagaatccctctttcatcactttgtgtatgtcttttgttaacatatttgttatgccttattctaaaattgagtctcaaactggaatgcctttgaagacagatgcttctatagaggttctttgacctaaatagttcagcatttgtatttttattctggtatctaatcagattcctaatcatagcccgtaagaaggaatgttactttaatattggactttgctcatgtgctcgtgtccgcatttttttttttcttaaaatcatagccatatggtaaattttctattttgttatggttctcttttattgatgggcatgcagtgggtgttacttggaaatggccaatttttattaaaatatttctggaagaaaatttaatctggcaatatagactaatactcgtttcacatatgtgttatttgttgagtgctgtgtgtgagatgggtgaaggttttgtttacacgtgtgaaacaaacttttgtgtgattgtcattactaattgaagggcaaccaggttgtaaaattcagcgtatttattttcttaacagtattcatctttaggactgtcgtttgaggatagcataggaatatttggtttgcattactgagaaactctaggtttgctgtgatggttaagaccacagtgaagttggtattaccagtttggttccagttcctcaaatatttgaaaattggcagcatctcctttacataaacttaatgtaactgaatcacatggcttttttgtagggttaaagtaactttggtaaccacttttggcccagatcactgataataggaagaaatacaacttatacttttgtagcttatattaagcatgtggtgggtggaaagaaaagtttagtctgagtcactttggaaaaaaaaattactttgtggtaacttcaaggtcataaattatggatagcctagaaattatccttcatgagtgaatactaaattatacatttcaaaacagaagttcttcctacttggagacttaagggcattaactagatgcagcaatcctcagcttggtgttatcacatactagaggacatttggaaatgtgtgaaatttggaagggttgttggagagacatgcatctggcatttattgggtggggtctaaggataccaaatgttgtgtaaaaatgaagcaaccccattgagaacactgatagtccctattcctgtgggtgggtggagctgtgggattaggaaaactggaatgaagactcattcttttgaaactcagcctcagataaataacaaactaggaaatggaaatctgtttcaagaattgcagtaacatctactctaaggaattagtaatttcactttttattatttgtaccaaatgtatgtgtgtgttgtgtatgttggtgtaaatgtggagaggtggtagcaatacatactgatgctgcttgtaatttgttgcagggaattactgcacaatctcagaaaatagaaagcttccccagtgctttctgtcatcagagttgggatgattgtgaggttttgaatgatagtattggacctaagaaataggattagcatcatgatcagaactgttgagaatccttgtacaattatgtacattattgcatgtagagtaaacctgagagcttagagatgtatacgtttccactgctggaaaatcattataagttagggcaacattttctataggtggcagcagtaggagctcatcacattgaacattttcagattttaaaatgaaaattttcatccgtaggaatggcccaatgtatagttattagctactgagcttagaactcttgacccatgagattttttttttaaatttttatttttatagaggcaaggtcttgctatgttgtcaggctggtctcaagctcctggcctcatcagttctcctgccttccaagtagccggaactacaggtgtgcaccattgcacctggcctcatgagtattttagttagataagatttgtttggttcagtgggtcttagttttttaagacctgttaatttgtaattagacatcttgggccttaaactgtatttttgttttagtggtgaggttgggttttactttgtgtattccagcgttctcaactttgtcagatattgctagggaccagtgagatagataatccaaaaataataatttgactttggttgagtatgtcattaccacagtgttagttgaattgcactttaggttagaaaagttaattttcacatctgtgctgcgggttaggtgatattgtcctcagcacaatagatgaggaagaaactgaatcagaacagttaaatgacaggcttccaagtcatccatgtagcaaggagcacatttgcctcccaaactgatgctttttctctagaaccataatgcccccctaattacatttcagtagcatagaccgcaatgaacttcctactgtagggagacttgagtctggaatacattcagaacaaggttaacattacagttcttaatttcctttagggcaaacaagataattaaacttgggttttgtgagtctttttttgatttgcagattatatatggtaacacaataatggtggtttgtttttaagttttttctcatcaggtttgataatttaatgcaaacttcaaatctggatgtgaataataatatttttattatagtataatccaggtgagtttatagaatttgtgttttgtgcttataaactgtcaccttctgatacttttcttcatccctctatttgaaaaacccttgtagaatttaacgatttaatggaaaatgttgcactttatagaaggccattttagaacttacaggtaacctttttgaagagcttagatttgtagaccactgtttatgctgagtgacatttcttttaaatggttgcatttgtcaaatctataaagatgttttttatattgcagttttctttttgtgctacttaaaggaatctttgcaatgctgcatatagataattgttgacctttttagttcagcagtttttaaacttgaagtaacatcagcatttatttgaatatcaggttttagctaactgcctaatgtaccaaaaaaaaattagcaatgtcttatgtgggatgaggggttaagttaaagttgctgatcaagtaatggccgtgtggcacaagatgataactaagaatttctggttctaaggtagtaatgccttttgggatttatatttgtttaatgttgagattctggggaccataggtgggcctgtcaactcttaacagactatagtaaaggagagatggtggcacatgtgagataaaacttgtttatatttacattcttattagtggatagatatcacctcagtacaacactgaaattaaactgccttgttcatgctttcatgtctcaaatcaaggcctaaatgagtaaaaagatgattacagattacctaaaacccttaaccagttttggtttttgattatgcatatgtgttggcttgcaattaggtttttagtttctgtttatgtgacttgtttgaaaacattggattcgtcttctctccacagtttctacttgaacctagtagcttattttaattccctgtaagaggaaaataatatagggaatctgttcaactattcctttaataaatcatgtgacttggccaattacagaaattcctaagtgtagtattttgaaatgtggccagtgtcccagatttgtaaggtacagtgtgcatacagtgtgtcttaggatttttttaagtaaattaaggatgtttaccagaaattattgatttactgaaccaagtatttattttcagaagcccacttttggggaaggttgcctatatttttgatagtaattagatggaagattaaatcctgtttaacctggatagaaacagttttaactattgctgaagttaaaatcactttggggtggggtggggtggctcatgcctgtaatcccagtgctgtgggaggctgaggccagaggattgctcgaggccaggaatttgagaccagcttgggcaacatagcaagaccctgtctctacagataattgaaaagtgagccagatgtggtggcgcattcctatagtctccgtctctcaggaggctgaggcaggagattgcttgagcccaggagttggaggctgcagtgagttatgatcataccactgcactctaacctgggtgacagagtgagaccctgtctctaaaaaacaaaaaattagaaaacaacaaaaaccacttcggttactcactgtcctcatgctttgatgtcagttgttctcctaaattttaaaattttgttatgaagattggatgtacactgatttggccctttaaatgacattataccaagaagttggtataagggagtaggagatgagaaaactttttgaaaaatcatttggtgcatgctaaggtagcttgtaggacatgtggttttaaaaaattcatggattttgaagaaggatagggtggaagtaaaatttagctgatagcatagggatcatttgtgatttatatagaaaataattatatttttgagtgagaagcatcagacttaaatttttttcttctattttggttattaccaaaaggaacagagaaactctcagaattctttgaatcatagaatgttagtgctggaaaggactaggaagtgacttgtacaaccccttcattttacaaaggatcagagagaattggttagtagagtcccaaatctgcttttagaagtaatatggtgatcatcagtttagattcactgtaggaagggcagccctgttaaagtttgtcaggagaaaaagggaaggtatcactttttgtatgttcacccagttgcttctgtagttttcatacccctgttttctcaattttcttagaactgtctttaatggcccagctctaccagggcttgttgtctaaggacattaacttgtgctcccctcagggatgggtttactactagctgtcagaaagctattgggtatcctaatgtgttaatagctgaaactcagctgtaatttctcctaaatacttcagcattttgcattctgtacattgtggtgctttttccaccttgtattgttgtaactgtaagctcctagggggcagcaatttggtcttaggcgtgtaccctgtttagtgcctggcaatgccatgtttatatcaaggtcttaatattacttttgagttatttctcccactcttcatggaagtgatgctccagccttgctaaaacactgagggtcctcccgataagccaggcattgtgattccttggcttcaagtgccttctgtcttccccgaaggtccactgagatctacaatcccccctttcctctgatctcttgccatgtaagtaattttttaaaagatcagtacaagagctatattttttcctaagaaaaaatttcaacaggaatggggagtagccccgttttggggctgatctgtccagaatttggagtgaggaacaaatccattctcatctactttccacattttccctcttgtttgaggtcctgttccaaccttcatttctgaaactgttctagagcactttgtctttctcgtagttcataacttaccccttcagtctagaattagaattacattatctgttttactactttactagactgtaagctcctagaagataaggactagggagttcatctctgtattccaccagaaggtacagtgactcataactagagtctttagatgaaacttactgagttgaataacttaatatatttctgttttcattcccaagggaggccatgtctggagatagaccttgaatttaataaattttaggcactataccatttcagtggagaaaattgttgggaaatttggggggatggatatataagggggaggaagtcactggccagtttgaggtgcttccattggtctgggtaactagccatttcttcctgattgtgcctagtatatcccagacagtttgtttctatgcagaagaattttatatgaaattttcatttctttgcaaaaacttgttccttctttcagttcatgacatcatccatgctaaagtctgagtcatctgcttccatttttgttattccccacatccagtcttcagctaagtcctgtcagttctacctcaagtctttcccgtctttcttcctcacctatgtaatttcagtagtctctcagcttcacttaacctcttactccagcctactttatacacaatgttagattcatcttactgaaacatagttctgaccatgtattccatgtatgtgttctctctcccctattagactgtaagctccttatgggcaggatctgtgtctgagtcatctttgtatcttgcctagcacctatcaataaatacttcttgaatgaacaaatgaattctcatttctcgacataaagccttgtctaaagtgagatgttttccaggtcatacataggtttctccctggggtaattggaagttcttgcatataaagttggttaaatagtaataattatgagttaaccacagaaaatttcagaaaactttaatttttttccattggaatcagcatggatatgtgtatatggatggttcaataaatatacttttatatacatgtttcacagaaattttacattccatcttcaaactgcagaaatagattttttttttttacaagccaaaaaataactgccataacttttgtgacttcatgcaaaaaaaggggggaagagtaaggggcaaaagggaattagttgttcaaggttgagtgtccagtaagaagtaaaaatgttacattaaggaagcgattgcttaacacgctgcttaaggtggtagccagacaaatccttaactgcagcattaaggccataccaagtttatacatatatacaaagaaatttccatataaaagacatactatcacattttcttcttcataaggatgaggaactttgtaattctgacctgattttccaggccaattaattaaaatgtccccaggctgctttttagaagtatcttctactttggctagctgtcagagttgccgctatgtgagcttgtgacttctggtctggcgtgaaagtatgaatcatcttgaacctcttccatcatagcactatgttgctgagctaattcatgctgcccagctaagcacattttctacatccccaaagtatttggaatcacagcattgtaacttgtgattgtcttacctgtaacagactccacagtcatgctggcattgtgacctgaagaattacacagtgcccttcttagattctttggggttaaggtaacttcttgaataatgtactaatgaacgatagtgtttcaggaaacatgccctagctattggaagttcgtatctaacttttaccccttgtgtgtcatgatacatttaagttggtagctacatttttggaataaaggaaatgtaaaattatttgcagaataataacctgggatttgctcttctgcctaaacatcgaactagggaactttaaagacaaagggtgcatcttttgtgcaagtatctaagcgggcaaaatggggaaaacatgaagggcaagtcctttggggatgacttctaattaatgcagaagtcatttgctttggccaggttgggtgggactctgagattgcacactcttgccctgttggcagaaactagcccatcttaagttagtcaatgaatcctgagtcaaaatgaaaggttgctaaatctaagatcgagtgtataaataaaataaccccttcctccagtgactgtgcatttattttgtaataaactcattttggaatgttttagcaatgaa

SEQ ID NO: 12940 - DNA, 754 bp, Homo sapiens
  source 1..754: mol_type = unassigned DNA
aacggcctcgcggggcaggagtaagccgcggccgccgcctgggccccagggcggtctctggggccaggggtcccgcgcccagcgtttcccgcccgccaccctctccgccacgcgcccgcggcaccttttcctcccctggccaagggatccagtcggttcggaccagaaggaggctttcgtttagggtgggggcagcactaaagtctgattggagtcttgcggtccgcgcgtcgcagaagcgccttcggttttgcagagagcaaagagggagcagcgagtgcacggagtggtagtaacaaccaatgttctttccacgccctcactgtgtgtccggcactgtgcggagccacttttctgcctttcatttgattcttgcagtgagctggcgaggtttggacatatttgactcttttccccccaggttgaattgaccaaagcaatggtgatggagaagcctagtcccctgctggtcgggcgggaatttgtgagacagtattacacactgctgaaccaggccccagacatgctgcatagattttatggaaagaactcttcttatgtccatgggggattggattcaaatggaaagccagcagatgcagtctacggacagaaagaaatccacaggaaagtgatgtcacaaaacttcaccaactgccacaccaagattcgccatgttgatgctcatgccacgctaaatgatggtgtggtagtccaggtgatggggcttctctctaacaacaaccaggctttg

SEQ ID NO: 12941 - DNA, 2700 bp, Homo sapiens
  source 1..2700: mol_type = unassigned DNA
gtgcggacgcagttgcgtgaggggtttgtactatcctcggtgctgtggtgcagagctagttcctctccagctcagccgcgtaggtttggacatatttgactcttttccccccaggttgaattgaccaaagcaatggtgatggagaagcctagtcccctgctggtcgggcgggaatttgtgagacagtattacacactgctgaaccaggccccagacatgctgcatagattttatggaaagaactcttcttatgtccatgggggattggattcaaatggaaagccagcagatgcagtctacggacagaaagaaatccacaggaaagtgatgtcacaaaacttcaccaactgccacaccaagattcgccatgttgatgctcatgccacgctaaatgatggtgtggtagtccaggtgatggggcttctctctaacaacaaccaggctttgaggagattcatgcaaacgtttgtccttgctcctgagagtctgaagaagaagtagaggaacctgaagaaagacagcaaacacctgaggtggtacctgatgattctggaactttctatgatcaggcagttgtcagtaatgacatggaagaacatttagaggagcctgttgctgaaccagagcctgatcctgaaccagaaccagaacaagaacctgtatctgaaatccaagaggaaaagcctgagccagtattagaagaaactgcccctgaggatgctcagaagagttcttctccagcacctgcagacatagctcagacagtacaggaagacttgaggacattttcttgggcatctgtgaccagtaagaatcttccacccagtggagctgttccagttactgggataccacctcatgttgttaaagtaccagcttcacagccccgtccagagtctaagcctgaatctcagattccaccacaaagacctcagcgggatcaaagagtgcgagaacaacgaataaatattcctccccaaaggggacccagaccaatccgtgaggctggtgagcaaggtgacattgaaccccgaagaatggtgagacaccctgacagtcaccaactcttcattggcaacctgcctcatgaagtggacaaatcagagcttaaagatttctttcaaagttatggaaacgtggtggagttgcgcattaacagtggtgggaaattacccaattttggttttgttgtgtttgatgattctgagcctgttcagaaagtccttagcaacaggcccatcatgttcagaggtgaggtccgtctgaatgtcgaagagaagaagactcgagctgccagggaaggcgaccgacgagataatcgccttcggggacctggaggccctcgaggtgggctgggtggtggaatgagaggccctccccgtggaggcatggtgcagaaaccaggatttggagtgggaagggggcttgcgccacggcagtgaatcttcatggatcttcatgcagccatacaaaccctggttccaacagaatggtgaattttcgacagcctttggtatcttggagtatgaccccagtctgttataaactgcttaagtttgtataattttactttttttgtgtgttaatggtgtgtgctccctctccctctcttccctttcctgacctttagtctttcacttccaattttgtggaatgatattttaggaataacggacttttaaagaagcaaaaaaaaagactgaatttccttgcttactttgcatatacagactggattttttttttttttttacagccatttccccaaaggaatgtcttgcatattactgacatttggtatgtttcattcattggaatatttcttattttctacgtgtttgaaaagcctgtaagaaatacaggatttgataatattttgaaggcaggaaaaacccaaattgtttcttctttgagagtcatgactaccttctggtgtggagaaattgccattggaaaatttgacaattttgattctcactggtatgtttaaaaactgaataaaaggaatagaatttttttttgataaaggatcacaaaacaattctaaaacctaactgtttttaccattgaaatttaaattgtgataataggttttaaatgtctagaatgcaactgataggcttttcttgaactgttagtttttttgaagtagttttttcatgtttaatttgtatttgtaaaaaaacaaaaagcaaaaaaattcccaaaacccagataacaaccagagcaaaactgttgtgccttctatttatctttgatttcagtcttggcaattgtttaaaaaaaaaatctagatttgttttattaggttcagagtatgtggggaattatagaatccctctttcatcactttgtgtatgtcttttgttaacatatttgttatgccttattctaaaattgagtctcaaactggaatgcctttgaagacagatgcttctatagaggttctttgacctaaatagttcagcatttgtatttttattctggtatctaatcagattcctaatcatagcccgtaagaaggaatgttactttaatattggactttgctcatgtgctcgtgtccgcatttttttttttcttaaaatcatagccatatggtaaattttctattttgttatggttctcttttattgatgggcatgcagtgggtgttacttggaaatggccaatttttattaaaatatttctggaagaaaa

SEQ ID NO: 12942 - DNA, 530 bp, Homo sapiens
  source 1..530: mol_type = unassigned DNA
gcgcccgccaagaagcgcctggcggaagggcgcactctcaggccttccaccggcgaccttccggcgggagcctgcgggcggcgcaggaacgaccctccttcctctgccccgcagcagtgctgagtaatggtgagagcagcaaggcccttggccgccgcacgttgaattgaccaaagcaatggtgatggagaagcctagtcccctgctggtcgggcgggaatttgtgagacagtattacacactgctgaaccaggccccagacatgctgcatagattttatggaaagaactcttcttatgtccatgggggattggattcaaatggaaagccagcagatgcagtctacggacagaaagaaatccacaggaaagtgatgtcacaaaacttcaccaactgccacaccaagattcgccatgttgatgctcatgccacgctaaatgatggtgtggtagtccaggtgatggggcttctctctaacaacaaccaggctttgaggagattcatgcaaacgtttgtccttgctcctgagg

SEQ ID NO: 12943 - DNA, 580 bp, Homo sapiens
  source 1..580: mol_type = unassigned DNA
gtgcggacgcagttgcgtgaggggtttgtactatcctcggtgctgtggtgcagagctagttcctctccagctcagccgcgtaggtttggacatatttgactcttttccccccaggttgaattgaccaaagcaatggtgatggagaagcctagtcccctgctggtcgggcgggaatttgtgagacagtattacacactgctgaaccaggccccagacatgctgcatagattttatggaaagaactcttcttatgtccatgggggattggattcaaatggaaagccagcagatgcagtctacggacagaaagaaatccacaggaaagtgatgtcacaaaacttcaccaactgccacaccaagattcgccatgttgatgctcatgccacgctaaatgatggtgtggtagtccaggtgatggggcttctctctaacaacaaccaggctttgaggagattcatgcaaacgtttgtccttgctcctgagagtctgaagaagaagtagaggaacctgaagaaagacagcaaacacctgaggtggtacctgatgattctggaactttctatgatcaggcagttgtcag

SEQ ID NO: 12944 - DNA, 535 bp, Homo sapiens
  source 1..535: mol_type = unassigned DNA
acaaagggagcctcgccacacgcccgcggccgcctcgcagcgcccgccaagaagcgcctggcggaagggcgcactctcaggccttccaccggcgaccttccggcgggagcctgcgggcggcgcaggaacgaccctccttcctctgccccgcagcagtgctgagtaatggtttggacatatttgactcttttccccccaggttgaattgaccaaagcaatggtgatggagaagcctagtcccctgctggtcgggcgggaatttgtgagacagtattacacactgctgaaccaggccccagacatgctgcatagattttatggaaagaactcttcttatgtccatgggggattggattcaaatggaaagccagcagatgcagtctacggacagaaagaaatccacaggaaagtgatgtcacaaaacttcaccaactgccacaccaagattcgccatgttgatgctcatgccacgctaaatgatggtgtggtagtccaggtgatggggcttctctctaacaacaaccaggctttgagg

SEQ ID NO: 12945 - DNA, 1763 bp, Homo sapiens
  source 1..1763: mol_type = unassigned DNA
ttatatagaccggcggcggagcacgcgtgtgtgcggacgcagttgcgtgaggggtttgtactatcctcggtgctgtggtgcagagctagttcctctccagctcagccgcgtaggtttggacatatttgactcttttccccccaggttgaattgaccaaagcaatggtgatggagaagcctagtcccctgctggtcgggcgggaatttgtgagacagtattacacactgctgaaccaggccccagacatgctgcatagattttatggaaagaactcttcttatgtccatgggggattggattcaaatggaaagccagcagatgcagtctacggacagaaagaaatccacaggaaagtgatgtcacaaaacttcaccaactgccacaccaagattcgccatgttgatgctcatgccacgctaaatgatggtgtggtagtccaggtgatggggcttctctctaacaacaaccaggctttgaggagattcatgcaaacgtttgtccttgctcctgaggttcatcttgcactgttcctggcccagtccctattcttgaatcagctgttccttcaaggaggcctggttctttttagttatacttatgaaaggacgacaagtttatgttgaatgattgcatttgtgttttcttccggattggtctagactgaacaagagtctgaagaagaagtagaggaacctgaagaaagacagcaaacacctgaggtggtacctgatgattctggaactttctatgatcaggcagttgtcagtaatgacatggaagaacatttagaggagcctgttgctgaaccagagcctgatcctgaaccagaaccagaacaagaacctgtatctgaaatccaagaggaaaagcctgagccagtattagaagaaactgcccctgaggatgctcagaagagttcttctccagcacctgcagacatagctcagacagtacaggaagacttgaggacattttcttgggcatctgtgaccagtaagaatcttccacccagtggagctgttccagttactgggataccacctcatgttgttaaagtaccagcttcacagccccgtccagagtctaagcctgaatctcagattccaccacaaagacctcagcgggatcaaagagtgcgagaacaacgaataaatattcctccccaaaggggacccagaccaatccgtgaggctggtgagcaaggtgacattgaaccccgaagaatggtgagacaccctgacagtcaccaactcttcattggcaacctgcctcatgaagtggacaaatcagagcttaaagatttctttcaaagttatggaaacgtggtggagttgcgcattaacagtggtgggaaattacccaattttggttttgttgtgtttgatgattctgagcctgttcagaaagtccttagcaacaggcccatcatgttcagaggtgaggtccgtctgaatgtcgaagagaagaagactcgagctgccagggaaggcgaccgacgagataatcgccttcggggacctggaggccctcgaggtgggctgggtggtggaatgagaggccctccccgtggaggcatggtgcagaaaccaggatttggagtgggaagggggcttgcgccacggcagtgaatcttcatggatcttcatgcagccatacaaaccctggttccaacagaatggtgaattttcgacagcctttggtatcttggagtatgaccccagtctgttataaactgcttaagtttgtataattttactttttt

SEQ ID NO: 12946 - DNA, 6783 bp, Homo sapiens
  source 1..6783: mol_type = unassigned DNA
aagccaacaggcgagtggcgaaggtggcggcagcggcggcgggggcagtcaccggctagggcgacggctccgaggccgagtggcggtccgacagagtcctccgtgtcctcccccgcatgacccccttgtgatcagcctttgagcctttcccacattgaagatggtgaaactagatattcatactctggctcatcacctcaagcaggaacgcttatatgtaaactctgagaaacagctcattcagaggctcaatgcagatgtacttaagacagctgaaaagttgtatcgtacagcatggattgcgaagcaacagagaatcaatttggatcggcttatcataaccagtgctgaagcttcccctgctgaatgttgccaacatgccaaaattttggaagatacacaatttgttgatgggtataagcaattgggatttcaggagactgcttatggagaattcttgagtcgattgagggaaaatcctcgtcttattgcctcctctttggttgctggagagaaacttaatcaggagaacacacaaagtgttatttacacagtttttacctccctgtatggcaattgcatcatgcaagaagatgaaagctacctccttcaggttttgcgatacttgattgaatttgaacttaaagaaagtgacaaccctaggcgacttttgaggagaggaacttgtgccttcagcatcttatttaaacttttttctgaaggactgttttctgccaaacttttcctcacagccactttacatgagccaattatgcaactgcttgttgaagatgaagatcacctggaaacagatccaaacaagctaattgagaggttctctccatctcagcaggaaaaactctttggagagaagggctcagatagattcaggcaaaaagttcaagaaatggtggagtccaatgaagcaaagctagtggctttggtgaacaaatttattggttatctcaaacagaacacatattgttttccacatagtttaaggtggatcgtgtctcagatgtacaaaaccctctcctgtgtagataggctggaagttggggaggtcagggcaatgtgtactgatctcctgttggcctgcttcatttgtcctgcagttgtcaatccagaacaatatggaataatttccgatgctcctattaatgaagtagcacgatttaatctgatgcaggtaggccgccttttgcagcagttagcaatgactggctctgaagagggagatccccgaacaaagagcagccttggaaagtttgacaaaagctgtgttgccgctttccttgatgttgtgattgggggccgtgcagtggagacccctccattgtcttccgtcaatcttctggaaggattgagcagaactgtggtttatataacctacagtcagcttattactctggtgaattttatgaagagtgtgatgtctggagatcaactgagagaagatagaatggctcttgacaatttattggcaaacctacccccggccaagccaggaaaaagtagcagtttagaaatgactccctacaatacacctcagctatctccagcaaccactccagcaaataaaaagaatcgattacctatagcaactcggagcagaagccgcaccaatatgctaatggacctacatatggaccatgaaggatcatctcaagaaaccattcaggaggtgcaaccagaagaggtgttggtcatttccttaggtacaggtccccagcttactccagggatgatgtcagaaaatgaggtcctaaacatgcagctttcggatggaggacaaggagatgtccctgttgatgaaaacaaactccatggtaaacctgataaaaccttgcgcttttccctctgcagtgataatctggaaggaatatctgaaggtccttcaaatcgctccaattcagtgtcctccctagacctagaaggagagtctgtgtcagaacttggagcaggaccttctggcagtaatggagttgaagctctacagctgttagaacatgagcaagctacaacacaggataaccttgatgataagctaaggaagtttgaaattcgtgacatgatgggattaacagatgatagggacatatcagaaacagtgagtgagacctggagtacagacgtcttgggaagtgactttgaccctaatattgatgaagatcgcttgcaagaaattgcaggtgctgcagcagagaacatgttaggcagtttgctgtgcctcccaggttcagggtcagtgcttcttgacccctgcactggttctaccatatcagagacaacaagtgaagcttggagtgtagaggtattgccaagtgactcagaggccccagacctaaagcaggaggagcgtctgcaagaactggagagctgttctggactgggtagcacatctgatgatacggatgtcagggaggtcagttcccgccccagcacaccaggcctcagtgttgtgtccggcataagtgcaacctctgaggatattcccaataagattgaagacctgagatctgagtgcagctctgattttgggggtaaagattctgtcactagtccagacatggatgaaataactcacggggcttctgctgtggtaaggccaaaggttcactatgctaggccatcgcatccaccaccagatcccccaatcctggaaggagctgtgggaggaaatgaggccaggttgccaaactttggttcccatgttttaactccagctgaaatggaggcattcaagcaaaggcattcttaccctgagagactagttcgaagcaggagctctgatatagtatcttctgtccggagacccatgagtgaccccagctggaaccggcgtccaggaaatgaagagcgagaactccctccagctgcagccattggtgctacttctttggtggctgcacctcattcatcatcttcatccccgagtaaggactcctcaagaggagagactgaagaacgcaaagatagcgatgatgagaaatcagacaggaacagaccttggtggagaaaacgttttgtttcagccatgcctaaagctcctataccatttagaaagaaagaaaaacaagaaaaagacaaagatgatctggggcctgacagattctcaacactcacagatgatcccagccctagactcagtgcacaagctcaggtggctgaggatattctggacaaatacaggaatgccattaaacggaccagccccagtgatggagcaatggcaaactatgaaagtacaggtgataatcatgacagagatttgagtagtaaacttttatatcatagtgataaagaggttatgggtgatggtgaaagtgcacatgattctccccgtgacgaagcactgcagaacatctcggctgatgatctcccagactctgcaagccaagcagcccacccgcaggattcagctttctcttacagagatgcaaaaaagaaactgaggcttgctctttgctctgcggactctgttgccttcccagtgctgacccattcaacaaggaatggtttaccagaccacacagacccagaagacaatgaaattgtatgcttcttaaaagttcaaatagctgaagcaattaatttacaagataagaatctaatggctcaacttcaagaaacaatgcgctgtgtgtgccgttttgataataggacttgtaggaaactgctggcttcgattgctgaggactacagaaaaagagccccatatattgcttatctcactcgttgtcgacaaggactacagaccacacaggctcacctggaaaggctattgcaaagagttttgcgggacaaagaagtggccaatcgatactttaccactgtctgtgtgagattactgcttgagagcaaagaaaagaagatcagggaattcattcaagactttcagaaactcaccgcagctgacgataaaactgctcaggtagaagattttctgcagtttctttatggtgcaatggcccaggatgtcatatggcaaaacgcgagtgaagaacagcttcaagatgcacagctggccattgagcgaagcgtgatgaaccggattttcaagctcgccttctaccctaatcaagatggggacatacttcgcgaccaggttcttcatgaacatatccagagattgtctaaagtagtgactgcaaatcacagagctcttcagataccagaggtttatcttcgagaagcaccatggccatctgcacaatcagaaatcaggacaataagtgcttataaaaccccccgggacaaagtgcagtgcatcctgagaatgtgctctacgattatgaacctcctgagcctggccaatgaggactctgtccctggagcggatgactttgttcctgtgttggtgtttgtgttgataaaggcaaatccaccctgtttgctgtctactgtgcagtatatcagtagcttttatgctagctgtctgtctggagaggagtcctattggtggatgcagttcacagcagcagtagaattcattaaaaccatcgatgaccgaaagtgaccaagaccaaggcccaccaaggcagcagactgttaatcagacaaacagatctctgagaaggtgcatcagctgctttgaaggctgaagattgttttgtatgatactgcacagcatcaggcattttaaagcagatctttactaaacaggttaatgagctaacaagcaggttctctcgtctttgggctctttcctttctgagttgcatattctattttcttgtccccaagtagagactagtactacaaaaagggaccacatttttcaagtatttctaagtataaaaaacaaaacaaaaatctcttaggaaatgtctagacctccattcttggattccctttctttccttttattttaaaaaagaacagtacccctcttttaagatgctgtcttacattaatgagcatctaatggaaagaaggtatgagttgcactgaggattagaatagtggtgcgttagtggcattatctataaatacactcacctaaattgaaagctaagaaggaaatgtaaatataatatatatttatatttgatgtaatatggacatctgcagattctaataaacaaggactattgctgatagtaggctgtgacatactgtcttgtgaaatggtttccttgacaaaatttaagctgagcttaaaagcaaaaaacaaaaagtacacagaaatatttattaaaatgtaatacagtttattgaactttctaggtatggagtttgatggacagggctgcctttaatgagtgtgaaggtcactaagtcacttagacatctcaccgtggaagtttgtgagcctgcattaggagatagactgattaccatacatgacataaaaaggaacagtggatagctcatactttatggtggttcttctcctccgaaataatatactgcagaaatcccagacagagctccttacaaacctttaattgtaatatatttttgatgattattcacattgaatgcacagaccaagaattcagtgaatgtcattttttaaaaaactaatttgtattgtctgctctagtgatacaagttttactagtgataaactattttaatcaaccatactattcttatggaaaaaaatatctattttggcaggtttctgtgcctttatttccctcttctgaaaaaaagtctgtgttttcatagtttggtttgcattgtatatcaataattaatcaggaatgggttttggtgcctgaaaaattggccatggaggcacaccaaagcttcaagcacaagtcttgtacatgggccatcactgtctggtttcacttcgtgtgtttcctaaacacatttagctgcttttttaacaaactcagccccatacttgagtcccttgttgttgggagcatttccaggcatcttttaagggaactgtgacaaacagcctcgggcagatgaacacggaggctctctgttgtctgtctctgagatctttgtgtctgggaatgcctaaagattttatttttttttctttgtttttattttattttattttatttttttgagacagagtctcaccctgttgcccaggctggagtgcaatggtgcgatcttggctcactgcaacctccacctcccagttcaagtgattcccctgcctcagcctcgcgagtagctaggactacaggcgcatgtcaccaagcccggctaatttttgtatttttagtagaaacggggtttcaccatgttggccaggatgatcctcaatctcctgacctcgtgatccacccgccttggcctcccaaagtgcgggattacaagcgtgaaccaccctgcccagccagaaactagattttctttatgcctccaccccttcttattcatttactttacaataccaaaataacaaattgcataggagtgtgggatgtggtttctgccttctagagagagatcagaattaaactagtactatgaaatgtccttttgaatgttaggtcaagaaatccatgtacagagtcgtgcacttcattggctgtaactgtcaaacttgccttgtattagaagttaaatcccatcgtaaatacatcacgaggccagctgtgtgatttctgagacctagatgagagtccatttacttcagcctttgattcagtaaatgttaagcagcagaagacttcgaatggttgaaattcattgttacaggatttaactcataaaccaatgagagattttttttttctctgcaatggttgctaagtctattccatgttaacactgtggaaataaatatgaagatgtggacattgc

SEQ ID NO: 12947 - DNA, 3190 bp, Homo sapiens
  source 1..3190: mol_type = unassigned DNA
gggaagccaacaggcgagtggcgaaggtggcggcagcggcggcgggggcagtcaccggctagggcgacggctccgaggccgagtggcggtccgacagagtcctccgtgtcctcccccgcatgacccccttggggtaagtgtactggagagagttggttatacattctaggaatctcaaagggtctggctctgtcacccaggctggagtgcagtgacacgatctcagctcactgtaacctccgcctcccgggttcaagcgatcctcccatctgaccctcccaagtagctggcattcagtgatcagcctttgagcctttcccacattgaagatggtgaaactagatattcatactctggctcatcacctcaagcaggaacgcttatatgtaaactctgagaaacagctcattcagaggctcaatgcagatgtacttaagacagctgaaaagttgtatcgtacagcatggattgcgaagcaacagagaatcaatttggatcggcttatcataaccagtgctgaagcttcccctgctgaatgttgccaacatgccaaaattttggaagatacacaatttgttgatgggtataagcaattgggatttcaggagactgcttatggagaattcttgagtcgattgagggaaaatcctcgtcttattgcctcctctttggttgctggagagaaacttaatcaggagaacacacaaagtgttatttacacagtttttacctccctgtatggcaattgcatcatgcaagaagatgaaagctacctccttcaggttttgcgatacttgattgaatttgaacttaaagaaagtgacaaccctaggcgacttttgaggagaggaacttgtgccttcagcatcttatttaaacttttttctgaaggactgttttctgccaaacttttcctcacagccactttacatgagccaattatgcaactgcttgttgaagatgaagatcacctggaaacagatccaaacaagctaattgagaggttctctccatctcagcaggaaaaactctttggagagaagggctcagatagattcaggcaaaaagttcaagaaatggtggagtccaatgaagcaaagctagtggctttggtgaacaaatttattggttatctcaaacagaacacatattgttttccacatagtttaaggtggatcgtgtctcagatgtacaaaaccctctcctgtgtagataggctggaagttggggaggtcagggcaatgtgtactgatctcctgttggcctgcttcatttgtcctgcagttgtcaatccagaacaatatggaataatttccgatgctcctattaatgaagtagcacgatttaatctgatgcaggtaggccgccttttgcagcagttagcaatgactggctctgaagagggagatccccgaacaaagagcagccttggaaagtttgacaaaagctgtgttgccgctttccttgatgttgtgattgggggccgtgcagtggagacccctccattgtcttccgtcaatcttctggaaggattgagcagaactgtggtttatataacctacagtcagcttattactctggtgaattttatgaagagtgtgatgtctggagatcaactgagagaagatagaatggctcttgacaatttattggcaaacctacccccggccaagccaggaaaaagtagcagtttagaaatgactccctacaatacacctcagctatctccagcaaccactccagcaaataaaaagaatcgattacctataggtaaagagaatttctcgtattggagctttctcttaaatctaatatttcattagcctttgttattgctgagtgttttggaacatatgtttaagtacttgggaaagtctttctcttcatgtttactgatggtatttcagtttttagaaatcgtatcagattagttaaggtttatcagtagtctttagctttgcctacatacttttcataattaattgaagtcatgctatccacagtatactttctttaaattttattgtcttttcttgaaaaaattttggaaatgttataagtagtcatctttaaaactatgtagccctcagcctggtgtggtggcacgtgcctgtggtccctgctacttgggaggctgagatggggagattgcttgagcctgggaggtcgaggctgcagtgaaccatgattgtgccactgcacttcagcctgggtgaccctgagtgagaccctatctcaaaaaaaaaaaaaattatgtagccccctcctttctacaaagttctaaataatataataaacaatattattttagaagtttccatcaataaagtggaaaataatagtattttctattattttcattaacaatcagtcttttatcaactgagctaagatatcttaatattacaaaatgaagcaaaagtttcattttattttttcaagtttgtttatttaagaattctatttaattaagccttatttgcttggttaacatttgctatctatctgtctataaaaaaattaattgagcatataccatgttccatactgtgggtaggcactttataaatgttgtttcatttaatccccacagaagtcctgtgagagtggatgtgtcttgcacatgaggcactgtgatagacactggatacaaagaccattaggacctgcccttactgtcaagttggctgttgatagtttagttagggagagcaagaagagactagtacccttcagcatactaagcgttctgaggagataaatatgagggttatggtgacacctaacttagccaaaatggtagtggtatcaggagaagatcttggagcaggtgaagtctgtttgcactttgtgatgaatgggagttagacaaagtaaacaagatgaggaaaaagtgtttaagccaggggaacaggagtattttagtgcctgcctatttataacgaggaactcagcaacacttagtgaacatagttctttttaatttatgcattttgaagagagggattttacttttaaacttctgtgagctaattttttaagaactgccagtttcttaaaattaatctaccttatatttaacgtaatgtggaattgtatcaacaggagtgtggcatcatactcttcaagtctttgtcttattgtatcaccccaaaatgtcagttttcaaaataaaaaatagaaaaagcga

SEQ ID NO: 12948 - DNA, 6861 bp, Homo sapiens
  source 1..6861: mol_type = unassigned DNA
aagccaacaggcgagtggcgaaggtggcggcagcggcggcgggggcagtcaccggctagggcgacggctccgaggccgagtggcggtccgacagagtcctccgtgtcctcccccgcatgacccccttgtgatcagcctttgagcctttcccacattgaagatggtgaaactagatattcatactctggctcatcacctcaagcaggaacgcttatatgtaaactctgagaaacagctcattcagaggctcaatgcagatgtacttaagacagctgaaaagttgtatcgtacagcatggattgcgaagcaacagagaatcaatttggatcggcttatcataaccagtgctgaagcttcccctgctgaatgttgccaacatgccaaaattttggaagatacacaatttgttgatgggtataagcaattgggatttcaggagactgcttatggagaattcttgagtcgattgagggaaaatcctcgtcttattgcctcctctttggttgctggagagaaacttaatcaggagaacacacaaagtgttatttacacagtttttacctccctgtatggcaattgcatcatgcaagaagatgaaagctacctccttcaggttttgcgatacttgattgaatttgaacttaaagaaagtgacaaccctaggcgacttttgaggagaggaacttgtgccttcagcatcttatttaaacttttttctgaaggactgttttctgccaaacttttcctcacagccactttacatgagccaattatgcaactgcttgttgaagatgaagatcacctggaaacagatccaaacaagctaattgagaggttctctccatctcagcaggaaaaactctttggagagaagggctcagatagattcaggcaaaaagttcaagaaatggtggagtccaatgaagcaaagctagtggctttggtgaacaaatttattggttatctcaaacagaacacatattgttttccacatagtttaaggtggatcgtgtctcagatgtacaaaaccctctcctgtgtagataggctggaagttggggaggtcagggcaatgtgtactgatctcctgttggcctgcttcatttgtcctgcagttgtcaatccagaacaatatggaataatttccgatgctcctattaatgaagtagcacgatttaatctgatgcaggtaggccgccttttgcagcagttagcaatgactggctctgaagagggagatccccgaacaaagagcagccttggaaagtttgacaaaagctgtgttgccgctttccttgatgttgtgattgggggccgtgcagtggagacccctccattgtcttccgtcaatcttctggaaggattgagcagaactgtggtttatataacctacagtcagcttattactctggtgaattttatgaagagtgtgatgtctggagatcaactgagagaagatagaatggctcttgacaatttattggcaaacctacccccggccaagccaggaaaaagtagcagtttagaaatgactccctacaatacacctcagctatctccagcaaccactccagcaaataaaaagaatcgattacctatagcaactcggagcagaagccgcaccaatatgctaatggacctacatatggaccatgaaggatcatctcaagaaaccattcaggaggtgcaaccagaagaggtgttggtcatttccttaggtacaggtccccagcttactccagggatgatgtcagaaaatgaggtcctaaacatgcagctttcggatggaggacaaggagatgtccctgttgatgaaaacaaactccatggtaaacctgataaaaccttgcgcttttccctctgcagtgataatctggaaggaatatctgaaggtccttcaaatcgctccaattcagtgtcctccctagacctagaaggagagtctgtgtcagaacttggagcaggaccttctggcagtaatggagttgaagctctacagctgttagaacatgagcaagctacaacacaggataaccttgatgataagctaaggaagtttgaaattcgtgacatgatgggattaacagatgatagggacatatcagaaacagtgagtgagacctggagtacagacgtcttgggaagtgactttgaccctaatattgatgaagatcgcttgcaagaaattgcaggtgctgcagcagagaacatgttaggcagtttgctgtgcctcccaggttcagggtcagtgcttcttgacccctgcactggttctaccatatcagagacaacaagtgaagcttggagtgtagaggtattgccaagtgactcagaggccccagacctaaagcaggaggagcgtctgcaagaactggagagctgttctggactgggtagcacatctgatgatacggatgtcagggaggtcagttcccgccccagcacaccaggcctcagtgttgtgtccggcataagtgcaacctctgaggatattcccaataagattgaagacctgagatctgagtgcagctctgattttgggggtaaagattctgtcactagtccagacatggatgaaataactcacggtgcccaccagctgacctctcctccttctcagtcagagtctctgctggccatgtttgatccactgtcttcacatgaaggggcttctgctgtggtaaggccaaaggttcactatgctaggccatcgcatccaccaccagatcccccaatcctggaaggagctgtgggaggaaatgaggccaggttgccaaactttggttcccatgttttaactccagctgaaatggaggcattcaagcaaaggcattcttaccctgagagactagttcgaagcaggagctctgatatagtatcttctgtccggagacccatgagtgaccccagctggaaccggcgtccaggaaatgaagagcgagaactccctccagctgcagccattggtgctacttctttggtggctgcacctcattcatcatcttcatccccgagtaaggactcctcaagaggagagactgaagaacgcaaagatagcgatgatgagaaatcagacaggaacagaccttggtggagaaaacgttttgtttcagccatgcctaaagctcctataccatttagaaagaaagaaaaacaagaaaaagacaaagatgatctggggcctgacagattctcaacactcacagatgatcccagccctagactcagtgcacaagctcaggtggctgaggatattctggacaaatacaggaatgccattaaacggaccagccccagtgatggagcaatggcaaactatgaaagtacaggtgataatcatgacagagatttgagtagtaaacttttatatcatagtgataaagaggttatgggtgatggtgaaagtgcacatgattctccccgtgacgaagcactgcagaacatctcggctgatgatctcccagactctgcaagccaagcagcccacccgcaggattcagctttctcttacagagatgcaaaaaagaaactgaggcttgctctttgctctgcggactctgttgccttcccagtgctgacccattcaacaaggaatggtttaccagaccacacagacccagaagacaatgaaattgtatgcttcttaaaagttcaaatagctgaagcaattaatttacaagataagaatctaatggctcaacttcaagaaacaatgcgctgtgtgtgccgttttgataataggacttgtaggaaactgctggcttcgattgctgaggactacagaaaaagagccccatatattgcttatctcactcgttgtcgacaaggactacagaccacacaggctcacctggaaaggctattgcaaagagttttgcgggacaaagaagtggccaatcgatactttaccactgtctgtgtgagattactgcttgagagcaaagaaaagaagatcagggaattcattcaagactttcagaaactcaccgcagctgacgataaaactgctcaggtagaagattttctgcagtttctttatggtgcaatggcccaggatgtcatatggcaaaacgcgagtgaagaacagcttcaagatgcacagctggccattgagcgaagcgtgatgaaccggattttcaagctcgccttctaccctaatcaagatggggacatacttcgcgaccaggttcttcatgaacatatccagagattgtctaaagtagtgactgcaaatcacagagctcttcagataccagaggtttatcttcgagaagcaccatggccatctgcacaatcagaaatcaggacaataagtgcttataaaaccccccgggacaaagtgcagtgcatcctgagaatgtgctctacgattatgaacctcctgagcctggccaatgaggactctgtccctggagcggatgactttgttcctgtgttggtgtttgtgttgataaaggcaaatccaccctgtttgctgtctactgtgcagtatatcagtagcttttatgctagctgtctgtctggagaggagtcctattggtggatgcagttcacagcagcagtagaattcattaaaaccatcgatgaccgaaagtgaccaagaccaaggcccaccaaggcagcagactgttaatcagacaaacagatctctgagaaggtgcatcagctgctttgaaggctgaagattgttttgtatgatactgcacagcatcaggcattttaaagcagatctttactaaacaggttaatgagctaacaagcaggttctctcgtctttgggctctttcctttctgagttgcatattctattttcttgtccccaagtagagactagtactacaaaaagggaccacatttttcaagtatttctaagtataaaaaacaaaacaaaaatctcttaggaaatgtctagacctccattcttggattccctttctttccttttattttaaaaaagaacagtacccctcttttaagatgctgtcttacattaatgagcatctaatggaaagaaggtatgagttgcactgaggattagaatagtggtgcgttagtggcattatctataaatacactcacctaaattgaaagctaagaaggaaatgtaaatataatatatatttatatttgatgtaatatggacatctgcagattctaataaacaaggactattgctgatagtaggctgtgacatactgtcttgtgaaatggtttccttgacaaaatttaagctgagcttaaaagcaaaaaacaaaaagtacacagaaatatttattaaaatgtaatacagtttattgaactttctaggtatggagtttgatggacagggctgcctttaatgagtgtgaaggtcactaagtcacttagacatctcaccgtggaagtttgtgagcctgcattaggagatagactgattaccatacatgacataaaaaggaacagtggatagctcatactttatggtggttcttctcctccgaaataatatactgcagaaatcccagacagagctccttacaaacctttaattgtaatatatttttgatgattattcacattgaatgcacagaccaagaattcagtgaatgtcattttttaaaaaactaatttgtattgtctgctctagtgatacaagttttactagtgataaactattttaatcaaccatactattcttatggaaaaaaatatctattttggcaggtttctgtgcctttatttccctcttctgaaaaaaagtctgtgttttcatagtttggtttgcattgtatatcaataattaatcaggaatgggttttggtgcctgaaaaattggccatggaggcacaccaaagcttcaagcacaagtcttgtacatgggccatcactgtctggtttcacttcgtgtgtttcctaaacacatttagctgcttttttaacaaactcagccccatacttgagtcccttgttgttgggagcatttccaggcatcttttaagggaactgtgacaaacagcctcgggcagatgaacacggaggctctctgttgtctgtctctgagatctttgtgtctgggaatgcctaaagattttatttttttttctttgtttttattttattttattttatttttttgagacagagtctcaccctgttgcccaggctggagtgcaatggtgcgatcttggctcactgcaacctccacctcccagttcaagtgattcccctgcctcagcctcgcgagtagctaggactacaggcgcatgtcaccaagcccggctaatttttgtatttttagtagaaacggggtttcaccatgttggccaggatgatcctcaatctcctgacctcgtgatccacccgccttggcctcccaaagtgcgggattacaagcgtgaaccaccctgcccagccagaaactagattttctttatgcctccaccccttcttattcatttactttacaataccaaaataacaaattgcataggagtgtgggatgtggtttctgccttctagagagagatcagaattaaactagtactatgaaatgtccttttgaatgttaggtcaagaaatccatgtacagagtcgtgcacttcattggctgtaactgtcaaacttgccttgtattagaagttaaatcccatcgtaaatacatcacgaggccagctgtgtgatttctgagacctagatgagagtccatttacttcagcctttgattcagtaaatgttaagcagcagaagacttcgaatggttgaaattcattgttacaggatttaactcataaaccaatgagagattttttttttctctgcaatggttgctaagtctattccatgttaacactgtggaaataaatatgaagatgtggacattgc

SEQ ID NO: 12949 - DNA, 5207 bp, Homo sapiens
  source 1..5207: mol_type = unassigned DNA
aagccaacaggcgagtggcgaaggtggcggcagcggcggcgggggcagtcaccggctagggcgacggctccgaggccgagtggcggtccgacagagtcctccgtgtcctcccccgcatgacccccttgtgatcagcctttgagcctttcccacattgaagatggtgaaactagatattcatactctggctcatcacctcaagcaggaacgcttatatgtaaactctgagaaacagctcattcagaggctcaatgcagatgtacttaagacagctgaaaagttgtatcgtacagcatggattgcgaagcaacagagaatcaatttggatcggcttatcataaccagtgctgaagcttcccctgctgaatgttgccaacatgccaaaattttggaagatacacaatttgttgatgggtataagcaattgggatttcaggagactgcttatggagaattcttgagtcgattgagggaaaatcctcgtcttattgcctcctctttggttgctggagagaaacttaatcaggagaacacacaaagtgttatttacacagtttttacctccctgtatggcaattgcatcatgcaagaagatgaaagctacctccttcaggttttgcgatacttgattgaatttgaacttaaagaaagtgacaaccctaggcgacttttgaggagaggaacttgtgccttcagcatcttatttaaacttttttctgaaggactgttttctgccaaacttttcctcacagccactttacatgagccaattatgcaactgcttgttgaagatgaagatcacctggaaacagatccaaacaagctaattgagaggttctctccatctcagcaggaaaaactctttggagagaagggctcagatagattcaggcaaaaagttcaagaaatggtggagtccaatgaagcaaagctagtggctttggtgaacaaatttattggttatctcaaacagaacacatattgttttccacatagtttaaggtggatcgtgtctcagatgtacaaaaccctctcctgtgtagataggctggaagttggggaggtcagggcaatgtgtactgatctcctgttggcctgcttcatttgtcctgcagttgtcaatccagaacaatatggaataatttccgatgctcctattaatgaagtagcacgatttaatctgatgcaggtaggccgccttttgcagcagttagcaatgactggctctgaagagggagatccccgaacaaagagcagccttggaaagtttgacaaaagctgtgttgccgctttccttgatgttgtgattgggggccgtgcagtggagacccctccattgtcttccgtcaatcttctggaaggattgagcagaactgtggtttatataacctacagtcagcttattactctggtgaattttatgaagagtgtgatgtctggagatcaactgagagaagatagaatggctcttgacaatttattggcaaacctacccccggccaagccaggaaaaagtagcagtttagaaatgactccctacaatacacctcagctatctccagcaaccactccagcaaataaaaagaatcgattacctatagcaactcggagcagaagccgcaccaatatgctaatggacctacatatggaccatgaaggatcatctcaagaaaccattcaggaggtgcaaccagaagaggtgttggtcatttccttaggtacaggtccccagcttactccagggatgatgtcagaaaatgaggtcctaaacatgcagctttcggatggaggacaaggagatgtccctgttgatgaaaacaaactccatggtaaacctgataaaaccttgcgcttttccctctgcagtgataatctggaaggaatatctgaaggtccttcaaatcgctccaattcagtgtcctccctagacctagaaggagagtctgtgtcagaacttggagcaggaccttctggcagtaatggagttgaagctctacagctgttagaacatgagcaagctacaacacaggataaccttgatgataagctaaggaagtttgaaattcgtgacatgatgggattaacagatgatagggacatatcagaaacagtgagtgagacctggagtacagacgtcttgggaagtgactttgaccctaatattgatgaagatcgcttgcaagaaattgcaggtgctgcagcagagaacatgttaggcagtttgctgtgcctcccaggttcagggtcagtgcttcttgacccctgcactggttctaccatatcagagacaacaagtgaagcttggagtgtagaggtattgccaagtgactcagaggccccagacctaaagcaggaggagcgtctgcaagaactggagagctgttctggactgggtagcacatctgatgatacggatgtcagggaggtcagttcccgccccagcacaccaggcctcagtgttgtgtccggcataagtgcaacctctgaggatattcccaataagattgaagacctgagatctgagtgcagctctgattttgggggtaaagattctgtcactagtccagacatggatgaaataactcacgattttctttatatacttcagccaaaacaacattttcaacacattgaagcagaagcagacatgagaatccagctgtcttctagtgcccaccagctgacctctcctccttctcagtcagagtctctgctggccatgtttgatccactgtcttcacatgaaggggcttctgctgtggtaaggccaaaggttcactatgctaggccatcgcatccaccaccagatcccccaatcctggaaggagctgtgggaggaaatgaggccaggttgccaaactttggttcccatgttttaactccagctgaaatggaggcattcaagcaaaggcattcttaccctgagagactagttcgaagcaggagctctgatatagtatcttctgtccggagacccatgagtgaccccagctggaaccggcgtccaggaaatgaagagcgagaactccctccagctgcagccattggtgctacttctttggtggctgcacctcattcatcatcttcatccccgagtaaggactcctcaagaggagagactgaagaacgcaaagatagcgatgatgagaaatcagacaggaacagaccttggtggagaaaacgttttgtttcagccatgcctaaagctcctataccatttagaaagaaagaaaaacaagaaaaagacaaagatgatctggggcctgacagattctcaacactcacagatgatcccagccctagactcagtgcacaagctcaggtggctgaggatattctggacaaatacaggaatgccattaaacggaccagccccagtgatggagcaatggcaaactatgaaagtacagaggttatgggtgatggtgaaagtgcacatgattctccccgtgacgaagcactgcagaacatctcggctgatgatctcccagactctgcaagccaagcagcccacccgcaggattcagctttctcttacagagatgcaaaaaagaaactgaggcttgctctttgctctgcggactctgttgccttcccagtgctgacccattcaacaaggaatggtttaccagaccacacagacccagaagacaatgaaattgtatgcttcttaaaagttcaaatagctgaagcaattaatttacaagataagaatctaatggctcaacttcaagaaacaatgcgctgtgtgtgccgttttgataataggacttgtaggaaactgctggcttcgattgctgaggactacagaaaaagagccccatatattgcttatctcactcgttgtcgacaaggactacagaccacacaggctcacctggaaaggctattgcaaagagttttgcgggacaaagaagtggccaatcgatactttaccactgtctgtgtgagattactgcttgagagcaaagaaaagaagatcagggaattcattcaagactttcagaaactcaccgcagctgacgataaaactgctcaggtagaagattttctgcagtttctttatggtgcaatggcccaggatgtcatatggcaaaacgcgagtgaagaacagcttcaagatgcacagctggccattgagcgaagcgtgatgaaccggattttcaagctcgccttctaccctaatcaagatggggacatacttcgcgaccaggttcttcatgaacatatccagagattgtctaaagtagtgactgcaaatcacagagctcttcagataccagaggtttatcttcgagaagcaccatggccatctgcacaatcagaaatcaggacaataagtgcttataaaaccccccgggacaaagtgcagtgcatcctgagaatgtgctctacgattatgaacctcctgagcctggccaatgaggactctgtccctggagcggatgactttgttcctgtgttggtgtttgtgttgataaaggcaaatccaccctgtttgctgtctactgtgcagtatatcagtagcttttatgctagctgtctgtctggagaggagtcctattggtggatgcagttcacagcagcagtagaattcattaaaaccatcgatgaccgaaagtgaccaagaccaaggcccaccaaggcagcagactgttaatcagacaaacagatctctgagaaggtgcatcagctgctttgaaggctgaagattgttttgtatgatactgcacagcatcaggcattttaaagcagatctttactaaacaggttaatgagctaacaagcaggttctctcgtctttgggctctttcctttctgagttgcatattctattttcttgtccccaagtagagactagtactacaaaaagggaccacatttttcaagtatttctaagtataaaaaacaaaacaaaaatctcttaggaaatgtctagacctccattcttggattccctttctttccttttattttaaaaaagaacagtacccctcttttaagatgctgtcttacattaatgagcatctaatggaaagaaggtatgagttgcactgaggattagaatagtggtgcgttagtggcattatctataaatacactcacctaaattgaaagctaagaaggaaatgtaaatataatatatatttatatttgatgtaatatggacatctgcagattctaataaacaaggactattgctgata

SEQ ID NO: 12950 - DNA, 2512 bp, Homo sapiens
  source 1..2512: mol_type = unassigned DNA
gcaattgcatcatgcaagaagatgaaagctacctccttcaggttttgcgatacttgattgaatttgaacttaaagaaagtgacaaccctaggcgacttttgaggagaggaacttgtgccttcagcatcttatttaaacttttttctgaaggactgttttctgccaaacttttcctcacagccactttacatgagccaattatgcaactgcttgttgaagatgaagatcacctggaaacagatccaaacaagctaattgagaggttctctccatctcagcaggaaaaactctttggagagaagggctcagatagattcaggcaaaaagttcaagaaatggtggagtccaatgaagcaaagctagtggctttggtgaacaaatttattggttatctcaaacagaacacatattgttttccacatagtttaaggtggatcgtgtctcagatgtacaaaaccctctcctgtgtagataggctggaagttggggaggtcagggcaatgtgtactgatctcctgttggcctgcttcatttgtcctgcagttgtcaatccagaacaatatggaataatttccgatgctcctattaatgaagtagcacgatttaatctgatgcaggtaggccgccttttgcagcagttagcaatgactggctctgaagagggagatccccgaacaaagagcagccttggaaagtttgacaaaagctgtgttgccgctttccttgatgttgtgattgggggccgtgcagtggagacccctccattgtcttccgtcaatcttctggaaggattgagcagaactgtggtttatataacctacagtcagcttattactctggtgaattttatgaagagtgtgatgtctggagatcaactgagagaagatagaatggctcttgacaatttattggcaaacctacccccggccaagccaggaaaaagtagcagtttagaaatgactccctacaatacacctcagctatctccagcaaccactccagcaaataaaaagaatcgattacctatagcaactcggagcagaagccgcaccaatatgctaatggacctacatatggaccatgaaggatcatctcaagaaaccattcaggaggtgcaaccagaagaggtgttggtcatttccttaggtacaggtccccagcttactccagggatgatgtcagaaaatgaggtcctaaacatgcagctttcggatggaggacaaggagatgtccctgttgatgaaaacaaactccatggtaaacctgataaaaccttgcgcttttccctctgcagtgataatctggaaggaatatctgaaggtccttcaaatcgctccaattcagtgtcctccctagacctagaaggagagtctgtgtcagaacttggagcaggaccttctggcagtaatggagttgaagctctacagctgttagaacatgagcaagctacaacacaggataaccttgatgataagctaaggaagtttgaaattcgtgacatgatgggattaacagatgatagggacatatcagaaacagtgagtgagacctggagtacagacgtcttgggaagtgactttgaccctaatattgatgaagatcgcttgcaagaaattgcaggtgctgcagcagagaacatgttaggcagtttgctgtgcctcccaggttcagggtcagtgcttcttgacccctgcactggttctaccatatcagagacaacaagtgaagcttggagtgtagaggtattgccaagtgactcagaggccccagacctaaagcaggaggagcgtctgcaagaactggagagctgttctggactgggtagcacatctgatgatacggatgtcagggaggtcagttcccgccccagcacaccaggcctcagtgttgtgtccggcataagtgcaacctctgaggatattcccaataagattgaagacctgagatctgagtgcagctctgattttgggggtaaagattctgtcactagtccagacatggatgaaataactcacggggcttctgctgtggtaaggccaaaggttcactatgctaggccatcgcatccaccaccagatcccccaatcctggaaggagctgtgggaggaaatgaggccaggttgccaaactttggttcccatgttttaactccagctgaaatggaggcattcaagcaaaggcattcttaccctgagagactagttcgaagcaggagctctgatatagtatcttctgtccggagacccatgagtgaccccagctggaaccggcgtccaggaaatgaagagcgagaactccctccagctgcagccattggtgctacttctttggtggctgcacctcattcatcatcttcatccccgagtaaggactcctcaagaggagagactgaagaacgcaaagatagcgatgatgagaaatcagacaggaacagaccttggtggagaaaacgttttgtttcagccatgcctaaagctcctataccatttagaaagaaagaaaaacaagaaaa

SEQ ID NO: 12951 - DNA, 2490 bp, Homo sapiens
  source 1..2490: mol_type = unassigned DNA
tttgaggagaggaacttgtgccttcagcatcttatttaaacttttttctgaaggactgttttctgccaaacttttcctcacagccactttacatgagccaattatgcaactgcttgttgaagatgaagatcacctggaaacagatccaaacaagctaattgagaggttctctccatctcagcaggaaaaactctttggagagaagggctcagatagattcaggcaaaaagttcaagaaatggtggagtccaatgaagcaaagctagtggctttggtgaacaaatttattggttatctcaaacagaacacatattgttttccacatagtttaaggtggatcgtgtctcagatgtacaaaaccctctcctgtgtagataggctggaagttggggaggtcagggcaatgtgtactgatctcctgttggcctgcttcatttgtcctgcagttgtcaatccagaacaatatggaataatttccgatgctcctattaatgaagtagcacgatttaatctgatgcaggtaggccgccttttgcagcagttagcaatgactggctctgaagagggagatccccgaacaaagagcagccttggaaagtttgacaaaagctgtgttgccgctttccttgatgttgtgattgggggccgtgcagtggagacccctccattgtcttccgtcaatcttctggaaggattgagcagaactgtggtttatataacctacagtcagcttattactctggtgaattttatgaagagtgtgatgtctggagatcaactgagagaagatagaatggctcttgacaatttattggcaaacctacccccggccaagccaggaaaaagtagcagtttagaaatgactccctacaatacacctcagctatctccagcaaccactccagcaaataaaaagaatcgattacctataggacaacagttagcagccatcactgcctgggattcctcagctaccaatattacctctcatattacagtagtaaccccgtttgcaactcggagcagaagccgcaccaatatgctaatggacctacatatggaccatgaaggatcatctcaagaaaccattcaggaggtgcaaccagaagaggtgttggtcatttccttaggtacaggtccccagcttactccagggatgatgtcagaaaatgaggtcctaaacatgcagctttcggatggaggacaaggagatgtccctgttgatgaaaacaaactccatggtccttcaaatcgctccaattcagtgtcctccctagacctagaaggagagtctgtgtcagaacttggagcaggaccttctggcagtaatggagttgaagctctacagctgttagaacatgagcaagctacaacacaggataaccttgatgataagctaaggaagtttgaaattcgtgacatgatgggattaacagatgatagggacatatcagaaacagtgagtgagacctggagtacagacgtcttgggaagtgactttgaccctaatattgatgaagatcgcttgcaagaaattgcaggtgctgcagcagagaacatgttaggcagtttgctgtgcctcccaggttcagggtcagtgcttcttgacccctgcactggttctaccatatcagagacaacaagtgaagcttggagtgtagaggtattgccaagtgactcagaggccccagacctaaagcaggaggagcgtctgcaagaactggagagctgttctggactgggtagcacatctgatgatacggatgtcagggaggtcagttcccgccccagcacaccaggcctcagtgttgtgtccggcataagtgcaacctctgaggatattcccaataagattgaagacctgagatctgagtgcagctctgattttgggggtaaagattctgtcactagtccagacatggatgaaataactcacggtgcccaccagctgacctctcctccttctcagtcagagtctctgctggccatgtttgatccactgtcttcacatgaaggggcttctgctgtggtaaggccaaaggttcactatgctaggccatcgcatccaccaccagatcccccaatcctggaaggagctgtgggaggaaatgaggccaggttgccaaactttggttcccatgttttaactccagctgaaatggaggcattcaagcaaaggcattcttaccctgagagactagttcgaagcaggagctctgatatagtatcttctgtccggagacccatgagtgaccccagctggaaccggcgtccaggaaatgaagagcgagaactccctccagctgcagccattggtgctacttctttggtggctgcacctcattcatcatcttcatccccgagtaaggactcctcaagaggagagactgaagaacgcaaagatagcgatgatgagaaatcagacaggaacagaccttggtggagaaaacgttttgtttcagccatgcctaaagctcctataccatttag

SEQ ID NO: 12952 - DNA, 2332 bp, Homo sapiens
  source 1..2332: mol_type = unassigned DNA
aagccattcaacaaatctctaggaagttccatactttcccacattttcctgtcttcttctgagccctccaaactgttccatcctctgcctgttacccagttccaaagctgctttcacattttcgggtgtctttttagcagtaccccactctcggtaccaatttactgtatttgtctgttattatgctgctgataaagacatacctgagactgggcaatttaacaaaagaaagaggtttaattggacttaacagttccatgtggctggggaggcctcaaaattatggcggaaagtgaaaggcacatttcacatggcagcagacaagagaagagagcttgtgcagggaaattccgttttttaaaacaatcagatctcttgagacttagtatcacgagaacagcacaggaaagacatgcctccatgattcaattccctcccacaacacatggaaattcaagatgagatgtgggtggggaatacagccaaatcatatcaatttctaagcaacatatttggatatttactctggaaatgtagttacaaatgagcagttccaaatagaagagtgcaatttacttcagctttgcacaaaagcaggtaaagaggtatgcctatattttgaggctagaacaactagaatatcatatttcttttcttagtggtgataggaaagcctactttcctggaccagagaagcagatgtaagtagccttaggaattgctgtgctttttctgctgccagtcccctgctcatgattatggagaaaaatgtaactgagatgcttaggtagtgaggaggcttcaaggcttagggaatgggcactctagtaaatgtgacatttagactataagcaagtaattggtgggggatgtttgtgacctagtgacatataacctgtatttgttgttattgttggtcatctgtagctgtcaatttcctattaagtatgaggtcctatagctccagtataaaatacaccaagtatgcagaggggcttagtaacatttagtgaattaggtaactaagtcttcagccccatagatcctcccaaacaaaatgcaaaatgggtgtctgttctgcagctggcaccatgatcagtctctaccatgtctgcagcctgacatgctactttgtatatgtgctactgaagagagcacagacatgctactttgtaaaaccagtctgtgcagtaatttttctaaagaaaagttaggacccttattcttcaaagagagtatgcactgaatatatctgatgtcatgcaaagtatttttccttttagaaaaagagccccatatattgcttatctcactcgttgtcgacaaggactacagaccacacaggctcacctggaaaggctattgcaaagagttttgcgggacaaagaagtggccaatcgatactttaccactgtctgtgtgagattactgcttgagagcaaagaaaagaagatcagggaattcattcaagactttcagaaactcaccgcagctgacgataaaactgctcaggtagaagattttctgcagtttctttatggtgcaatggcccaggatgtcatatggcaaaacgcgagtgatgaaccggattttcaagctcgccttctaccctaatcaagatggggacatacttcgcgaccaggttcttcatgaacatatccagagattgtctaaagtagtgactgcaaatcacagagctcttcagataccagaggtttatcttcgagaagcaccatggccatctgcacaatcagaaatcaggacaataagtgcttataaaaccccccgggacaaagtgcagtgcatcctgagaatgtgctctacgattatgaacctcctgagcctggccaatgaggactctgtccctggagcggatgactttgttcctgtgttggtgtttgtgttgataaaggcaaatccaccctgtttgctgtctactgtgcagtatatcagtagcttttatgctagctgtctgtctggagaggagtcctattggtggatgcagttcacagcagcagtagaattcattaaaaccatcgatgaccgaaagtgaccaagaccaaggcccaccaaggcagcagactgttaatcagacaaacagatctctgagaaggtgcatcagctgctttgaaggctgaagattgttttgtatgatactgcacagcatcaggcattttaaagcagatctttactaaacaggttaatgagctaacaagcaggttctctcgtctttgggctctttcctttctgagttgcatattctattttcttgtccccaagtagagactagtactacaaaaagggaccacatttttcaagtatttctaagtat

SEQ ID NO: 12953 - DNA, 582 bp, Homo sapiens
  source 1..582: mol_type = unassigned DNA
agcgccgctgcaggacgcagggaagccaacaggcgagtggcgaaggtggcggcagcggcggcgggggcagtcaccggctagggcgacggctccgaggccgagtggcggtccgacagagtcctccgtgtcctcccccgcatgacccccttggggtaagtgtactggagagagttggttatacattctaggaatctcaaagtgatcagcctttgagcctttcccacattgaagatggtgaaactagatattcatactctggctcatcacctcaagcaggaacgcttatatgtaaactctgagaaacagctcattcagaggctcaatgcagatgtacttaagacagctgaaaagttgtatcgtacagcatggattgcgaagcaacagagaatcaatttggatcggcttatcataaccagtgctgaagcttcccctgctgaatgttgccaacatgccaaaattttggaagatacacaatttgttgatgggtataagcaattgggatttcaggagactgcttatggagaattcttgagtcgattgagggaaaatcctcgtcttattgcctcctctttggttgctgga

SEQ ID NO: 12954 - DNA, 3163 bp, Homo sapiens
  source 1..3163: mol_type = unassigned DNA
gtggcggtccgacagagtcctccgtgtcctcccccgcatgacccccttgggtctggctctgtcacccaggctggagtgcagtgacacgatctcagctcactgtaacctccgcctcccgggttcaagcgatcctcccatctgaccctcccaagtagctggcattcagtgatcagcctttgagcctttcccacattgaagatggtgaaactagatattcatactctggctcatcacctcaagcaggaacgcttatatgtaaactctgagaaacagctcattcagaggctcaatgcagatgtacttaagacagctgaaaagttgtatcgtacagcatggattgcgaagcaacagagaatcaatttggatcggcttatcataaccagtgctgaagcttcccctgctgaatgttgccaacatgccaaaattttggaagatacacaatttgttgatgggtataagcaattgggatttcaggagactgcttatggagaattcttgagtcgattgagggaaaatcctcgtcttattgcctcctctttggttgctggagagaaacttaatcaggagaacacacaaagtgttatttacacagtttttacctccctgtatggcaattgcatcatgcaagaagatgaaagctacctccttcaggttttgcgatacttgattgaatttgaacttaaagaaagtgacaaccctaggcgacttttgaggagaggaacttgtgccttcagcatcttatttaaacttttttctgaaggactgttttctgccaaacttttcctcacagccactttacatgagccaattatgcaactgcttgttgaagatgaagatcacctggaaacagatccaaacaagctaattgagaggttctctccatctcagcaggaaaaactctttggagagaagggctcagatagattcaggcaaaaagttcaagaaatggtggagtccaatgaagcaaagctagtggctttggtgaacaaatttattggttatctcaaacagaacacatattgttttccacatagtttaaggtggatcgtgtctcagatgtacaaaaccctctcctgtgtagataggctggaagttggggaggtcagggcaatgtgtactgatctcctgttggcctgcttcatttgtcctgcagttgtcaatccagaacaatatggaataatttccgatgctcctattaatgaagtagcacgatttaatctgatgcaggtaggccgccttttgcagcagttagcaatgactggctctgaagagggagatccccgaacaaagagcagccttggaaagtttgacaaaagctgtgttgccgctttccttgatgttgtgattgggggccgtgcagtggagacccctccattgtcttccgtcaatcttctggaaggattgagcagaactgtggtttatataacctacagtcagcttattactctggtgaattttatgaagagtgtgatgtctggagatcaactgagagaagatagaatggctcttgacaatttattggcaaacctacccccggccaagccaggaaaaagtagcagtttagaaatgactccctacaatacacctcagctatctccagcaaccactccagcaaataaaaagaatcgattacctatagcaactcggagcagaagccgcaccaatatgctaatggacctacatatggaccatgaaggatcatctcaagaaaccattcaggaggtgcaaccagaagaggtgttggtcatttccttaggtacaggtccccagcttactccagggatgatgtcagaaaatgaggtcctaaacatgcagctttcggatggaggacaaggagatgtccctgttgatgaaaacaaactccatggtaaacctgataaaaccttgcgcttttccctctgcagtgataatctggaaggaatatctgaaggtccttcaaatcgctccaattcagtgtcctccctagacctagaaggagagtctgtgtcagaacttggagcaggaccttctggcagtaatggagttgaagctctacagctgttagaacatgagcaagctacaacacaggataaccttgatgataagctaaggaagtttgaaattcgtgacatgatgggattaacagatgatagggacatatcagaaacagtgagtgagacctggagtacagacgtcttgggaagtgactttgaccctaatattgatgaagatcgcttgcaagaaattgcaggtgctgcagcagagaacatgttaggcagtttgctgtgcctcccaggttcagggtcagtgcttcttgacccctgcactggttctaccatatcagagacaacaagtgaagcttggagtgtagaggtattgccaagtgactcagaggccccagacctaaagcaggaggagcgtctgcaagaactggagagctgttctggactgggtagcacatctgatgatacggatgtcagggaggtcagttcccgccccagcacaccaggcctcagtgttgtgtccggcataagtgcaacctctgaggatattcccaataagattgaagacctgagatctgagtgcagctctgattttgggggtaaagattctgtcactagtccagacatggatgaaataactcacggtgcccaccagctgacctctcctccttctcagtcagagtctctgctggccatgtttgatccactgtcttcacatgaaggggcttctgctgtggtaaggccaaaggttcactatgctaggccatcgcatccaccaccagatcccccaatcctggaaggagctgtgggaggaaatgaggccaggttgccaaactttggttcccatgttttaactccagctgaaatggaggcattcaagcaaaggcattcttaccctgagagactagttcgaagcaggagctctgatatagtatcttctgtccggagacccatgagtgaccccagctggaaccggcgtccaggaaatgaagagcgagaactccctccagctgcagccattggtgctacttctttggtggctgcacctcattcatcatcttcatccccgagtaaggactcctcaagaggagagactgaagaacgcaaagatagcgatgatgagaaatcagacaggaacagaccttggtggagaaaacgttttgtttcagccatgcctaaag

SEQ ID NO: 12955 - DNA, 5309 bp, Homo sapiens
  source 1..5309: mol_type = unassigned DNA
cggcgggggcagtcaccggctagggcgacggctccgaggccgagtggcggtccgacagagtcctccgtgtcctcccccgcatgacccccttggggtaagtgtactggagagagttggttatacattctaggaatctcaaagggtctggctctgtcacccaggctggagtgcagtgacacgatctcagctcactgtaacctccgcctcccgggttcaagcgatcctcccatctgaccctcccaagtagctggcattcagtgatcagcctttgagcctttcccacattgaagatggtgaaactagatattcatactctggctcatcacctcaagcaggaacgcttatatgtaaactctgagaaacagctcattcagaggctcaatgcagatgtacttaagacagctgaaaagttgtatcgtacagcatggattgcgaagcaacagagaatcaatttggatcggcttatcataaccagtgctgaagcttcccctgctgaatgttgccaacatgccaaaattttggaagatacacaatttgttgatgggtataagcaattgggatttcaggagactgcttatggagaattcttgagtcgattgagggaaaatcctcgtcttattgcctcctctttggttgctggagagaaacttaatcaggagaacacacaaagtgttatttacacagtttttacctccctgtatggcaattgcatcatgcaagaagatgaaagctacctccttcaggttttgcgatacttgattgaatttgaacttaaagaaagtgacaaccctaggcgacttttgaggagaggaacttgtgccttcagcatcttatttaaacttttttctgaaggactgttttctgccaaacttttcctcacagccactttacatgagccaattatgcaactgcttgttgaagatgaagatcacctggaaacagatccaaacaagctaattgagaggttctctccatctcagcaggaaaaactctttggagagaagggctcagatagattcaggcaaaaagttcaagaaatggtggagtccaatgaagcaaagctagtggctttggtgaacaaatttattggttatctcaaacagaacacatattgttttccacatagtttaaggtggatcgtgtctcagatgtacaaaaccctctcctgtgtagataggctggaagttggggaggtcagggcaatgtgtactgatctcctgttggcctgcttcatttgtcctgcagttgtcaatccagaacaatatggaataatttccgatgctcctattaatgaagtagcacgatttaatctgatgcaggtaggccgccttttgcagcagttagcaatgactggctctgaagagggagatccccgaacaaagagcagccttggaaagtttgacaaaagctgtgttgccgctttccttgatgttgtgattgggggccgtgcagtggagacccctccattgtcttccgtcaatcttctggaaggattgagcagaactgtggtttatataacctacagtcagcttattactctggtgaattttatgaagagtgtgatgtctggagatcaactgagagaagatagaatggctcttgacaatttattggcaaacctacccccggccaagccaggaaaaagtagcagtttagaaatgactccctacaatacacctcagctatctccagcaaccactccagcaaataaaaagaatcgattacctatagcaactcggagcagaagccgcaccaatatgctaatggacctacatatggaccatgaaggatcatctcaagaaaccattcaggaggtgcaaccagaagaggtgttggtcatttccttaggtacaggtccccagcttactccagggatgatgtcagaaaatgaggtcctaaacatgcagctttcggatggaggacaaggagatgtccctgttgatgaaaacaaactccatggtaaacctgataaaaccttgcgcttttccctctgcagtgataatctggaaggaatatctgaaggtccttcaaatcgctccaattcagtgtcctccctagacctagaaggagagtctgtgtcagaacttggagcaggaccttctggcagtaatggagttgaagctctacagctgttagaacatgagcaagctacaacacaggataaccttgatgataagctaaggaagtttgaaattcgtgacatgatgggattaacagatgatagggacatatcagaaacagtgagtgagacctggagtacagacgtcttgggaagtgactttgaccctaatattgatgaagatcgcttgcaagaaattgcaggtgctgcagcagagaacatgttaggcagtttgctgtgcctcccaggttcagggtcagtgcttcttgacccctgcactggttctaccatatcagagacaacaagtgaagcttggagtgtagaggtattgccaagtgactcagaggccccagacctaaagcaggaggagcgtctgcaagaactggagagctgttctggactgggtagcacatctgatgatacggatgtcagggaggtcagttcccgccccagcacaccaggcctcagtgttgtgtccggcataagtgcaacctctgaggatattcccaataagattgaagacctgagatctgagtgcagctctgattttgggggtaaagattctgtcactagtccagacatggatgaaataactcacggtgcccaccagctgacctctcctccttctcagtcagagtctctgctggccatgtttgatccactgtcttcacatgaaggggcttctgctgtggtaaggccaaaggttcactatgctaggccatcgcatccaccaccagatcccccaatcctggaaggagctgtgggaggaaatgaggccaggttgccaaactttggttcccatgttttaactccagctgaaatggaggcattcaagcaaaggcattcttaccctgagagactagttcgaagcaggagctctgatatagtatcttctgtccggagacccatgagtgaccccagctggaaccggcgtccaggaaatgaagagcgagaactccctccagctgcagccattggtgctacttctttggtggctgcacctcattcatcatcttcatccccgagtaaggactcctcaagaggagagactgaagaacgcaaagatagcgatgatgagaaatcagacaggaacagaccttggtggagaaaacgttttgtttcagccatgcctaaagctcctataccatttagaaagaaagaaaaacaagaaaaagacaaagatgatctggggcctgacagattctcaacactcacagatgatcccagccctagactcagtgcacaagctcaggtggctgaggatattctggacaaatacaggaatgccattaaacggaccagccccagtgatggagcaatggcaaactatgaaagtacaggtgataatcatgacagagatttgagtagtaaacttttatatcatagtgataaagaggttatgggtgatggtgaaagtgcacatgattctccccgtgacgaagcactgcagaacatctcggctgatgatctcccagactctgcaagccaagcagcccacccgcaggattcagctttctcttacagagatgcaaaaaagaaactgaggcttgctctttgctctgcggactctgttgccttcccagtgctgacccattcaacaaggaatggtttaccagaccacacagacccagaagacaatgaaattgtatgcttcttaaaagttcaaatagctgaagcaattaatttacaagataagaatctaatggctcaacttcaagaaacaatgcgctgtgtgtgccgttttgataataggacttgtaggaaactgctggcttcgattgctgaggactacagaaaaagagccccatatattgcttatctcactcgttgtcgacaaggactacagaccacacaggctcacctggaaaggctattgcaaagagttttgcgggacaaagaagtggccaatcgatactttaccactgtctgtgtgagattactgcttgagagcaaagaaaagaagatcagggaattcattcaagactttcagaaactcaccgcagctgacgataaaactgctcaggtagaagattttctgcagtttctttatggtgcaatggcccaggatgtcatatggcaaaacgcgagtgaagaacagcttcaagatgcacagctggccattgagcgaagcgtgatgaaccggattttcaagctcgccttctaccctaatcaagatggggacatacttcgcgaccaggttcttcatgaacatatccagagattgtctaaagtagtgactgcaaatcacagagctcttcagataccagaggtttatcttcgagaagcaccatggccatctgcacaatcagaaatcaggacaataagtgcttataaaaccccccgggacaaagtgcagtgcatcctgagaatgtgctctacgattatgaacctcctgagcctggccaatgaggactctgtccctggagcggatgactttgttcctgtgttggtgtttgtgttgataaaggcaaatccaccctgtttgctgtctactgtgcagtatatcagtagcttttatgctagctgtctgtctggagaggagtcctattggtggatgcagttcacagcagcagtagaattcattaaaaccatcgatgaccgaaagtgaccaagaccaaggcccaccaaggcagcagactgttaatcagacaaacagatctctgagaaggtgcatcagctgctttgaaggctgaagattgttttgtatgatactgcacagcatcaggcattttaaagcagatctttactaaacaggttaatgagctaacaagcaggttctctcgtctttgggctctttcctttctgagttgcatattctattttcttgtccccaagtagagactagtactacaaaaagggaccacatttttcaagtatttctaagtataaaaaacaaaacaaaaatctcttaggaaatgtctagacctccattcttggattccctttctttccttttattttaaaaaagaacagtacccctcttttaagatgctgtcttacattaatgagcatctaatggaaagaaggtatgagttgcactgaggattagaatagtggtgcgttagtggcattatctataaatacactcacctaaattgaaagctaagaaggaaatgtaaatataatatatatttatatttgatgtaatatggacatctgcagattctaataaacaaggactattgctgat

SEQ ID NO: 12956 - DNA, 3720 bp, Homo sapiens
  source 1..3720: mol_type = unassigned DNA
gcgctggcgtggcggcagcgccgctgcaggacgcagggaagccaacaggcgagtggcgaaggtggcggcagcggcggcgggggcagtcaccggctagggcgacggctccgaggccgagtggcggtccgacagagtcctccgtgtcctcccccgcatgacccccttgtgatcagcctttgagcctttcccacattgaagatggtgaaactagatattcatactctggctcatcacctcaagcaggaacgcttatatgtaaactctgagaaacagctcattcagaggctcaatgcagatgtacttaagacagctgaaaagttgtatcgtacagcatggattgcgaagcaacagagaatcaatttggatcggcttatcataaccagtgctgaagcttcccctgctgaatgttgccaacatgccaaaattttggaagatacacaatttgttgatgggtataagcaattgggatttcaggagactgcttatggagaattcttgagtcgattgagggaaaatcctcgtcttattgcctcctctttggttgctggagagaaacttaatcaggagaacacacaaagtgttatttacacagtttttacctccctgtatggcaattgcatcatgcaagaagatgaaagctacctccttcaggttttgcgatacttgattgaatttgaacttaaagaaagtgacaaccctaggcgacttttgaggagaggaacttgtgccttcagcatcttatttaaacttttttctgaaggactgttttctgccaaacttttcctcacagccactttacatgagccaattatgcaactgcttgttgaagatgaagatcacctggaaacagatccaaacaagctaattgagaggttctctccatctcagcaggaaaaactctttggagagaagggctcagatagattcaggcaaaaagttcaagaaatggtggagtccaatgaagcaaagctagtggctttggtgaacaaatttattggttatctcaaacagaacacatattgttttccacatagtttaaggtggatcgtgtctcagatgtacaaaaccctctcctgtgtagataggctggaagttggggaggtcagggcaatgtgtactgatctcctgttggcctgcttcatttgtcctgcagttgtcaatccagaacaatatggaataatttccgatgctcctattaatgaagtagcacgatttaatctgatgcaggtaggccgccttttgcagcagttagcaatgactggctctgaagagggagatccccgaacaaagagcagccttggaaagtttgacaaaagctgtgttgccgctttccttgatgttgtgattgggggccgtgcagtggagacccctccattgtcttccgtcaatcttctggaaggattgagcagaactgtggtttatataacctacagtcagcttattactctggtgaattttatgaagagtgtgatgtctggagatcaactgagagaagatagaatggctcttgacaatttattggcaaacctacccccggccaagccaggaaaaagtagcagtttagaaatgactccctacaatacacctcagctatctccagcaaccactccagcaaataaaaagaatcgattacctatagcaactcggagcagaagccgcaccaatatgctaatggacctacatatggaccatgaaggatcatctcaagaaaccattcaggaggtgcaaccagaagaggtgttggtcatttccttaggtacaggtccccagcttactccagggatgatgtcagaaaatgaggtcctaaacatgcagctttcggatggaggacaaggagatgtccctgttgatgaaaacaaactccatggtaaacctgataaaaccttgcgcttttccctctgcagtgataatctggaaggaatatctgaaggtccttcaaatcgctccaattcagtgtcctccctagacctagaaggagagtctgtgtcagaacttggagcaggaccttctggcagtaatggagttgaagctctacagctgttagaacatgagcaagctacaacacaggataaccttgatgataagctaaggaagtttgaaattcgtgacatgatgggattaacagatgatagggacatatcagaaacagtgagtgagacctggagtacagacgtcttgggaagtgactttgaccctaatattgatgaagatcgcttgcaagaaattgcaggtgctgcagcagagaacatgttaggcagtttgctgtgcctcccaggttcagggtcagtgcttcttgacccctgcactggttctaccatatcagagacaacaagtgaagcttggagtgtagaggtattgccaagtgactcagaggccccagacctaaagcaggaggagcgtctgcaagaactggagagctgttctggactgggtagcacatctgatgatacggatgtcagggaggcataagtgcaacctctgaggatattcccaataagattgaagacctgagatctgagtgcagctctgattttgggggtaaagattctgtcactagtccagacatggatgaaataactcacggtgcccaccagctgacctctcctccttctcagtcagagtctctgctggccatgtttgatccactgtcttcacatgaaggggcttctgctgtggtaaggccaaaggttcactatgctaggccatcgcatccaccaccagatcccccaatcctggaaggagctgtgggaggaaatgaggccaggttgccaaactttggttcccatgttttaactccagctgaaatggaggcattcaagcaaaggcattcttaccctgagagactagttcgaagcaggagctctgatatagtatcttctgtccggagacccatgagtgaccccagctggaaccggcgtccaggaaatgaagagcgagaactccctccagctgcagccattggtgctacttctttggtggctgcacctcattcatcatcttcatccccgagtaaggactcctcaagaggagagactgaagaacgcaaagatagcgatgatgagaaatcagacaggaacagaccttggtggagaaaacgttttgtttcagccatgcctaaaggtaattttataaaatattagaacgctgtattagcaataagaagcaaagccccagaatctctttcagagagccaatgtctcaactcctctgtaagacttgctgggcttaagtttctagctactttgagggtgtagaaagtggttccactcagatgaatgctaaggcagagctttagaaatgttcttgttctttgcaggaagtgatagtggtttcataaatggaagtcatgcctgtcactattgtttaaatatcatataccattgaagttaaacatatagaggacttctgacatatatattgctattaattattgcaggaaaatgggacgttattggtaattaaacattgaaaactcatcctttacattcctggaataagttgaagctttttatgtctatgttcattgagaatgtttatactgtaaatatcagtgagtgtttattttggaaggtagctgtataaaattgtttacttttttggtgaacagcctggcatcatttgagttggcaaaagcatctcttcctgaaagaagagagcatccaggagtaaagctagaaacttattccaaaggcctcttctcagcacggtggcactcaggaa

SEQ ID NO: 12957 - DNA, 4420 bp, Homo sapiens
  source 1..4420: mol_type = unassigned DNA
agcttcctgatttctgaagtctgagtgatttcctccgtgtgccgagaggaaacagccttctgcactcacagccgaagggaaagcagcaggttggggcttcttgtggccaacttcagagcctgtcaccaggaaaggtaagcatgggaggaaggaagatggcgacagatgaagaaaatgtctatggtttagaagagaacgctcagtcccggcaggagtccacgcggaggctcatccttgttgggagaacaggggccgggaagagcgccactgggaacagcatcctgggccagagacggttcttctccaggctgggggccacgtctgtgaccagggcctgcaccacgggcagccgcaggtgggacaagtgccacgtggaagtcgtggacactccggacattttcagctcccaagtgtccaagacagatcctggctgtgaggagagaggtcactgctacctgctctcggcccccggaccccacgcgctgctcctggtgacccagttgggtcggttcaccgcccaggaccagcaggcggtgaggcaggtgagggacatgttcggggaggacgtcctaaaatggatggtcatcgtcttcaccaggaaggaggacctggccgggggctccctgcacgattacgtgagcaacacagagaaccgggccttgcgcgagctggtggccgagtgcgggggccgggtctgtgcctttgataaccgggccaccggccgggagcaggaagcccaggtggagcagctgctggggatggtcgagggcttggtgctggagcacaagggcgcccattactccaacgaggtgtatgagctggcgcaggtgctgcgctgggcaggccctgaggagcggctccggcgggtggcggagcgcgtggcagccagggtgcagaggaggccatggggcgcctggctgtcggcccggctgtggaagtggctgaagtcccccaggagctggaggctgggcctggccctgctgctggggggcgcgctcctgttctgggtgctgctccacaggcggtggtcggaggccgttgcggaggtcgggcctgactgacagcgcaggtcctaaaactgaaggcaacttggttaagggaggctgaattcttggagctgaagggaaaacttcattccaacggaaggaatcctgtagtttcaggcatagttttaatgacacagaaaactttgctgcatcacctttgcaactttgccaaagctcagagttcactttttaagtttttaactcattttaaatgatgtgtatgcagagttttaaaataaattcgtctaacaataacttcctttggtagttttggtagtctaatgtcaagtagcttgtagtggggacaaacgcatggcacagggaaaacaagtgccattattttcgagctttttaaaaaatttagactgcccctccttgataattttctagttcttatacatgggtagataggttcctttgtgatccttgtagacttttagcatcaataaaagaaatgtgggggttacacacgtgaatgttacttctgagacatcagtttatagtacaatgatttactaccaaaaagatgaatgtaactgtactgttacaaagtggaaaataacagtttccacttttctagaacatattatggttcatggcattccaaaatgaagtaagggccgggcgaggtggctcacgcctgtaatcccaacactttgggaggtcgaggcaggtggatcacctgaggtcaggagttcgagaccagcctgaccaacatggcgaaaccccatctctactaaaaatacaaaaattagccaggcgtgatagcactcgcctgtaatcccagccattcaggaggctgaggcgggagaatcacttgatgcagtgagccgagatcgtgccactgcactccaggctgggtgacaaagcaagaatctgtctcaaaaaaaaaaaaagaaaagaaaagaaaaagaaaaagagtaggatattgggaaaataacatataatatcttctatatggttattcatatttttatcacacacacacacacacacacacacacacacagtctgtatctcgagctcctctctggttatggagaagaggcagagcaccaggtgcataggctgagactgcagacacctgagcatcctatgctgtgaggcgaaagcatccggttttttcgggatgggcctgtccaggaaggttctcgaatgccacgtgattagaaaatttgccgctgactggttgtgcgaatcaaacaataggatttccttatttctatttctgagcataatgagaaccctttaagggaactcattgtctttaaatcagccagcctctagtgaggtcatggagacatgggaagcaggtattcacattagctctattcaagaggaagaggaggagggagtgtgcgcaggcgccctagggtcttccccagcacacgttgggaagaaggggtctgcaagcatgcgcacaattgccagctcaggctaaggactgcaggaggttccaggtgggttgcgggcttcgggcaggctatggtgaggggtcctgagggccttggtgaccgctgcagggagttggactttttgaagcgtggctcaagaaaaacccatgtttaattcctgcctttcgcttcctcagcagcctttctgggcccaggcaggggcctcgagccagggaaggatcctttgatgaccagaggggacagcagggagggcacagcgtggtcgtccacggtcacttgcgcacgagccagtgctgctgctggtgttagacaacaacttttatcaaagtggtttaatgtacagcagcaacaaagctgctttgtggagcagggctcccaataggcagtgtgcccagagtagcagctcggaagcagtactgcaatcacatttatacccactttcaactatatgcaaatttaggggtggattatgccaaaatttctagaaaaaaggtcgtaacttccaggtcgtgggattgttgctatggaaaggagccaaaacttccagctgttgccttagcaatggtaacctgacgtggcactggtgagtgtgttttatggagagactctttcacctcttccctttcagcttgtcttcagtgtggtctggagcccaatccccacctccagagtctagtcctgcctcctacctcagtaataaaaagtagtagtatatggttaattgtcaaatacatttgcaaagtgtaatcaaagatacattaccaatctgaatctcaaaatgtgctatcatctttgaatttgaataatgtattattaaagaagttacagttttcctttacattcaataacatttctttagtggttttctttttcagatactttgattatgatcttttttttttcatctttgtatccccgttatacaacccagtgcctggcatagaaagtgggatcaacaaatgtttggaaaatgaattgtaaagttgactttcctgtacctttttaatattagatttctagctaccagacttttgaccattttctaaattttctaccatagataacagaaaattctttcgcgcaagcatgtcattgtattaatgatattctcctgccctaaggaaatttacttcccttcaagcacagggtcccccaaattactgtatttccacccctttcagcttattttatccttttctcctgctacagaacagttggcattcaccattcccttcggtaaagtctttttttaggctgtggcttaaaggttgctttttcccccatagctcaaggttaggccttgtgacctcacttatgtaatttgagtgatttgatagcacaaatcaattttatacttaaattacagcataaaacagcactgcctcctgttggaaaaacttgcttgctaattttaaccagacacagtaaaaatactgtccaatacctcaaaaattgtgtaaatatatatccatttcaattgtcccccttcctctcctctccttttatctcttggaagataaaaatgtatgggtcctgtgctgataatgtttctgttcatatttctatgccctggtacctggatcagcttttgttctacacaaaaagacttgtatctggcttatttctgaaagctagtgttggccatgatgaacttttagagcaaaagatttcaggcagagtacattcttacatattcttacacaatcaatattcagttccagcccgcacagtagccctagcaaatgccagtgctccttccagagattcacctatggattcagtaccccagaagagaatttctgtaaattcttggggaagctatagctagactatggctcaacactcatttttcccccatgattcttaatctaacagtggcaatgttggcctcttcttaggcaactagattcggttcttgcttattctgccaataaaatactttattgagatgcttacaaa

SEQ ID NO: 12958 - DNA, 1449 bp, Homo sapiens
  source 1..1449: mol_type = unassigned DNA
gttttactttctttttctcttggagctgagctataagacaacaggactgaacagggagccaactgtttctttgaacagtaaatcaggaacaccaatggaccaaaatgaacacagtcactggggaccacatgcaaagggccaatgtgccagcagatctgagctgagaatcatcctggtgggcaaaacaggaactggcaaaagtgctgcagggaacagcatcctcaggaagcaagcatttgaatcgaagctgggttcccagaccttgactaagacttgcagcaaaagtcagggaagctggggaaatagagagattgtcattattgacacaccagatatgttttcttggaaggaccactgtgaagctctgtacaaagaggtgcagaggtgctacttgctgtctgcaccaggaccccatgtgctgctcctggtgactcagctgggccgctatacctcacaggaccagcaggctgcacagagggtgaaggagatctttggagaggatgccatgggacacacaattgtcctctttacccacaaggaagacctcaatggtggctccctgatggattacatgcacgactcagataacaaagccctaagcaagctggtggcagcatgtggtgggcgaatctgtgcctttaataaccgtgctgaagggagcaatcaggatgaccaagtgaaggaactaatggactgtattgaggatctgttgatggagaaaaatggtgatcactataccaatgggttgtacagcctaatacagaggtctaaatgtggacctgtgggatcagatgaaagagtaaaggaattcaaacagagccttataaagtacatggaaactcaaagaagttacacagccttggctgaagcaaactgcctaaaaggagccttaatcaaaacacaactgtgtgttttattttgtattcagttgtttctcagattgataattctgtggctttgcatactgcacagcatgtgcaatttgttttgttgcttactctttagtatgtgcaatttattctgcagtttgctgtttattatacccaaaaagttaatgatatttttgagaacagttattagactagaacgcaagactcctaggttatagttacagatcccagttattatttactcactatcatttagtgggtgaatcacagtaatttccctgtaaaatgtggtacctgaagtcatatttgagattctatgaaatgtttaaatctgaacatcactccaattattaatgaaccaaatcatacgataagttactgtttgcattgaaatataatatcaaagccttttgaaatctgtaaacataaaattcctctcattttcaaatatctaaagccagttttatgttcctaaaatctcattttcttctttctagtactactatttctactgaatataatgaaaatggcaataaaataatattacataaactgtaaa

SEQ ID NO: 12959 - DNA, 2058 bp, Homo sapiens
  source 1..2058: mol_type = unassigned DNA
aaagttctattagagctgctggatgatcaggtgggcaggtcccttgcacaagtaaatctggacagctcctcccctcacttcctctcttctcctgtttctcaacatcctggcttagtattgtgtgcaaaatcagagaggggtgcaagatcctgatttttcaggagttcaagcgacaatggcagcccaatacggcagtatgagcttcaaccccagcacaccaggggccagttatgggcctggaaggcaagagcccagaaattcccaattgagaattgtgttagtgggtaaaaccggagcaggaaaaagtgcaacaggaaacagcatccttggccggaaagtgtttcattctggcactgcagcaaaatccattaccaagaagtgtgagaaacgcagcagctcatggaaggaaacagaacttgtcgtagttgacacaccaggcattttcgacacagaggtgcccaatgctgaaacgtccaaggagattattcgctgcattcttctgacctccccagggcctcatgctctgcttctggtggttccactgggccgttacactgaggaagagcacaaagccacagagaagatcctgaaaatgtttggagagagggctagaagtttcatgattctcatattcacccggaaagatgacttaggtgacaccaatttgcatgactacttaagggaagctccagaagacattcaagacttgatggacattttcggtgaccgctactgtgcgttaaacaacaaggcaacaggcgctgagcaggaggcccagagggcacagttgctgggcctgatccagcgcgtggtgagggagaacaaggaaggctgctacactaataggatgtaccaaagggcggaggaggagatccagaagcaaacacaagcaatgcaagaactccacagagtggagctggagagagagaaagcgcggataagagaggagtatgaagagaaaatcagaaagctggaagataaagtggagcaggaaaagagaaagaagcaaatggagaagaaactagcagaacaggaggctcactatgctgtaaggcagcaaagggcaagaacggaagtggagagtaaggatgggatacttgaattaatcatgacagcgttacagattgcttcctttattttgttacgtctgttcgcggaagattaaacttaatgaaaatctgtttgtattttctgcatattctctggcaaccttgccccatacttacttatttagcatagtcgagtgctctagtttctgtctctcaggcactcgtaactaaggaccaccattggccattggtagatgtttgattgacttaacaagagagggacaaattttcaatttgtgaaactccaaagcagaaagtattggtgcttgctaccttgtgaattcttccttagacatgcagagaaaatgtatgcaagagaccaaaaagatggctccaagctatgtcatgttacctgtaataaaatcttttcttctagattctttctatgttggcagataatctccccttgtagcttccactcacttattcttgcattcagagtcacaatgatcatcttacccatgtggtttttgagaaagaaagatcaattctttgtttgcagtaggtaatcttagagatggagatgattgtagaattattcctagatgagtgtcaatttatttaattccattgtcatataaggagtcaaattgtttcttatcatttgttcattgaagaacagagacctgtctggaaaatcgatctctacaaattcaattaaataatgatccccaaatgctgaaaaagtgaaatacagcaattcaacagataatagagcaatgtttagtatattcagctgtatctgtagaaactctttgacgaacctcaatttaaccaatttgatgaatacccagttctcttcttttctagagaaagatagttgcaacctcacctccctcactcaacactttgaatacttattgtttggcaggtcatccacacacttctgcccccactgcattgaattttttgcttatgttgtttataataaaacttttcaattatctca

SEQ ID NO: 12960 - DNA, 1000 bp, Homo sapiens
  source 1..1000: mol_type = unassigned DNA
gtgcaaaatcagagaggggtgcaagatcctgatttttcaggagttcaagcgacaatggcagcccaatacggcagtatgagcttcaaccccagcacaccaggggccagttatgggcctggaaggcaagagcccagaaattcccaattgagaattgtgttagtgggtaaaaccggagcaggaaaaagtgcaacaggaaacagcatccttggccggaaagtgtttcattctggcactgcagcaaaatccattaccaagaagatcctgaaaatgtttggagagagggctagaagtttcatgattctcatattcacccggaaagatgacttaggtgacaccaatttgcatgactacttaagggaagctccagaagacattcaagacttgatggacattttcggtgaccgctactgtgcgttaaacaacaaggcaacaggcgctgagcaggaggcccagagggcacagttgctgggcctgatccagcgcgtggtgagggagaacaaggaaggctgctacactaataggatgtaccaaagggcggaggaggagatccagaagcaaacacaagcaatgcaagaactccacagagtggagctggagagagagaaagcgcggataagagaggagtatgaagagaaaatcagaaagctggaagataaagtggagcaggaaaagagaaagaagcaaatggagaagaaactagcagaacaggaggctcactatgctgtaaggcagcaaagggcaagaacggaagtggagagtaaggatgggatacttgaattaatcatgacagcgttacagattgcttcctttattttgttacgtctgttcgcggaagattaaacttaatgaaaatctgtttgtattttctgcatattctctggcaaccttgccccatacttacttatttagcatagtcgagtgctctagtttctgtctctcaggcactcgtaactaaggaccaccattggccattggtagatgtttgattgacttaacaaga

SEQ ID NO: 12961 - DNA, 552 bp, Homo sapiens
  source 1..552: mol_type = unassigned DNA
aggtaagggaataggggtgtgtgtggtgggggtcgggacgaatgtgcgattttggtgaggagggacctgtatcttaaatcgtctggagttcaagcgacaatggcagcccaatacggcagtatgagcttcaaccccagcacaccaggggccagttatggtgagagggcattcagtgctccccagaccaggctgcagggagggcctggaaggcaagagcccagaaattcccaattgagaattgtgttagtgggtaaaaccggagcaggaaaaagtgcaacaggaaacagcatccttggccggaaagtgtttcattctggcactgcagcaaaatccattaccaagaagtgtgagaaacgcagcagctcatggaaggaaacagaacttgtcgtagttgacacaccaggcattttcgacacagaggtgcccaatgctgaaacgtccaaggagattattcgctgcattcttctgacctccccagggcctcatgctctgcttctggtggttccactgggccgttacactgaggaagagcacaaagccacagagaagatc

SEQ ID NO: 12962 - DNA, 2291 bp, Homo sapiens
  source 1..2291: mol_type = unassigned DNA
atgacaggaagtgacccgttaaggaagcagcacatcgctgcattcggctggttttcagggtcttgttcccaatcagtttccagccaacaccagggtgtcctagtccgcagaggtgtgggggacacactccataatctctacttttctttttgtgcagctgagtcatggagctttcagccccagcacatggctcctccttaactgcgtctgctcaacctccctcagccctgtgaacagcatccccgcacacagacgcagagcaggactctctctgctgccacttcaccttcctgagagaggaccagcggccagagcctcagtgactgccaccctggaggacagggcacaacaaccgtttctggagagaatgggaggattccagaggggcaaatatggaactatggctgaaggtagatcagaagataacttgtctgcaacaccaccggcattgaggattatcctagtgggcaaaacaggctgcgggaaaagtgccacagggaacagcatccttggccagcccgtgtttgagtccaagctgagggcccagtcagtgaccaggacgtgccaggtgaaaacaggaacatggaacgggaggaaagtcctggtggttgacacgccctccatctttgagtcacaggccgatacccaagagctgtacaagaacatcggggactgctacctgctctctgccccggggccccacgtcctgcttctggtgatccagctggggcgtttcactgctcaggacacagtggccatcaggaaggtgaaagaggtctttgggacaggggccatgagacatgtggtcatcctcttcacccacaaagaggacttagggggccaggccctggatgactatgtagcaaacacggacaactgcagcctgaaagacctggtgcgggagtgtgagagaaggtactgtgccttcaacaactggggctctgtggaggagcagaggcagcagcaggcagagctcctggctgtgattgagaggctggggagggagcgagagggctccttccacagcaatgacctcttcttggatgcccagctgctccaaagaactggagctggggcctgccaggaagactacaggcagtaccaggccaaagtggaatggcaggtggagaagcacaagcaagagctgagggagaacgagagtaactgggcatacaaggcgctcctcagagtcaaacacttgatgcttttgcattatgagatttttgtttttctattgttgtgcagcatactttttttcattatttttctgttcatctttcattacatttaaatctctggaccctggagcacttctaatgtatcaccccatggagtcattgttctaataatcaccaattcagactcagatcctcgtggtctatggagcatgctgcttgctgtctgtgcagctcccatttccccttcttcctgatagacttggagctgtgtgcctccactccaaggctgcctgcctgctgtaaacactattccactctgtctgccaacaactgcttcaggaatgggcctgagatcccatgcaggtccctgagaagtgagtaaaagtccgcagaggtggggatggaagatctctccttagatagaacctgtcttcctccctggcattgtggggtctgggcgtgacactgggactctcagcagctttgtgctgccaacctgagattgaaggcagtgcctcagagcagcacagagagttggggccccctgagccctgagccaccagccctgcagcctgccctatctccgcatttccagttgtattagccaatagatttcctacttatttaagctatttgagctccgggtctcttctacctgcattctaaaacattcaaagtaataaaaatttctccacattcctttttatcctttaaatctgttggaacttcccagtccacatgcttcctttgagcaagtggcatctagaataaaggaacagggttggcttttcttgttcctaaaattaggaagaacctcctgctcctactgaagtgcctgccacatagtggacattccctgaactctgagtaaagcaaaacactttcagatggatggattgcattgacgaatgggagtgggagagggtcaaggaaatggggtgccctgtacgcagggctttctctgtgctttcttctcagtttggccaggggcccaaaagaaacacagctcacatttcaatgctctgcaaggaatcactttggcaaatgttcacacatgagaaaggttaagcaaactctttctccttctccactgtaaaatgtccttggatcaac

SEQ ID NO: 12963 - DNA, 1633 bp, Homo sapiens
  source 1..1633: mol_type = unassigned DNA
agccaacaccagggtgtcctagtccgcagaggtgtgggggacacactccataatctctacttttctttttgtgcagctgagtcatggagctttcagccccagcacatggctcctccttaactgcgtctgctcaacctccctcagtgactgccaccctggaggacagggcacaacaaccgtttctggagagaatgggaggattccagaggggcaaatatggaactatggctgaaggtagatcagaagataacttgtctgcaacaccaccggcattgaggattatcctagtgggcaaaacaggctgcgggaaaagtgccacagggaacagcatccttggccagcccgtgtttgagtccaagctgagggcccagtcagtgaccaggacgtgccaggtgaaaacaggaacatggaacgggaggaaagtcctggtggttgacacgccctccatctttgagtcacaggccgatacccaagagctgtacaagaacatcggggactgctacctgctctctgccccggggccccacgtcctgcttctggtgatccagctggggcgtttcactgctcaggacacagtggccatcaggaaggtgaaagaggtctttgggacaggggccatgagacatgtggtcatcctcttcacccacaaagaggacttagggggccaggccctggatgactatgtagcaaacacggacaactgcagcctgaaagacctggtgcgggagtgtgagagaaggtactgtgccttcaacaactggggctctgtggaggagcagaggcagcagcaggcagagctcctggctgtgattgagaggctggggagggagcgagagggctccttccacagcaatgacctcttcttggatgcccagctgctccaaagaactggagctggggcctgccaggaagactacaggcagtaccaggccaaagtggaatggcaggtggagaagcacaagcaagagctgagggagaacgagagtaactgggcatacaaggcgctcctcagagtcaaacacttgatgcttttgcattatgagatttttgtttttctattgttgtgcagcatactttttttcattatttttctgttcatctttcattacatttaaatctctggaccctggagcacttctaatgtatcaccccatggagtcattgttctaataatcaccaattcagactcagatcctcgtggtctatggagcatgctgcttgctgtctgtgcagctcccatttccccttcttcctgatagacttggagctgtgtgcctccactccaaggctgcctgcctgctgtaaacactattccactctgtctgccaacaactgcttcaggaatgggcctgagatcccatgcaggtccctgagaagtgagtaaaagtccgcagaggtggggatggaagatctctccttagatagaacctgtcttcctccctggcattgtggggtctgggcgtgacactgggactctcagcagctttgtgctgccaacctgagattgaaggcagtgcctcagagcagcacagagagttggggccccctgagccctgagccaccagccctgcagcctgccctatctccgcatttccagttgtattagccaatagatttcctacttatttaagct

SEQ ID NO: 12964 - DNA, 3440 bp, Homo sapiens
  source 1..3440: mol_type = unassigned DNA
acttcctgttcctccatctccagcggacactgctctttcaagggcaggtctccagcccagctctctgaaaacattttgctgaaaatataagcaaacatcggccttgtcctccttgtgttcatacactgtggaagcttttctctgcctcctccgtgagagtgcgtggccgggagaccagaaacgtggtcctttctcttgcctgtgagctggtgcagagatggaggaagaagaatatgaacaaattccccaggagaatcccccagaagagctgtcccaggatcctgtgctggagctgtcaggaggtctaagggagaaagaacagaagaccccaaggagactgaggctcattctcatggggaaaacagggagtgggaagagtgcaacaggaaacagcatcctcggcagggacgtcttcgagtctaaactcagcaccagacccgtgaccaagacctcccagagacggagccgagagtgggctgggaaggagcttgaggtgattgacacacccaacattctgtccccccaggtctcgccagaggtggcagacgctatctgccaagccatcgtcttatccgccccagggccccacgccgtgctcctggtgacacaactgggccggttcacggatgaggatcagcaggtggtcaggcgcctgcaggaggtctttggagtgggggttctgggtcacaccatcctggtgttcacccggaaggaagacctggctggcggctccctggaagactatgtgcgagagaccaacaaccaggcccttgcctggctggatgtgacccttgcacggcgccattgcggcttcaacaacagggcacagggggaggagcaggaggcccaactgcgagagctcatggagaaagttgaagccattatgtgggaaaacgaaggagattattacagcaacaaggcttaccaatatacccagcaaaactttcggctgaaagaactacaggaaaggcaagtaagccagggccaaggctctgaggacgtgcctggtgaggagtcttggctggaaggactgtcccagatccagaaggaatctgaggaagcccacagatgcctgctggggaaggctgacctttgagcctgtgctggacttgagccaaggacaccatcagcctttgcacccccctgtgtccagccctctgtttctctttccatcccatggagtgcttcccagtctccaggtcatgacgtctggtgtaggaagaggggcatggggcttgaggacagggtccagcatgcccagatcacattccagttccttcattccttcttccagaacatctgggtcctccctcctctgtgccccaacagcacgctgtcttcctattggaccttctatctcattgcattgcctttcatgagttacttgtctatactctgatagaaccaaagtttcttgagggcaggcctgtatcttttacttctgtgtaacttccacagcttttgactgcattggagtcatgcagtcacgtttggtgcggcaactccatgcaagctgttgaccagatgacttctcatctctccccacaccatgatggtttaaggtgcctgttgtgtctggtggctggaacatggcagtggtgctgagacatggggagggttggagactgggtggggagggttggagactgggctgggaggagagcaagcaggaacagggatggaggcaggaggagcagcccttttattcactcttgagctgtaacaaacaagccccgttggaacttcctagtgggaatgatgggagaagtttggggcagggtatccaagaagtcagactgtggtcaagtaggtggtcccttgccctggctacagaacatggaagcccctagggatgcaagtggacttgggcagaggaggtcacaccaccccaccaaggtagacttagattagagatgacttgcatctgttacttcccctttttccatgggtttcatggcccctcatgatatttgccttctgctcctagaaggcacagactactttcaacctgcctcgcccttcactgccacccctcccttctcccttgataatgggagcatgtggatggggtgtctgcgtgtgcaaacgggttccctagcaaagtatttgtgggggtccaatgcaaggaggcagggaagaaagggggcctgcaaaggaagcagtagagtgacttaaacatcttgcgaggcagcctgcctggtttatgggagaactctgaagcccatgatgttttcctggaaggctgttcctacagacggggtttataagtactgatactggacaggatgagaagggagtaggatgtcatcctgtctcaggcctcggataggaagctgcctgccagcaagaggagactgatgtgccccgggtgcaccccacctcctttgaggtccaagatgctcctggggagttgaccgacatttgggaagataataggaggcattggggaaactgctccccaatatattcctcttttcctttcttcaagctgcgtagcagggggcctttagctagtttctcccgagaggggcgggaagtacagctggtggagacagtgctgggagatgatcagaaatctcagggcacagcctcaggtctacctggacactcatccactgttggagatgctcaacagctagacacagatgctcacagccgacctgtggcctcttgctctgaagccatcccccatcttccctagacacagcagacatctgagaaagcttcagcatttctcttgctaacagattcagaaaagtgtctcaaagcagagcacagagttatttggtgtttgctgaagacagcctttgtgccacaatcacttattaaataagcgatcaatttcccattgaactgaacatgcaacatttatcatacattcagttctcattcacactccttaagatttggtcagaatttttatttctgttcatgtcttctacttttctactcctgtatgaataaaatattgatttgattacagtggctttgactataatgtgggagccaatttttgcctcagtcttcatttttatatttaccttgttattctcaggcatttttttcttctatgtgagagttaaaatcattctgtaatttccccccaaaatcatattggtattctagttggcaatgtcttacatttatgttaagtttgagggaattggtagttcaagtataagttaattaaggccattttatttctaagtgaacagacttgaaactccagagctactgaagtaaaagttagaatcatttgcattttcattcagataggagataattttgtaaattttgatgctattattttaactctattagcttaagtaatgtcataatagaaaacacaagcatttgaccaaatgagatccattcagcgactaactggcaaggcactcaaaacatgtcattcattaaatgttgtttttatttacctcaaa

SEQ ID NO: 12965 - DNA, 4450 bp, Homo sapiens
  source 1..4450: mol_type = unassigned DNA
caaacatcggccttgtcctccttgtgttcatacactgtggaagcttttctctgcctcctccgtgagagtgcgtggccgggagaccagaaacgtggtcctttctcttgcctgtgagctggtgcagagatggaggaagaagaatatgaacaaattccccaggagaatcccccagaagagctgtcccaggatcctgtgctggagctgtcaggaggtaaaatgaatgaggagaggggagcaagtgggaaacatttggggtgcaggtgggacacagctccaccaccatagtgtgcttggagaggaagctgacgtcccccagtcacagaaatttacccgcctcagccaccatcagaggcctttggggtagggcccttcttatcactagccaaaaataagaaaaaagacccctggataggtatggtagataaaaggaggcgagaaatagcaccaatgactaaatcaccatgccagtcccaaaggaaatgctttcacatggtagatgttcttcctcaggatggatgtgctgacagtgcgtgtgacgaaaataagtggccttggactgaggcttggatgccaacagaccctgtatgggtgtttggctgactccgaagtggagctgtcacagttgtaagtttgaaagcgccttgtgcacaagcagaatgtacttggctgctgcctcagatctgggctctgccttatcgagggcgtccctttcccaaaagccattgcacagggtcaggcgcttaactttcatgggctcaacttcgtcattcatcctggggaggcaggatttacaaatgctggaaacccagccctttcctggccagaagaaatgatttgtgattcattatgtattttaatatgaatgaccttttactttatgaacttaaatggcctgagccatctggaaaaagccacgttaacctactacaatagggacattaccaatacctgtgtaacacctgtttgaccttttgttatagcaatcaaggttagctattcttttaagaatcctctccagagctcaagtgatgcatttggctttagtaaagtccagtggtgtgtgctagctccaggctgctcagatgggggttcctgtctcctctggctctgcactgggctaggtgggtggggatgaagatctactgcccagacttctgcccattcattcaaattccttccagccaccttggggaagctggagggggcccaatgtcactcagttagaattggcacgtgggtcagagccaagggtggctgtcaggccacagcaaggcctgttggtgcccaggagattcaggagatggccacgcccatgctgccacatgccagcttcatgctttgtcatctgagatacatcaatgtcttcagtggggacaagactgggaaaccagctattacttgtcacttctttatgtgctctgggtcttgggacccgcaaggccaggagaagggaattcccttcctgccttcttccccagtcatatctaaaaaccttggtattgggtttcttggtgttctattggccaagtctcgctcttctttctaggctctgctcttgcactgggagagaacgttcagccccaccttcaaggatgtgggcccagaatggtggcccagcgctggtttcagggcagatgttggtcttttacaatctgcccctgcagtctgggggtacacccagaggctcctggtgatgacaagatggggtacatgggcccttaccccagttccctctgctttctttggatatttctaggtctaagggagaaagaacagaagaccccaaggagactgaggctcattctcatggggaaaacagggagtgggaagagtgcaacaggaaacagcatcctcggcagggacgtcttcgagtctaaactcagcaccagacccgtgaccaagacctcccagagacggagccgagagtgggctgggaaggagcttgaggtgattgacacacccaacattctgtccccccaggtctcgccagaggtggcagacgctatctgccaagccatcgtcttatccgccccagggccccacgccgtgctcctggtgacacaactgggccggttcacggatgaggatcagcaggtggtcaggcgcctgcaggaggtctttggagtgggggttctgggtcacaccatcctggtgttcacccggaaggaagacctggctggcggctccctggaagactatgtgcgagagaccaacaaccaggcccttgcctggctggatgtgacccttgcacggcgccattgcggcttcaacaacagggcacagggggaggagcaggaggcccaactgcgagagctcatggagaaagttgaagccattatgtgggaaaacgaaggagattattacagcaacaaggcttaccaatatacccagcaaaactttcggctgaaagaactacaggaaaggcaagtaagccagggccaaggctctgaggacgtgcctggtgaggagtcttggctggaaggactgtcccagatccagaaggaatctgaggaagcccacagatgcctgctggggaaggctgacctttgagcctgtgctggacttgagccaaggacaccatcagcctttgcacccccctgtgtccagccctctgtttctctttccatcccatggagtgcttcccagtctccaggtcatgacgtctggtgtaggaagaggggcatggggcttgaggacagggtccagcatgcccagatcacattccagttccttcattccttcttccagaacatctgggtcctccctcctctgtgccccaacagcacgctgtcttcctattggaccttctatctcattgcattgcctttcatgagttacttgtctatactctgatagaaccaaagtttcttgagggcaggcctgtatcttttacttctgtgtaacttccacagcttttgactgcattggagtcatgcagtcacgtttggtgcggcaactccatgcaagctgttgaccagatgacttctcatctctccccacaccatgatggtttaaggtgcctgttgtgtctggtggctggaacatggcagtggtgctgagacatggggagggttggagactgggtggggagggttggagactgggctgggaggagagcaagcaggaacagggatggaggcaggaggagcagcccttttattcactcttgagctgtaacaaacaagccccgttggaacttcctagtgggaatgatgggagaagtttggggcagggtatccaagaagtcagactgtggtcaagtaggtggtcccttgccctggctacagaacatggaagcccctagggatgcaagtggacttgggcagaggaggtcacaccaccccaccaaggtagacttagattagagatgacttgcatctgttacttcccctttttccatgggtttcatggcccctcatgatatttgccttctgctcctagaaggcacagactactttcaacctgcctcgcccttcactgccacccctcccttctcccttgataatgggagcatgtggatggggtgtctgcgtgtgcaaacgggttccctagcaaagtatttgtgggggtccaatgcaaggaggcagggaagaaagggggcctgcaaaggaagcagtagagtgacttaaacatcttgcgaggcagcctgcctggtttatgggagaactctgaagcccatgatgttttcctggaaggctgttcctacagacggggtttataagtactgatactggacaggatgagaagggagtaggatgtcatcctgtctcaggcctcggataggaagctgcctgccagcaagaggagactgatgtgccccgggtgcaccccacctcctttgaggtccaagatgctcctggggagttgaccgacatttgggaagataataggaggcattggggaaactgctccccaatatattcctcttttcctttcttcaagctgcgtagcagggggcctttagctagtttctcccgagaggggcgggaagtacagctggtggagacagtgctgggagatgatcagaaatctcagggcacagcctcaggtctacctggacactcatccactgttggagatgctcaacagctagacacagatgctcacagccgacctgtggcctcttgctctgaagccatcccccatcttccctagacacagcagacatctgagaaagcttcagcatttctcttgctaacagattcagaaaagtgtctcaaagcagagcacagagttatttggtgtttgctgaagacagcctttgtgccacaatcacttattaaataagcgatcaatttcccattgaactgaacatgcaacatttatcatacattcagttctcattcacactccttaagatttggtcagaatttttatttctgttcatgtcttctacttttctactcctgtatgaataaaatattgatttgattacagtggctttgactat

SEQ ID NO: 12966 - DNA, 876 bp, Homo sapiens
  source 1..876: mol_type = unassigned DNA
aagggcaggtctccagcccagctctctgaaaacattttgctgaaaatataagcaaacatcggccttgtcctccttgtgttcatacactgtggaagcttttctctgcctcctccgtgagagtgcgtggccgggagaccagaaacgtggtcctttctcttgcctgtgagctggtgcagagatggaggaagaagaatatgaacaaattccccaggagaatcccccagaagagctgtcccaggatcctgtgctggagctgtcaggaggtctcgccagaggtggcagacgctatctgccaagccatcgtcttatccgccccagggccccacgccgtgctcctggtgacacaactgggccggttcacggatgaggatcagcaggtggtcaggcgcctgcaggaggtctttggagtgggggttctgggtcacaccatcctggtgttcacccggaaggaagacctggctggcggctccctggaagactatgtgcgagagaccaacaaccaggcccttgcctggctggatgtgacccttgcacggcgccattgcggcttcaacaacagggcacagggggaggagcaggaggcccaactgcgagagctcatggagaaagttgaagccattatgtgggaaaacgaaggagattattacagcaacaaggcttaccaatatacccagcaaaactttcggctgaaagaactacaggaaaggcaagtaagccagggccaaggctctgaggacgtgcctggtgaggagtcttggctggaaggactgtcccagatccagaaggaatctgaggaagcccacagatgcctgctggggaaggctgacctttgagcctgtgctggacttgagccaaggacaccatcagcctttgcac

SEQ ID NO: 12967 - DNA, 7531 bp, Homo sapiens
  source 1..7531: mol_type = unassigned DNA
aaaaaggccgcgctgtactgcggcttgtgccgcttccgcaagaaggtttcctggcctgttgcagccatggtgcattgcagttgcgtgttgttcagaaagtatggaaatttcatcgataagctaagactcttcaccaggggaggatccggtggaatgggttatcctcgtttaggtggagaaggtggaaaaggtggtgatgtctgggttgtagcccagaacagaatgactttaaaacaacttaaagacaggtatcctcggaaacggtttgtggctggagtaggagcaaacagcaaaattagtgcactgaaaggctccaaaggaaaagactgtgaaatccctgtgcctgtgggtatttcagtaactgatgaaaatggtaaaattataggagaactcaataaagaaaatgacagaattttggtagctcaaggaggtcttggtggtaaattacttacaaatttcttaccattgaaaggccagaaacgaataattcaccttgatctaaaacttatagctgatgtaggcctagtaggattcccaaatgctggaaaatcctctttgctaagttgtgtttctcatgcaaaacctgcaattgcagattacgcatttacaacattaaagcctgaacttggaaagataatgtacagtgatttcaaacagatatcagtagctgatcttccgggtttaatagaaggagcacatatgaacaaaggaatgggccacaaattcctcaagcatatagaaagaactagacaactactttttgttgttgatatttctggatttcagctttcttctcacactcaatacaggacagcttttgaaaccataatactgcttacaaaagagttggaattgtacaaagaggaacttcagacaaaacctgcactcttggcagttaataaaatggacttgccagatgcccaagataagttccatgaattgatgagccagctccagaatcctaaagattttctgcatttatttgaaaaaaacatgattccagagaggactgtagagttccaacatatcatccccatatctgcagttactggagaaggaatcgaagaattaaagaattgtataagaaagtcactggatgaacaggccaaccaggaaaatgatgcacttcataagaaacagttgcttaatttgtggatttctgatacaatgtcttctactgagccaccatcaaagcatgctgttactacttccaaaatggatataatttaaatatattaaaaatggtattgatggaacagtatttaatgcttaaaaacaaggaaatcctttcatctgtgacaacctggaggacatgttaagtaaaataagccaggcttagaaagacaaatgctgcataatctcactgtggaatcttaagttgaactcatagaaggagagaatagaatggtggttatcaagggctggtggggcagtggaggattgaggagatattggtcaaaatttacaaaatttcagttagacaaggcaactgagttcaagagatctgttgtacagcttggtgactgtaattaacaacaatgtattttgaaagtcactgagtaaattttaagtggtttttccaaaaaagcacataaggtaatgcacgttaattagctatattgagccattccacaatgtatagatatttcaaaacatgttacacatgataaatccagtttttctacgtcattttttaaaattatatttaatttttttattttgaaagttttttcacagatcttttttttagtattattaccttctgatatatgtgtcattattgaagaaccataccttttaaagttattattttgtaattaagtatgtcaacagtaaaaaataaccagtggccaggcatggtggctcatgcctgtaatcccagcacttttcggaggccgaggagggcagatcacttgaggtcaggagttcaagaccagcctggccaacatggcgaaaccccgtctctactaaaaatataaaaaattagccaggcatagtggcgcatgcctgttgtagccccagctactcaagaggctgaggcaggagaattgcttgaacgcgggaggtggaggatacaatgaacccgaggtcgcgccactgcacttcagcctgggtgacagagctagactccatctcaaaaaaaaaaaagagctaaaaaattacattttacaagtttatggccagcccacctgtaataacattctctgatattcctttacttaggatgtccctattgagatcattttttaaatttatgtggaaggattctctagattattattagaatgagcaattcagttttgtttgtttttgagcctgtcttgtacctggttgcactaaatatataatagttatcttttgtggagaccttaaaaccctaaatttgaatacatgttcaatgatagtaaagatatgacagaaactagaagatagctgtttatgatttgagcttttggaaaattttcgtttcttgaatgtaatagtattttttcctgaattggaggagactgatctatattgtttcatttttcttttgtcctagtctatttcactttcttttgtcataatctatttaatttcccactttcttattttagtaaagagagaataaatagcaagtgcaggccaggcatggtggtgcaggccagacatagcggtacatgcctgtaatcctagcactttgggatgccaaggcgggaggattgcttgagcccaggagttcatgcctgagcaacatagcaagaccctggctctctataaaacagaaaacgcaaactttaatattatcaacaatcaatatattataagagattgcaatttctaagtttctacctgagtgtttcacaaatacaaactggacattttccctttaaatgagttttattataaaatgtacatattgattgtaaaaacaaaaaattcaaatagtacaaaagcatataagtaactaataaaagctccctttctgcattaggcccctcagttcttcccagggaaaatgattaatagtttacattcttgcagaaattttttatgtataaatttttacccaaatgaattcattatataaattttttccaacttagtgtttttttacataatagtagcaagttaaaaaattgtacttcaggccaggcacggtgggtcacgcctgttaatctcagcactttgggaggctgaggcaggaagaccacttgaggtcaggagttcaagaccagcctggccaacatggtgaaaacccatctctactaaaatacaaaaatcagctgggcatggtggcgcatgtctgtaatcccagctactcgggaggctgaggcaggagaatcgcttgaacccgggaggcggaggttgcagtgagctgagattgcgccattgcactccagcctggaggacaagagggagacttcctctcaaaaaacaaaatattgtacttcaaaaaattattcttcaatgctatttttaaattactagaaattattttggaatttaatgttgcatacagcctgagatatggctgttcaccctttggtaaagtattaaagaaaaataatgcattgttctcagcttaaatttttttctgatttgacaacatgagtgatgttttcccagtattatttcaattatatttgttttattttctgttcctcactcctacctctcattccagtccccaaactggcttttcttttatttcttttttcttcattgctgatgtatttattgagcaatgtcctgtatcaggcactgtccaaggtgctgtatgtgccatgttgaagagaacagacaggacctactgtccttgtatatcttgcctttgataacagaaactgcaggggattggaatagcctctttacaagaaaagaataagagtgaggaaaagcgtttggaatttatagtgatcacagtgaccaggttttgtattgggtatgttttacatttgtaacttcagtgctatttttttttaagctccattgttttctaaatgtaaacaagtatcaatgtaaggacagtttcatcaggtgaatatcagaagtactgacaccataatctcattttgcactgtggcaaagggtagtagatgtgtgttcaggattatttgctctgtcagtagtgcccagggtgccactccatgactaaccgaaacattttattatgtgactcactaagatgttcaattcattagtattttctggttactcaaagtgtactctatgtacctttttttgacctttgatttttattctgatggagaagatcagattccttttttatcttataaaaaataattttgaaacaaagacttattttgaagtaagtcttttaacattatctcagatgcattttattttgtccttaagtaagacttttcatttttacctttcaaaatgcaattttcaaaatatatgcttttttgaaacacttattatgttactgaataaccagagtattaaattcaatgtacagcaaatttttacaaagtcccagtagttcttgcagagctttctataatatcagatttatttaccatcatgaaatatgtttatacagtattaagtatattgtactatgaagttggacctgcacactgaaaaattccaaaatacctattatgttgtgctttttgtgatatatattcatattattatttgtcataacaaggtgaacttttttaaaatggtaaacatgtattagttacataatcaggaaaaaagtcatcttttataatgagaaaaattaggtcaaggatatttcaggttttatccaattagatttcttgtaaagttatgtgttttcttttatctcagtgcttatttgctttgcaaggatgaaggttagagattcctttcagtagttaatgaaagctacagacttgtcttgccgaaaaatgtacataaacacataaactattttccaagcagtttcacagtgtttgcaaagttcagattgaaaacccagttttacaaatcccatctacaaatttgcattgtcattaagatatattaaaaataatttttcaaagcaacagcacagatgcactttaaaactgtagcttaaaaataaaaattagtaatataacttgtgtaaacctacacaaaagataaaagatatcttattgcaaaaatagggcaacattttgttttaaagaccaaatagtgaattgaatttaatgcatatctttaaatccttaatagtatctcaaatctggtttaaatctgtctctccttaacggaatagaaagtgaaacaaatccagaaatcttgttcgagtacatggtctgtgctagtaatcatatctaaagtggtaatgttaccatatgctgggtactgggctgagtaaatcacatattttaacttatttaaacactgcactgtattgcctgctagcgatgtcatttttttaaagttggatggtgaatacatgagttgttttttaaactcttttgggagcctaaaaaatttgaatttttttttttccccccccagacggagtctcgctctcttgccaggctggagtgcagtgacattatcttggctcactgcagcctctgattccctggttcaagcaattctcctgcctcagcctcccgagtagctgggattacaggcatccaccaccacgtccagctaatttttgtatttttagtagagacggggtttcaccatgttggccaggatgggaaaattttttaaaagacatttattaaaaaaaaatgtctatgccttatcaaagtttataactcaagaattaatgagataaacagtggacaaaaagtgttggcagataacatgcataattttaattaaaagttaagcagtgaaaaataaacatctttttttcttaaagagatatttcatatctgttctatttgtttagttttatttattctttttagagacagggtctctctgtggagtgcagtggcatgattatagccctctgcggcctcaatcttcagggcttaagttatcctcctgcctcatcctcccaagtagctaggactacaagtgtgtgccaccatacctggctaatttttaaaaactattttgtagagacagggtcttactatgttgcccagagtggtcttgaactcccatcctcatggaatcctcccacttcagtctctgaaagtgctaggattataggcatgagccatttatgcccagccagttttcttttttctaattgaagcttggcaagcagagggaaatgtattagggaaatagctttagttttgagtgggtgtcagtagccagctgaagaaaaagcaaaatgaaataggtagtagaaatgagaaagggagagagggaagaagaaaaaaatggatgttggaaagttgttgcatgtctctctggatagctcagaagtatcagttgtggttattgcctcacttggcttttgtaagcatgaaaaagccagggacaatttcaactaccatttctgaccatcatcaaccacaaattttaggcaatttgttagaattttttttaaatgttcttaatagttgttgggtacctgggagatttcagagaaagtaatcacctttgtatatattattaatgtgtttataatagaaattaaattctttgggatgtacaggtaagataagctatgtgaagcatagctgttatccaagtcgtgtgcctttgaaatacttggaatttgaagaacaggacatgcagcttatgttataattaatttgcgagcaatatatggcatgatagtattttcttatctaaattctgagtgcattgaaagtttaaagcaaaggacaaaagcttcctttgttcatggcccatattccagtatatttttctgaaactgccaatattttctgatcggtactttcatttttctagttggttaccaaatactgttattggtattatttctatataaaaggctttaagaagactatagtataattttcttaagaaaaaagacatgattataagctaaaatatgccttcggttttgtgtgctacaaattgagggagattgagaatattttaaatcaagggcagacattgagtaaaagcttatgactttggatggatttgaaacatgattaaatgacagagtaaataaaagcccctagtcaagtgaattctaatgggggaaataagaggactatataaaaattgaacctctgttttgaaaacaaatctttccaggaagtggtaccactctggggtcaagagaaattgtaagaacaataaaatgagcacacatgaccttcctttcctataaaaatatgaagcagaaaactcccccatgatttcctcatgttgcttagaatagtgtgtatttcagaacttttccatttaatatttttggaccacagttgactgaaactgaggatgggaggaagggatgcttaaaaccttggatagtaccaaaccctatatatattatgtttttttctatatatacacagctatgataaagttcataaattaggcacagtaagagattaaaaatattaaattgggccaattaatatattgtaataaaagctatgttaatgtggtc

SEQ ID NO: 12968 - DNA, 1740 bp, Homo sapiens
  source 1..1740: mol_type = unassigned DNA
ggggatgacgtaaaaaggccgcgctgtactgcggcttgtgccgcttccgcaagaaggtttcctggcctgttgcagccatggtgcattgcagttgcgtgttgttcagaaagtatggaaatttcatcgataagctaagactcttcaccaggggaggatccggtggaatgggttatcctcgtttaggtggagaaggtggaaaaggtggtgatgtctgggttgtagcccagaacagaatgactttaaaacaacttaaagacaggtatcctcggaaacggtttgtggctggagtaggagcaaacagcaaattcccaaatgctggaaaatcctctttgctaagttgtgtttctcatgcaaaacctgcaattgcagattacgcatttacaacattaaagcctgaacttggaaagataatgtacagtgatttcaaacagatatcagtagctgatcttccgggtttaatagaaggagcacatatgaacaaaggaatgggccacaaattcctcaagcatatagaaagaactagacaactactttttgttgttgatatttctggatttcagctttcttctcacactcaatacaggacagcttttgaaaccataatactgcttacaaaagagttggaattgtacaaagaggaacttcagacaaaacctgcactcttggcagttaataaaatggacttgccagatgcccaagataagttccatgaattgatgagccagctccagaatcctaaagattttctgcatttatttgaaaaaaacatgattccagagaggactgtagagttccaacatatcatccccatatctgcagttactggagaaggaatcgaagaattaaagaattgtataagaaagtcactggatgaacaggccaaccaggaaaatgatgcacttcataagaaacagttgcttaatttgtggatttctgatacaatgtcttctactgagccaccatcaaagcatgctgttactacttccaaaatggatataatttaaatatattaaaaatggtattgatggaacagtatttaatgcttaaaaacaaggaaatcctttcatctgtgacaacctggaggacatgttaagtaaaataagccaggcttagaaagacaaatgctgcataatctcactgtggaatcttaagttgaactcatagaaggagagaatagaatggtggttatcaagggctggtggggcagtggaggattgaggagatattggtcaaaatttacaaaatttcagttagacaaggcaactgagttcaagagatctgttgtacagcttggtgactgtaattaacaacaatgtattttgaaagtcactgagtaaattttaagtggtttttccaaaaaagcacataaggtaatgcacgttaattagctatattgagccattccacaatgtatagatatttcaaaacatgttacacatgataaatccagtttttctacgtcattttttaaaattatatttaatttttttattttgaaagttttttcacagatcttttttttagtattattaccttctgatatatgtgtcattattgaagaaccataccttttaaagttattattttgtaattaagtatgtcaacagtaaaaaataaccagtggccaggcatggtggctcatgcctgtaatcccagcacttttcggaggccgaggagggcagatcacttgaggtcaggagttcaagaccagcctggccaacatggcgaaaccccgtctct

SEQ ID NO: 12969 - DNA, 1057 bp, Homo sapiens
  source 1..1057: mol_type = unassigned DNA
ccccggcccacaagcccctgcagggagcgggcccgggcggcgcgcgatcgaggtcgggtcgccgtccagcctgcagcatgagcgcccccagcgcgacccccatcttcgcgcccggcgagaactgcagccccgcgtggggggcggcgcccgcggcctacgacgcagcggacacgcacctgcgcatcctgggcaagccggtgatggagcgctgggagaccccctatatgcacgcgctggccgccgccgcctcctccaaagggggccgggtcctggaggtgggctttggcatggccatcgcagcgtcaaaggtgcaggaggcgcccattgatgagcattggatcatcgagtgcaatgacggcgtcttccagcggctccgggactgggccccacggcagacacacaaggtcatccccttgaaaggcctgtgggaggatgtggcacccaccctgcctgacggtcactttgatgggatcctgtacgacacgtacccactctcggaggagacctggcacacacaccagttcaacttcatcaagaaccacgcctttcgcctgctgaagccggggggcgtcctcacctactgcaacctcacctcctggggggagctgatgaagtccaagtactcagacatcaccatcatgtttgaggagacgcaggtgcccgcgctgctggaggccggcttccggagggagaacatccgtacggaggtgatggcgctggtcccaccggccgactgccgctactacgccttcccacagatgatcacgcccctggtgaccaaaggctgagcccccaccccggcccggccacacccatgccctcctccgtgccttcctggccgggagtccagggtgtcgcaccagccctgggctgatcccagctgtgtgtcaccagaagctttcccggcttctctgtgaggggtcccaccagcccagggctgatcccagctgtgtgtcaccagcagctttcccagcttctctgtgagggtcactgctgcccactgcagggtccctgaggtgaagtaaacgccggcgctgggcttggccagtcggcagtg

SEQ ID NO: 12970 - DNA, 1301 bp, Homo sapiens
  source 1..1301: mol_type = unassigned DNA
acaagcccctgcagggagcgggcccgggcggcgcgcgatcgaggtcgggtcgccgtccagcctgcagcatgagcgcccccagcgcgacccccatcttcgcgcccggcgagaactgcagccccgcgtggggggcggcgcccgcggcctacgacgcagcggacacgcacctgcgcatcctgggcaagccggtgatggagcgctgggagaccccctatatgcacgcgctggccgccgccgcctcctccaaagggggccgggtcctggaggtgggctttggcatggccatcgcagcgtcaaaggtgcaggaggcgcccattgatgagcattggatcatcgagtgcaatgacggcgtcttccagcggctccgggactgggccccacggcagacacacaaggtcatccccttgaaaggcctgtgggaggatgtggcacccaccctgcctgacggtcactttgatgggatcctgtacgacacgtacccactctcggaggagacctggcacacacaccagttcaacttcatcaagaaccacgcctttcgcctgctgaagccggggggcgtcctcacctactgcaacctcacctcctggggggagctgatgaagtccaagtactcagacatcaccatcatgtttgaggtgcgcccacctgaagttccccatgggtctccaggaagtgaccttggatgggggtgggaaggggctgctggagccaccttgctacctggggagggtcccttcctgaccccctgggtgggctggactgtgctggttcatttagaaatcaaagtcctttgcctggcgcagtggctgccaggagcagtggctcaggtctataatcccagcactgtggaaggccgaggtgggcagattgcttgagcctaggagttcaagaccagcctgggctacagagcaagacctcatctttcctaaaaaaaaaaaatacaaaaaactagctgggcgtggtggcgtgtgcctgtactcccagctacttgggaggctgaggtaggaggattgcttgggccccaggggcagaggttgcagtgagcccagatcgaaccactgcactccagcctgggtaacagagccagaccctgtctcaagaaaaaagaaagaaagaaagaaagaaagaaaatttaaaaaaaaaatggaaatcaggctgggcgtggtggctcacacctgtgatcccggcacttcggaaggccaaggcgggtggatcacttgagcccaggagtttgagcctagcctggccaacatggcagaatcccatctctactaaaaatacaaaagttagccaggcgt

SEQ ID NO: 12971 - DNA, 1599 bp, Homo sapiens
  source 1..1599: mol_type = unassigned DNA
gtagggagccagcccctgggcgcggcctgcagggtaccggcaaccgcccgggtaagcgggggcaggacaaggccggagcctgtgtccgcccggcagccgcccgcagctgcagagagtcccgctgcgtctccgccgcgtgcgccctcctcgaccagcagacccgcgctgcgctccgccgctgacatgtgtgccgctcagatgccgcccctggcgcacatcttccgagggacgttcgtccactccacctggacctgccccatggaggtgctgcgggatcacctcctcggcgtgagcgacagcggcaaaatagtgtttttagaagaagcatctcaacaggaaaaactggccaaagaatggtgcttcaagccgtgtgaaataagagaactgagccaccatgagttcttcatgcctgggctggttgatacacacatccatgcctctcagtattcctttgctggaagtagcatagacctgccactcttggagtggctgaccaagtacacatttcctgcagaacacagattccagaacatcgactttgcagaagaagtatataccagagttgtcaggagaacactaaagaatggaacaaccacagcttgttactttgcaacaattcacactgactcatctctgctccttgccgacattacagataaatttggacagcgggcatttgtgggcaaagtttgcatggatttgaatgacacttttccagaatacaaggagaccactgaggaatcgatcaaggaaactgagagatttgtgtcagaaatgctccaaaagaactattctagagtgaagcccatagtgacaccacgtttttccctctcctgctctgagactttgatgggtgaactgggcaacattgctaaaacccgtgatttgcacattcagagccatataagtgaaaatcgtgatgaagttgaagctgtgaaaaacttataccccagttataaaaactacacatctgtgtatgataaaaacaatcttttgacaaataagacagtgatggcacacggctgctacctctctgcagaagaactgaacgtattccatgaacgaggagcatccatcgcacactgtcccaattctaatttatcgctcagcagtggatttctaaatgtgctagaagtcctgaaacatgaagtcaagatagggctgggtacagacgtggctggtggctattcatattccatgcttgatgcaatcagaagagcagtgatggtttccaatatccttttaattaataaggtaaatgagaaaagcctcaccctcaaagaagtcttcagactagctactcttggaggaagccaagccctggggctggatggtgagattggaaactttgaagtgggcaaggaatttgatgccatcctgatcaaccccaaagcatccgactctcccattgacctgttttatggggacttttttggtgatatttctgaggctgttatccagaagttcctctatctaggagatgatcgaaatattgaagaggtttatgtgggcggaaagcaggtggttccgttttccagctcagtgaaagaaacaattcacttaccagcctcctcaccccatcctccaccatttccttaa

SEQ ID NO: 12972 - DNA, 5340 bp, Homo sapiens
  source 1..5340: mol_type = unassigned DNA
cggcagccgcccgcagctgcagagagtcccgctgcgtctccgccgcgtgcgccctcctcgaccagcagacccgcgctgcgctccgccgctgacatgtgtgccgctcagatgccgcccctggcgcacatcttccgagggacgttcgtccactccacctggacctgccccatggaggtgctgcgggatcacctcctcggcgtgagcgacagcggcaaaatagtgtttttagaagaagcatctcaacaggaaaaactggccaaagaatggtgcttcaagccgtgtgaaataagagaactgagccaccatgagttcttcatgcctgggctggttgatacacacatccatgcctctcagtattcctttgctggaagtagcatagacctgccactcttggagtggctgaccaagtacacatttcctgcagaacacagattccagaacatcgactttgcagaagaagtatataccagagttgtcaggagaacactaaagaatggaacaaccacagcttgttactttgcaacaattcacactgactcatctctgctccttgccgacattacagataaatttggacagcgggcatttgtgggcaaagtttgcatggatttgaatgacacttttccagaatacaaggagaccactgaggaatcgatcaaggaaactgagagatttgtgtcagaaatgctccaaaagaactattctagagtgaagcccatagtgacaccacgtttttccctctcctgctctgagactttgatgggtgaactgggcaacattgctaaaacccgtgatttgcacattcagagccatataagtgaaaatcgtgatgaagttgaagctgtgaaaaacttataccccagttataaaaactacacatctgtgtatgataaaaacaatcttttgacaaataagacagtgatggcacacggctgctacctctctgcagaagaactgaacgtattccatgaacgaggagcatccatcgcacactgtcccaattctaatttatcgctcagcagtggatttctaaatgtgctagaagtcctgaaacatgaagtcaagatagggctgggtacagacgtggctggtggctattcatattccatgcttgatgcaatcagaagagcagtgatggtttccaatatccttttaattaataaggtaaatgagaaaagcctcaccctcaaagaagtcttcagactagctactcttggaggaagccaagccctggggctggatggtgagattggaaactttgaagtgggcaaggaatttgatgccatcctgatcaaccccaaagcatccgactctcccattgacctgttttatggggacttttttggtgatatttctgaggctgttatccagaagttcctctatctaggagatgatcgaaatattgaagaggtttatgtgggcggaaagcaggtggttccgttttccagctcagtgtaagaccctcgggcgtctacaaagttctcctgggattagcgtggttctgcatctcccttgtgcccaggtggagttagaaagtcaaaaaatagtaccttgttcttgggatgactatccctttctgtgtctagttacagtattcacttgacaaatagttcgaaggaagttgcactaattctcaactctggttgagagggttcataaatttcatgaaaatatctccctttggagctgctcagacttactttaagctcaaacagaagggaatgctattactggtggtgttcctacggtaagacttaagcaaagcctttttcatatttgaaaatgtggaaagaaaagatgttcctaaaaggttagatattttgagctaataattgcaaaaattagaagactgaaaatggacccatgagagtatatttttatgagggagcaaaagttagactgagaacaaacgttagaaaatcacttcagattgtgtttgaaaattatatactgagcatactaatttaaaaagagaacttgttgaaatttaaaacgtgtttctaggttgaccttgtgttttagaaatttgcacttaatggaatttgcatttcagagatgtgttagtgttgtgctttgccttctttggcgatgaatgtcagaaattgaatgccacatgctttcataatatagttttgtgcttcaaagtgtttgacagaagttgggtattaaagatttaaagtctcttaggaatattattcatgtaactccatggcataaatagttgtatttttgtgtactttaaaatcaacttataactgtgagatgttattgcttccattttattagaagagaaacaaattccatgctttatggaatttatgtagactggagtcttcgtgaactggggcaaatgctggcatccaggagccgccaatactaacaggacaggttccattgccatggcctattccacccaaacaatatgttgtagtttctggaaattccatactcagatatcagtctgctagaactttaaaatgaaggacaaatcctgttaaagaaatattgttaaaaatctttaaaccctgtgtattgaaagcactctattttctaattttatccagttttctgtttaactccttataatgtttaggatattaaaattttaggataatgaagagtacataatgtcctacttaatatttatgttaataggacttaattcttactagacatctaggaacattacaaagcaaagactatttttatgcttccataacctagaattaaaaccaaattatgaccttatgataaatctttaagtattggtgtgaatgttatttaaattctatatttttcttatttaattacaaatactataaatgagcaaggaaaaggaatagactttcttaatatattataacactcattcctagagcttaggggtgactctttaatattaccttatagtagaaactttatgtaatatagctaactccgtatttacagaacaaaaaaacacagttccccctcctgtagtataaattttattttcacatacttagctaatttagcagtaattggcccagttttttccctaatagaaatacttttagatttgattatgtatacatgacacctaaagagggaacaaaagttagttttatttttttaataaacaacagagtttgttttgtgagataagtatcttagtaaacccaatttccagtcttagtctgtatttccaatatttctaattcctgagccacgtcaaagatgccttgccaaatttctccccatttctctacggggctagcaaaaatcttcagctttatcactcaacccctgccaaaggaacttgattacatggtgtctaaccaaatgagcaggcttaggaatttagatgagatgtgtaagattcacttacaggcagtagctgcttctagcatttgcaagatcctacacttttaccttctttaagggtgtacattttgatgttgaacatcagttttcatgtagacttaggactcatgtgcagtaaatataaataagtgtagcatcagaagcagtaggaatggccgtatacaaccatcctgttaaacatttaaatttagctctgatagtgtgttaagacctgaatatctttcctagtaaaaataggatgtgttgaaatatttatatgtactttgatctctccacatcacttataacttatgtgttttatttctccaagtgcggtgttcctgaatgttatgtatgcttttttttctgtaccacaggcattatctatacctggggccagattttctgcactttgaaatgttgcctttgcctaatgtaggttgactttctgaattgtggagaggcacttttccaagccaatcttatttgtcactttttgttttaatatcttgctctctgacaggaaagaaacaattcacttaccagcctcctcaccccatcctccaccatttccttaatgttccatggtattttcaacggaatacactttgaaaggtaaaaacaattcaaaagtatcgattatcataaattcacaaaatatttttgcaaccagaacacaaaagcaggctagtcagctaaggtaaatttcattttcaaacgagagggaaacatgggaagtaaaagattaggatgtgaaaggttgtcctaaacagaccaaggagactgttccctaatttattctcttggctggttctctcattgaattatcagaccccaagaggagatattggaacaggctcccttcatgccaagggtctttctaagttaatactgtgagcattgagcccccattaaaactcttttttacttcagaaagaattttacaggttaaagggaaagaaatggtgggaaactctccccgtaatgcttagccaactttaaagtgtacccttcaatatccccattggcaactgcagctgagatcttagagaggaaatataaccggtgtgagatctagcaatgcattttgaatcttcactccctaccaggctcttcctatttttaatctcttcacctcagaactagacatatggagagctttaaaggcaagctggaaggcacattgtatcaattctaccttgtgctatacgtaggagagatccaaaatttggatgcttctggagactcttagacatcttttcattgttgtccatttttaaagttgatgattgctggaaacattcacacgcttaaaagcaatggtgtgagttattaatgggtaaactaagaagtgttataggcaatgacttgaaatggtttttaaattgtatggattgttaagaattgttgaaaaaaaattttttttttttggacagcttcaaggagatgttagcaatttcagatatactagccagtttaggtatgactttggaagtgcagaaacagaaggatactgttagaaaatcctaacattggtctccgtgcatgtgttcacacctggtctcactgcctttccttcccacagacctgagtgtgaaagactgagagttgaggagttactttgtggatcttgtccaaatttagtgaaatgtggaagtcaaccagaccaatgatggaattaaatgtaaattccaagagggctttcacagtccacagggttcaaatgacttgggtaacagaagttattcttagcttacctgttatgtgacagtgatttacctgtccatttccaacccaaaagcctgtcagaaagcattctttagagaaaaccactttacatttgttgttaaactcctgatcgctactcttaagaatatacatgtatgtattcataggaacattttttctcaatatttgtatgattcgcttactgttattgtgctgagtgagctcctgtgtgcttcagacaaaaataaatgagactttgtgtttacgtta

SEQ ID NO: 12973 - DNA, 1771 bp, Homo sapiens
  source 1..1771: mol_type = unassigned DNA
agcctgtgtccgcccggcagccgcccgcagctgcagagagtcccgctgcgtctccgccgcgtgcgccctcctcgaccagcagacccgcgctgcgctccgccgctgacatgtgtgccgctcagatgccgcccctggcgcacatcttccgagggacgttcgtccactccacctggacctgccccatggaggtgctgcgggatcacctcctcggcgtgagcgacagcggcaaatgtttttagaagaagcatctcaacaggaaaaactggccaaagaatggtgcttcaagccgtgtgaaataagagaactgagccaccatgagttcttcatgcctgggctggttgatacacacatccatgcctctcagtattcctttgctggaagtagcatagacctgccactcttggagtggctgaccaagtacacatttcctgcagaacacagattccagaacatcgactttgcagaagaagtatataccagagttgtcaggagaacactaaagaatggaacaaccacagcttgttactttgcaacaattcacactgactcatctctgctccttgccgacattacagataaatttggacagcgggcatttgtgggcaaagtttgcatggatttgaatgacacttttccagaatacaaggagaccactgaggaatcgatcaaggaaactgagagatttgtgtcagaaatgctccaaaagaacagccatataagtgaaaatcgtgatgaagttgaagctgtgaaaaacttataccccagttataaaaactacacatctgtgtatgataaaaacaatcttttgacaaataagacagtgatggcacacggctgctacctctctgcagaagaactgaacgtattccatgaacgaggagcatccatcgcacactgtcccaattctaatttatcgctcagcagtggatttctaaatgtgctagaagtcctgaaacatgaagtcaagatagggctgggtacagacgtggctggtggctattcatattccatgcttgatgcaatcagaagagcagtgatggtttccaatatccttttaattaataaggtaaatgagaaaagcctcaccctcaaagaagtcttcagactagctactcttggaggaagccaagccctggggctggatggtgagattggaaactttgaagtgggcaaggaatttgatgccatcctgatcaaccccaaagcatccgactctcccattgacctgttttatggggacttttttggtgatatttctgaggctgttatccagaagttcctctatctaggagatgatcgaaatattgaagaggtttatgtgggcggaaagcaggtggttccgttttccagctcagtgaaagaaacaattcacttaccagcctcctcaccccatcctccaccatttccttaatgttccatggtattttcaacggaatacactttgaaagttctcagaataactgtagaatgtgctggaaatggaacattctcagataaggaggaactggccagatcaaactaagctgtgttcccatccctcctgaaacaggatcttatggtgctttagcccaggacgtcaagtatcccctaggtatgaaacccagagtggagcatgctttgaaggtccctcagctacatgcagactagactgcatgtagctgactctaactgccctgggaaactatcctgagctttgacagacctgccatgaatcttaagcttttattgtcccttgctgcctatctgtgaggaataaagttgcttcacttac

SEQ ID NO: 12974 - DNA, 1491 bp, Homo sapiens
  source 1..1491: mol_type = unassigned DNA
gtagggagccagcccctgggcgcggcctgcagggtaccggcaaccgcccgggtaagcgggggcaggacaaggccggagcctgtgtccgcccggcagccgcccgcagctgcagagagtcccgctgcgtctccgccgcgtgcgccctcctcgaccagcagacccgcgctgcgctccgccgctgacatgtgtgccgctcagatgccgcccctggcgcacatcttccgagggacgttcgtccactccacctggacctgccccatggaggtgctgcgggatcacctcctcggcgtgagcgacagcggcaaaatagtgtttttagaagaagcatctcaacaggaaaaactggccaaagaatggtgcttcaagccgtgtgaaataagagaactgagccaccatgagttcttcatgcctgggctggttgatacacacatccatgcctctcagtattcctttgctggaagtagcatagacctgccactcttggagtggctgaccaagtacacatttcctgcagaacacagattccagaacatcgactttgcagaagaagtatataccagagttgtcaggagaacactaaagaatggaacaaccacagcttgttactttgcaacaattcacactgactcatctctgctccttgccgacattacagataaatttggacagcgggcatttgtgggcaaagtttgcatggatttgaatgacacttttccagaatacaaggagaccactgaggaatcgatcaaggaaactgagagatttgtgtcagaaatgctccaaaagaacagccatataagtgaaaatcgtgatgaagttgaagctgtgaaaaacttataccccagttataaaaactacacatctgtgtatgataaaaacaatcttttgacaaataagacagtgatggcacacggctgctacctctctgcagaagaactgaacgtattccatgaacgaggagcatccatcgcacactgtcccaattctaatttatcgctcagcagtggatttctaaatgtgctagaagtcctgaaacatgaagtcaagatagggctgggtacagacgtggctggtggctattcatattccatgcttgatgcaatcagaagagcagtgatggtttccaatatccttttaattaataaggtaaatgagaaaagcctcaccctcaaagaagtcttcagactagctactcttggaggaagccaagccctggggctggatggtgagattggaaactttgaagtgggcaaggaatttgatgccatcctgatcaaccccaaagcatccgactctcccattgacctgttttatggggacttttttggtgatatttctgaggctgttatccagaagttcctctatctaggagatgatcgaaatattgaagaggtttatgtgggcggaaagcaggtggttccgttttccagctcagtgaaagaaacaattcacttaccagcctcctcaccccatcctccaccatttccttaa

SEQ ID NO: 12975 - DNA, 694 bp, Homo sapiens
  source 1..694: mol_type = unassigned DNA
cagcttgttactttgcaacaattcacactgactcatctctgctccttgccgacattacagataaatttggacagcgggcatttgtgggcaaagtttgcatggatttgaatgacacttttccagaatacaaggagaccactgaggaatcgatcaaggaaactgagagactgtcactctgtcacccaggctggagtgcaatggcgcgatctcagctcactgaaacctccacctcctgtgttcaagagattctcctgcctcagcctcccgagtagctgggattacagatttgtgtcagaaatgctccaaaagaactattctagagtgaagcccatagtgacaccacgtttttccctctcctgctctgagactttgatgggtgaactgggcaacattgctaaaacccgtgatttgcacattcagagccatataagtgaaaatcgtgatgaagttgaagctgtgaaaaacttataccccagttataaaaactacacatctgtgtatgataaaaacaatcttttgacaaataagacagtgatggcacacggctgctacctctctgcagaagaactgaacgtattccatgaacgaggagcatccatcgcacactgtcccaattctaatttatcgctcagcagtggatttctaaatgtgctagaagtcctgaaacatgaagtcaagatagggctgggtacag

SEQ ID NO: 12976 - DNA, 990 bp, Homo sapiens
  source 1..990: mol_type = unassigned DNA
gaacgaggagcatccatcgcacactgtcccaattctaatttatcgctcagcagtggatttctaaatgtgctagaagtcctgaaacatgaagtcaagatagggctgggtacagacgtggctggtggctattcatattccatgcttgatgcaatcagaagagcagtgatggtttccaatatccttttaattaataaggtaaatgagaaaagcctcaccctcaaagaagtcttcagactagctactcttggaggaagccaagccctggggctggatggtgagattggaaactttgaagtgggcaaggaatttgatgccatcctgatcaaccccaaagcatccgactctcccattgacctgttttatggggacttttttggtgatatttctgaggctgttatccagaagttcctctatctaggagatgatcgaaatattgaagaggtttatgtgggcggaaagcaggtggttccgttttccagctcagtgaaagaaacaattcacttaccagcctcctcaccccatcctccaccatttccttaatgttccatggtattttcaacggaatacactttgaaagacctgagtgtgaaagactgagagttgaggagttactttgtggatcttgtccaaatttagtgaaatgtggaagtcaaccagaccaatgatggaattaaatgtaaattccaagagggctttcacagtccacagggttcaaatgacttgggtaacagaagttattcttagcttacctgttatgtgacagtgatttacctgtccatttccaacccaaaagcctgtcagaaagcattctttagagaaaaccactttacatttgttgttaaactcctgatcgctactcttaagaatatacatgtatgtattcataggaacattttttctcaatatttgtatgattcgcttactgttattgtgctgagtgagctcctgtgtgcttcagacaaaaataaatgagactttgtgtttacgtta

SEQ ID NO: 12977 - DNA, 2019 bp, Homo sapiens
  source 1..2019: mol_type = unassigned DNA
gcccgcagctgcagagagtcccgctgcgtctccgccgcgtgcgccctcctcgaccagcagacccgcgctgcgctccgccgctgacatgtgtgccgctcagatgccgcccctggcgcacatcttccgagggacgttcgtccactccacctggacctgccccatggaggtgctgcgggatcacctcctcggcgtgagcgacagcggcaaaatagtgtttttagaagaagcatctcaacaggaaaaactggccaaagaatggtgcttcaagccgtgtgaaataagagaactgagccaccatgagttcttcatgcctgggctggttgatacacacatccatgcctctcagtattcctttgctggaagtagcatagacctgccactcttggagtggctgaccaagtacacatttcctgcagaacacagattccagaacatcgactttgcagaagaagtatataccagagttgtcaggagaacactaaagaatggaacaaccacagcttgttactttgcaacaattcacactgactcatctctgctccttgccgacattacagataaatttggacagcgggcatttgtgggcaaagtttgcatggatttgaatgacacttttccagaatacaaggagaccactgaggaatcgatcaaggaaactgagagatttgtgtcagaaatgctccaaaagaactattctagagtgaagcccatagtgacaccacgtttttccctctcctgctctgagactttgatgggtgaactgggcaacattgctaaaacccgtgatttgcacattcagagccatataagtgaaaatcgtgatgaagttgaagctgtgaaaaacttataccccagttataaaaactacacatctgtgtatgataaaaacaatcttttgacaaataagacagtgatggcacacggctgctacctctctgcagaagaactgaacgtattccatgaacgaggagcatccatcgcacactgtcccaattctaatttatcgctcagcagtggatttctaaatgtgctagaagtcctgaaacatgaagtcaagatagggctgggtacagacgtggctggtggctattcatattccatgcttgatgcaatcagaagagcagtgatggtttccaatatccttttaattaataaggtaaatgagaaaagcctcaccctcaaagaagtcttcagactagctactcttggaggaagccaagccctggggctggatggtgagattggaaactttgaagtgggcaaggaatttgatgccatcctgatcaaccccaaagcatccgactctcccattgacctgttttatggggacttttttggtgatatttctgaggctgttatccagaagttcctctatctaggagatgatcgaaatattgaagaggtttatgtgggcggaaagcaggtggttccgttttccagctcagtgtaagaccctcgggcgtctacaaagttctcctgggattagcgtggttctgcatctcccttgtgcccaggaaagaaacaattcacttaccagcctcctcaccccatcctccaccatttccttaatgttccatggtattttcaacggaatacactttgaaagacctgagtgtgaaagactgagagttgaggagttactttgtggatcttgtccaaatttagtgaaatgtggaagtcaaccagaccaatgatggaattaaatgtaaattccaagagggctttcacagtccacagggttcaaatgacttgggtaacagaagttattcttagcttacctgttatgtgacagtgatttacctgtccatttccaacccaaaagcctgtcagaaagcattctttagagaaaaccactttacatttgttgttaaactcctgatcgctactcttaagaatatacatgtatgtattcataggaacattttttctcaatatttgtatgattcgcttactgttattgtgctgagtgagctcctgtgtgcttcagacaaaaataaatgagactttgtgtttacgtta

SEQ ID NO: 12978 - DNA, 1532 bp, Homo sapiens
  source 1..1532: mol_type = unassigned DNA
attctcccgcctcagtctcctgagtagccgggactacaggcacccgctacaacgcccggctaattttttttgtatttccccttccttctttgctttcaaaatccaggcttaggggtacaaaaacctatattgtctgagacaggaagcactccgaagtttgaagaagagggcagcagcccaactcagaagaactggactccccagcactataaggagagagggtggtggttccaccagagatagtgtttttagaagaagcatctcaacaggaaaaactggccaaagaatggtgcttcaagccgtgtgaaataagagaactgagccaccatgagttcttcatgcctgggctggttgatacacacatccatgcctctcagtattcctttgctggaagtagcatagacctgccactcttggagtggctgaccaagtacacatttcctgcagaacacagattccagaacatcgactttgcagaagaagtatataccagagttgtcaggagaacactaaagaatggaacaaccacagcttgttactttgcaacaattcacactgactcatctctgctccttgccgacattacagataaatttggacagcgggcatttgtgggcaaagtttgcatggatttgaatgacacttttccagaatacaaggagaccactgaggaatcgatcaaggaaactgagagatttgtgtcagaaatgctccaaaagaactattctagagtgaagcccatagtgacaccacgtttttccctctcctgctctgagactttgatgggtgaactgggcaacattgctaaaacccgtgatttgcacattcagagccatataagtgaaaatcgtgatgaagttgaagctgtgaaaaacttataccccagttataaaaactacacatctgtgtatgataaaaacaatcttttgacaaataagacagtgatggcacacggctgctacctctctgcagaagaactgaacgtattccatgaacgaggagcatccatcgcacactgtcccaattctaatttatcgctcagcagtggatttctaaatgtgctagaagtcctgaaacatgaagtcaagatagggctgggtacagacgtggctggtggctattcatattccatgcttgatgcaatcagaagagcagtgatggtttccaatatccttttaattaataaggtaaatgagaaaagcctcaccctcaaagaagtcttcagactagctactcttggaggaagccaagccctggggctggatggtgagattggaaactttgaagtgggcaaggaatttgatgccatcctgatcaaccccaaagcatccgactctcccattgacctgttttatggggacttttttggtgatatttctgaggctgttatccagaagttcctctatctaggagatgatcgaaatattgaagaggtttatgtgggcggaaagcaggtggttccgttttccagctcagtgtaagaccctcgggcgtctacaaagttctcctgggattagcgtggttctgcatct

SEQ ID NO: 12979 - DNA, 5393 bp, Homo sapiens
  source 1..5393: mol_type = unassigned DNA
gagggccggccggtttggcggcggctgcggagggtatctgaggctcggctgccaagccgaacgggctctggctcctcccagtggccggccggggcggaagcaggaggcgggggcagcgtgcgcgctgctggtcttctctcccgcggcgctggggcccgcgctccgctgctgttgctccattcggcgcttttctggcggctggctcctctccgctgccggctgctcctcgaccaggcctccttctcaacctcagcccgcggcgccgacccttccggcaccctcccgccccgtctcgtactgtcgccgtcaccgccgcggctccggccctggccccgatggctctgtgcaacggagactccaagctggagaatgctggaggagaccttaaggatggccaccaccactatgaaggagctgttgtcattctggatgctggtgctcagtacgggaaagtcatagaccgaagagtgagggaactgttcgtgcagtctgaaattttccccttggaaacaccagcatttgctataaaggaacaaggattccgtgctattatcatctctggaggacctaattctgtgtatgctgaagatgctccctggtttgatccagcaatattcactattggcaagcctgttcttggaatttgctatggtatgcagatgatgaataaggtatttggaggtactgtgcacaaaaaaagtgtcagagaagatggagttttcaacattagtgtggataatacatgttcattattcaggggccttcagaaggaagaagttgttttgcttacacatggagatagtgtagacaaagtagctgatggattcaaggttgtggcacgttctggaaacatagtagcaggcatagcaaatgaatctaaaaagttatatggagcacagttccaccctgaagttggccttacagaaaatggaaaagtaatactgaagaatttcctttatgatatagctggatgcagtggaaccttcaccgtgcagaacagagaacttgagtgtattcgagagatcaaagagagagtaggcacgtcaaaagttttggttttactcagtggtggagtagactcaacagtttgtacagctttgctaaatcgtgctttgaaccaagaacaagtcattgctgtgcacattgataatggctttatgagaaaacgagaaagccagtctgttgaagaggccctcaaaaagcttggaattcaggtcaaagtgataaatgctgctcattctttctacaatggaacaacaaccctaccaatatcagatgaagatagaaccccacggaaaagaattagcaaaacgttaaatatgaccacaagtcctgaagagaaaagaaaaatcattggggatacttttgttaagattgccaatgaagtaattggagaaatgaacttgaaaccagaggaggttttccttgcccaaggtactttacggcctgatctaattgaaagtgcatcccttgttgcaagtggcaaagctgaactcatcaaaacccatcacaatgacacagagctcatcagaaagttgagagaggagggaaaagtaatagaacctctgaaagattttcataaagatgaagtgagaattttgggcagagaacttggacttccagaagagttagtttccaggcatccatttccaggtcctggcctggcaatcagagtaatatgtgctgaagaaccttatatttgtaaggactttcctgaaaccaacaatattttgaaaatagtagctgatttttctgcaagtgttaaaaagccacataccctattacagagagtcaaagcctgcacaacagaagaggatcaggagaagctgatgcaaattaccagtctgcattcactgaatgccttcttgctgccaattaaaactgtaggtgtgcagggtgactgtcgttcctacagttacgtgtgtggaatctccagtaaagatgaacctgactgggaatcacttatttttctggctaggcttatacctcgcatgtgtcacaacgttaacagagttgtttatatatttggcccaccagttaaagaacctcctacagatgttactcccactttcttgacaacaggggtgctcagtactttacgccaagctgattttgaggcccataacattctcagggagtctgggtatgctgggaaaatcagccagatgccggtgattttgacaccattacattttgatcgggacccacttcaaaagcagccttcatgccagagatctgtggttattcgaacctttattactagtgacttcatgactggtatacctgcaacacctggcaatgagatccctgtagaggtggtattaaagatggtcactgagattaagaagattcctggtatttctcgaattatgtatgacttaacatcaaagcccccaggaactactgagtgggagtaataaacttcttgttctattaaagtaccgtgtgcagtttaaattgattagaaatcattcccattattgacatgcagtactgtgaaaagagttactggagcagctacatcacatctgagttctccacagcaaaaatctacggcttaagagctgagttggggataaccaaaagggactgaagagtttgtacgggtaaataatcaaagcaccattgcctacactcagacagattgatactgcttttgcctttgcctcacttattctttatgtataaattcactgttgatgtctctgtgaatatgtatgaaggtgggtgaatttgggggtaattatgggcttctgtctccttaccagtttctaagaactgttagaaacgcccattatttaccagtgttacttactacttatatatactttttggagaatcagttttcttataagtaatcttatttctccaaagggtgaaaaagagatgaacatatcagataaaggtataggtgggctattccagccacttttgaaggacactgagggtataaaatgtaagctaccataagatggaaaagcaccaggaatttgttgatgtacttttgaattttatttcacagccttgggaggaagaaactatgagtggtctcagatgtctatgaatggtcttaaaatgttttcaaaccatgttccacatagatgccatgttattcaatgtcagcttgtttattagtaaggagctttatcctcctagccttatattaccagccccccacagccttgcatagaaagtttctgttatctccttagaagaaactggctcaatgacgtttctggtgtagtgcagatagaggtcaagaggagcattttcatctcttcttttgctggtcagagaaacggttctgagatcacagaagctatgatgcatacctacagcttacaaaagggagaggaaaaatgtttatatcatctagtaaacagttgtaaaatgagcttttaaatctaatctatagacatattattcattgctcagacacctgtgaacagtcttgatacatgcaagatgtttgccaaactttgtaatcctttctactagctataagagaggatttaagaactggtgtaggacttgttgccatcaccaccagtttctaacagatcttttataacattcacataagtactgtagacagtagtagacttaaactctccgtttctctcagtattttagctaagaatgttaccatatttttctcttaacaattccatctcaggttgctgctgcttgtctagtttaaaaggtcagatctattaatcaggaatgaaattttatttgggattcagtgttagacaaacaacaaaatgatgcgtggcagaagtcatctttttattctggctggtccagggaacaagaaaactgctgctggaccagcaagggaagagtttctgtctgtcttaacagaaatctgtccccaagacaaaggggtacttgactcctacaaaacttaaagggtacattctctatctgatgaggaggtactcattatggccttctggaaagaggctatgttagtgatctggtctttacagatttagagtcatgttatttgaaagctagaatagacaacctataaaatgcttaccaacatgtgtcagtacacgtttatgtttatatgaaaaaaaatttctagccacagtgtcttatgattttgtattgaagcaaacagtaggaattttggaaaaatagagagtaagaatgtgtgttctatggaacactgctccactgagaaggtccatgtaaaaaggattaggtggtcatataagtttggggaacataagctcacttgtcctttcctggagattcatggtatataatattcaaagctctgagaaattctgaagttaaaaacaattgttaaattctgcttaaattagtgttttcctgatatttgttttttgaacaccttttatataatcccttctaatatatacttagtatatacttaatataatattgggaaaattgttactccaaagcacatcttgacatgacatagtttcttaaaaatccaaattttctggaactcagaaatttcctaatatttagcacactgtcttcttttgcacagcactttttgctttgtgccatatagcattactctgtaccttcacagtatttcatctgagccactgaggaaagttaaaggttgcacttccattttacagttaagaaaacaagctcaccttaggcatggttacttaattaatttcagaattaaatttcaggtttccttagtccagattgtcctgatgtgtattctgacacctaaaattatataaacatttatgggatgcttattttactaagactagaatggtggctacctggctaataacattcatcattggttattctgggcatatcatgactttattcccgttgcttaccatctacctgggacacatctctctttgattaaatatattctttttctttgtactttttaggtagacagagaatgtagatcattgaaagcattatttattcctaagattggcaggcacagaatcatttttaagaaccaaatacccagtcctgccttaaaggccacatctatgatcatcagctctgttagaaataacagcctggcataattcctaaatacaagtctgtagatatatccaggagatagggttacactgttttctaaccttttttaaatcccttaatcttgaggtaaactgcatgcatttagtcaaacaagcatcataaaatttgtttcctcactgtttgggcttaacctcctgatagcctgttttactgaataacttgaccctaacctgtagagaataagagcattcaaattaggaaggcaggactatccatctttagtgcttttcctgccgttaaacaacaatgtgaacttggtcaagtcatttctgttctttatctgtgacatgaggtaactgtattaaattttcagcatcaaa

SEQ ID NO: 12980 - DNA, 2199 bp, Homo sapiens
  source 1..2199: mol_type = unassigned DNA
gtgcgcgctgctggtcttctctcccgcggcgctggggcccgcgctccgctgctgttgctccattcggcgcttttctggcggctggctcctctccgctgccggctgctcctcgaccaggcctccttctcaacctcagcccgcggcgccgacccttccggcaccctcccgccccgtctcgtactgtcgccgtcaccgccgcggctccggccctggccccgatggctctgtgcaacggagactccaagctggagaatgctggaggagaccttaaggatggccaccaccactataaaggaacaaggattccgtgctattatcatctctggaggacctaattctgtgtatgctgaagatgctccctggtttgatccagcaatattcactattggcaagcctgttcttggaatttgctatggtatgcagatgatgaataaggtatttggaggtactgtgcacaaaaaaagtgtcagagaagatggagttttcaacattagtgtggataatacatgttcattattcaggggccttcagaaggaagaagttgttttgcttacacatggagatagtgtagacaaagtagctgatggattcaaggttgtggcacgttctggaaacatagtagcaggcatagcaaatgaatctaaaaagttatatggagcacagttccaccctgaagttggccttacagaaaatggaaaagtaatactgaagaatttcctttatgatatagctggatgcagtggaaccttcaccgtgcagaacagagaacttgagtgtattcgagagatcaaagagagagtaggcacgtcaaaagttttggttttactcagtggtggagtagactcaacagtttgtacagctttgctaaatcgtgctttgaaccaagaacaagtcattgctgtgcacattgataatggctttatgagaaaacgagaaagccagtctgttgaagaggccctcaaaaagcttggaattcaggtcaaagtgataaatgctgctcattctttctacaatggaacaacaaccctaccaatatcagatgaagatagaaccccacggaaaagaattagcaaaacgttaaatatgaccacaagtcctgaagagaaaagaaaaatcattggggatacttttgttaagattgccaatgaagtaattggagaaatgaacttgaaaccagaggaggttttccttgcccaaggtactttacggcctgatctaattgaaagtgcatcccttgttgcaagtggcaaagctgaactcatcaaaacccatcacaatgacacagagctcatcagaaagttgagagaggagggaaaagtaatagaacctctgaaagattttcataaagatgaagtgagaattttgggcagagaacttggacttccagaagagttagtttccaggcatccatttccaggtcctggcctggcaatcagagtaatatgtgctgaagaaccttatatttgtaaggactttcctgaaaccaacaatattttgaaaatagtagctgatttttctgcaagtgttaaaaagccacataccctattacagagagtcaaagcctgcacaacagaagaggatcaggagaagctgatgcaaattaccagtctgcattcactgaatgccttcttgctgccaattaaaactgtaggtgtgcagggtgactgtcgttcctacagttacgtgtgtggaatctccagtaaagatgaacctgactgggaatcacttatttttctggctaggcttatacctcgcatgtgtcacaacgttaacagagttgtttatatatttggcccaccagttaaagaacctcctacagatgttactcccactttcttgacaacaggggtgctcagtactttacgccaagctgattttgaggcccataacattctcagggagtctgggtatgctgggaaaatcagccagatgccggtgattttgacaccattacattttgatcgggacccacttcaaaagcagccttcatgccagagatctgtggttattcgaacctttattactagtgacttcatgactggtatacctgcaacacctggcaatgagatccctgtagaggtggtattaaagatggtcactgagattaagaagattcctggtatttctcgaattatgtatgacttaacatcaaagcccccaggaactactgagtgggagtaataaacttcttgttctatt

SEQ ID NO: 12981 - DNA, 2229 bp, Homo sapiens
  source 1..2229: mol_type = unassigned DNA
tccattcggcgcttttctggcggctggctcctctccgctgccggctgctcctcgaccaggcctccttctcaacctcagcccgcggcgccgacccttccggcaccctcccgatggctctgtgcaacggagactccaagctggagaatgctggaggagaccttaaggatggccaccaccactatgaaggagctgttgtcattctggatgctggtgctcagtacgggaaagtcatagaccgaagagtgagggaactgttcgtgcagtctgaaattttccccttggaaacaccagcatttgctataaaggaacaaggattccgtgctattatcatctctggaggacctaattctgtgtatgctgaagatgctccctggtttgatccagcaatattcactattggcaagcctgttcttggaatttgctatggtatgcagatgatgaataaggtatttggaggtactgtgcacaaaaaaagtgtcagagaagatggagttttcaacattagtgtggataatacatgttcattattcaggggccttcagaaggaagaagttgttttgcttacacatggagatagtgtagacaaagtagctgatggattcaaggttgtggcacgttctggaaacatagtagcaggcatagcaaatgaatctaaaaagttatatggagcacagttccaccctgaagttggccttacagaaaatggaaaagtaatactgaagaatttcctttatgatatagctggatgcagtggaaccttcaccgtgcagaacagagaacttgagtgtattcgagagatcaaagagagagtaggcacgtcaaaagttttggttttactcagtggtggagtagactcaacagtttgtacagctttgctaaatcgtgctttgaaccaagaacaagtcattgctgtgcacattgataatggctttatgagaaaacgagaaagccagtctgttgaagaggccctcaaaaagcttggaattcaggtcaaagtgataaatgctgctcattctttctacaatggaacaacaaccctaccaatatcagatgaagatagaaccccacggaaaagaattagcaaaacgttaaatatgaccacaagtcctgaagagaaaagaaaaatcattggggatacttttgttaagattgccaatgaagtaattggagaaatgaacttgaaaccagaggaggttttccttgcccaaggtactttacggcctgatctaattgaaagtgcatcccttgttgcaagtggcaaagctgaactcatcaaaacccatcacaatgacacagagctcatcagaaagttgagagaggagggaaaagtaatagaacctctgaaagattttcataaagatgaagtgagaattttgggcagagaacttggacttccagaagagttagtttccaggcatccatttccaggtcctggcctggcaatcagagtaatatgtgctgaagaaccttatatttgtaaggactttcctgaaaccaacaatattttgaaaatagtagctgatttttctgcaagtgttaaaaagccacataccctattacagagagtcaaagcctgcacaacagaagaggatcaggagaagctgatgcaaattaccagtctgcattcactgaatgccttcttgctgccaattaaaactgtaggtgtgcagggtgactgtcgttcctacagttacgtgtgtggaatctccagtaaagatgaacctgactgggaatcacttatttttctggctaggcttatacctcgcatgtgtcacaacgttaacagagttgtttatatatttggcccaccagttaaagaacctcctacagatgttactcccactttcttgacaacaggggtgctcagtactttacgccaagctgattttgaggcccataacattctcagggagtctgggtatgctgggaaaatcagccagatgccggtgattttgacaccattacattttgatcgggacccacttcaaaagcagccttcatgccagagatctgtggttattcgaacctttattactagtgacttcatgactggtatacctgcaacacctggcaatgagatccctgtagaggtggtattaaagatggtcactgagattaagaagattcctggtatttctcgaattatgtatgacttaacatcaaagcccccaggaactactgagtgggagtaataaacttcttgttctattaaagtaccgtgtgcagttt

SEQ ID NO: 12982 - DNA, 4378 bp, Homo sapiens
  source 1..4378: mol_type = unassigned DNA
ggcgacgagtgcgggcctcggagcgactgcagcggcggcggcggacgcggcctgaggcgagcggcggggcgtggggcggtgcctcggcccgggctcgccctcgccggcgggagcgtccatggcccccgggcgccggcggggcgcggccgcggcctgaggggccatgtccggggtggtgcggaccctcagccgctgcctgctgccggccgaggccggcggggcccgcgagcgcagggcgggcagcggcgcgcgcgacgcggagcgcgaggcccggaggcgtagccgcgacatcgacgcgctgctggcccgcgagcggcgcgcggtccggcgcctggtgaagatcctgctgctgggcgcgggcgagagcggcaagtccacgttcctcaagcagatgcgcatcatccacggccgcgagttcgaccagaaggcgctgctggagttccgcgacaccatcttcgacaacatcctcaagggctcaagggttcttgttgatgcacgagataagcttggcattccttggcagtattctgaaaatgagaagcatgggatgttcctgatggccttcgagaacaaggcggggctgcctgtggagccggccaccttccagctgtacgtcccggccctgagcgcactctggagggattctggcatcagggaggctttcagccggagaagcgagtttcagctgggggagtcggtgaagtacttcctggacaacttggaccggatcggccagctgaattactttcctagtaagcaagatatcctgctggctaggaaagccaccaagggaattgtggagcatgacttcgttattaagaagatcccctttaagatggtggatgtgggcggccagcggtcccagcgccagaagtggttccagtgcttcgacgggatcacgtccatcctgttcatggtctcctccagcgagtacgaccaggtcctcatggaggacaggcgcaccaaccggctggtggagtccatgaacatcttcgagaccatcgtcaacaacaagctcttcttcaacgtctccatcattctcttcctcaacaagatggacctcctggtggagaaggtgaagaccgtgagcatcaagaagcacttcccggacttcaggggcgacccgcacaggctggaggacgtccagcgctacctggtccagtgcttcgacaggaagagacggaaccgcagcaagccactcttccaccacttcaccaccgccatcgacaccgagaacgtccgcttcgtgttccatgctgtgaaagacaccatcctgcaggagaacctgaaggacatcatgctgcagtgagcgaggaagccccggggtttgtcgtcgttgagcagcccccacggctgtcggtcagactcttgggtgtgtgttgtctgtgtggtccttgagtgggtttctcggatccgtgccctggaatacctggctcaggaatgctgtcagaccagccagccagcgagctctaggcaaaaggacatggaaactgtcacgttagctactgaatcctgggggcgagtgaaactactgaaaatccgagtgatgatgttgtgaatacggaacacctaatcacacagcttgctttgcttttacagaaacgttcctctttttctgacgcagtttaattgaggaccgtgttgtgtgtgtatgtgtgtacacacgctctgtctttaatgacagaaacacaaaaaccagctggccttgcagacggcttttctaactcacaagtcttccctgagacagactaacctgaaagctttgcctaacagtagcttgtagagatccagtgcacgccgatgctgctaaactcagtgcctgagcccggccctgcagccccagccgcagtgtctgaaggccacctcccaaagggagcacgttgccttttcaaactcccgtgccgatttcctaagagcccctagtccaagcctctcagatgaagctgaggagccgtgcctaggatcccttcccagctctgaggacgggctgcagagctctgcaggtgtggattcaccttacgcccctacagcaggctcagcccttcccaccctgccccatgcccagcagcacaacacggagtgagacaggatgcccacggtgactgccgctccgtccgtgcacacacagcggtgctcttctccccttagccacccactgcccaacccaacggcaaagacacagaaaccaggtccccttgcagacggctctcccatcttcctgcaagtcatctgctcacacacagttggcagcacatagcgtttccttctttcagaaacattcctcttctggggcttcagaaagctggcaaggccactagcagagcttttgttaatgccccagctgcttggcgagctaacagctgacctttcgggaagcccacagacgctggaggaatcttgagtttctccaaactgccgctccaccagtgcctttggacagccgtgcctgttcgccgctctccctaagtctgattctcatcgaggcccctcgcttctatgactgtgcttgcagaagagtaaacactctcggatgccgctgtcctgggggagcccgcgggagcctgtgaatgttgatacgagctggccagtcctgggcccagctcacttgtccagctacctgccaggtggctttcactgtgtttaaaatacattgcattccaagctggtcccctctgtgtatcactctactgagaaatcctgcctagtgtgttttgggatgtgtcctagcatttacaagaaaatgaaaagcgtcctcttaattggcacccgaatgttgctgtggctcagtcacatatcccagggccctcgtcccgaggccgtgctgccccgagccccgagcccctctgcagctcacccttggcttgttttccgcaaacccggtaaacgcaagcccttggggcagatgcagaagcagaagagggaggggaaacctgcctctgggtcaccctgttagcacagcgttctcatcgggagacagcatggaactctctctcgcagtgctcgaggctgtgtgtcagtgtttgctgggcttgtggctccttttttggctggataaagaagtcgctgtttttgtactgcttctgtggctcttcacagacctcacggatgtgaccggagatgagtgccgatgaccacgttttaaaggagaaagagagctcctggtggggccctcggggtggtctcaggtcccatttgcagtctgcaacagtgacgcgcagcccggtccggagcgtggtgagctttgtttgccttctgggtcagctttcgctgtgtctcctgtgtgtgttagaatccagagcccagaggaagtgcaagcgggtcctccgccaacggggagagcctcttcgcggcgctgttggcgacagcagcgctgtgattcgcgtagcaggggagttgtttgaaacaccttcctgagtagtccggccttgtcaatgagtgcttgttttcctttaaacagtctgacatatttactcgtcactttcaaaccagaagcatgagaggaaggagatattgtggggtccgtttaactcgatagaaagcgcagggggatggcccccggcgcgggctcttgacccgctcagcgctgaccccaccgccctggccgaggcacttggccttgctgagctggacttcctcctcctcctcctcatgaccggggtgaattagaacgtttttaaagacacccccttccaaattctgtaacacattgtaattggagaagaaggaaactctgcaaggctaaactgtcattcacaacttggctacacatagactctagtcagttttgtctccagaaccttaggcttttgtattttttaattttaatttcactgttaatccttattgtcttttttattaagatgttggaaaagcaggaggtagttgtgcctcaattattgcaaaaatgtaacaataaagttcctcaaaataagatctgttcctcatagctatactgtgtacacataagacgcatatagggttttactgaaatctatttttaactcttatgttcgtagagaaattgtttcaaggattttgagtcataggtctgtaatttatagagatctctagaattcttattgtaattttcctacttctttgataaaagaaaaataagtcagattgttaactccaagattgaaaaaaaaaactcttgaaagaagattattagttgtaactaatttaggggttctgggcacagacatctaacctggtattgtaaggcagaggctcccattggaatggtagtggtccgggtcagttgttcatggtgtaagctttgcacagtgtattaacattgggagggtctggcttgaaaatttggccaccctcagcctctgaatgtttattaaaataaatttagtctttctttgcttaa

SEQ ID NO: 12983 - DNA, 3785 bp, Homo sapiens
  source 1..3785: mol_type = unassigned DNA
aatgcttctgagaagagagaggaagatgacttcagaggctgcttgtggtctctcactcaaggctggtagggagccccggtctgcgtcctggaggaacggcacgctgagtcctgggccagtggccggcggggctgttggcgaccacagtagcacacaagggctctttctgaggagcaggagaccctggcacgggccccacgggagtgtctggggcgtccccgcctgtggcctcttctccccgccgcagcaccaatggctccacgagcagggctcggagctggccctctcctgcttcggagccgcgctgactgggtgtgtggcggatgggaggccgccctgagtgctcctcctcccttttgtacagcctgggtggaaaggacgggcctggtgcacttcctgcgggagggaggacatggggcctgcttccctctggcgctcctccacccgggcagcgtggtttctttccaaatgatttatcctctcatcgtcctgccgctctgtgcttcatggcattggggtcttatccggaaggggattgtccttttttggggggagtcggtgaagtacttcctggacaacttggaccggatcggccagctgaattactttcctagtaagcaagatatcctgctggctaggaaagccaccaagggaattgtggagcatgacttcgttattaagaagatcccctttaagatggtggatgtgggcggccagcggtcccagcgccagaagtggttccagtgcttcgacgggatcacgtccatcctgttcatggtctcctccagcgagtacgaccaggtcctcatggaggacaggcgcaccaaccggctggtggagtccatgaacatcttcgagaccatcgtcaacaacaagctcttcttcaacgtctccatcattctcttcctcaacaagatggacctcctggtggagaaggtgaagaccgtgagcatcaagaagcacttcccggacttcaggggcgacccgcacaggctggaggacgtccagcgctacctggtccagtgcttcgacaggaagagacggaaccgcagcaagccactcttccaccacttcaccaccgccatcgacaccgagaacgtccgcttcgtgttccatgctgtgaaagacaccatcctgcaggagaacctgaaggacatcatgctgcagtgagcgaggaagccccggggtttgtcgtcgttgagcagcccccacggctgtcggtcagactcttgggtgtgtgttgtctgtgtggtccttgagtgggtttctcggatccgtgccctggaatacctggctcaggaatgctgtcagaccagccagccagcgagctctaggcaaaaggacatggaaactgtcacgttagctactgaatcctgggggcgagtgaaactactgaaaatccgagtgatgatgttgtgaatacggaacacctaatcacacagcttgctttgcttttacagaaacgttcctctttttctgacgcagtttaattgaggaccgtgttgtgtgtgtatgtgtgtacacacgctctgtctttaatgacagaaacacaaaaaccagctggccttgcagacggcttttctaactcacaagtcttccctgagacagactaacctgaaagctttgcctaacagtagcttgtagagatccagtgcacgccgatgctgctaaactcagtgcctgagcccggccctgcagccccagccgcagtgtctgaaggccacctcccaaagggagcacgttgccttttcaaactcccgtgccgatttcctaagagcccctagtccaagcctctcagatgaagctgaggagccgtgcctaggatcccttcccagctctgaggacgggctgcagagctctgcaggtgtggattcaccttacgcccctacagcaggctcagcccttcccaccctgccccatgcccagcagcacaacacggagtgagacaggatgcccacggtgactgccgctccgtccgtgcacacacagcggtgctcttctccccttagccacccactgcccaacccaacggcaaagacacagaaaccaggtccccttgcagacggctctcccatcttcctgcaagtcatctgctcacacacagttggcagcacatagcgtttccttctttcagaaacattcctcttctggggcttcagaaagctggcaaggccactagcagagcttttgttaatgccccagctgcttggcgagctaacagctgacctttcgggaagcccacagacgctggaggaatcttgagtttctccaaactgccgctccaccagtgcctttggacagccgtgcctgttcgccgctctccctaagtctgattctcatcgaggcccctcgcttctatgactgtgcttgcagaagagtaaacactctcggatgccgctgtcctgggggagcccgcgggagcctgtgaatgttgatacgagctggccagtcctgggcccagctcacttgtccagctacctgccaggtggctttcactgtgtttaaaatacattgcattccaagctggtcccctctgtgtatcactctactgagaaatcctgcctagtgtgttttgggatgtgtcctagcatttacaagaaaatgaaaagcgtcctcttaattggcacccgaatgttgctgtggctcagtcacatatcccagggccctcgtcccgaggccgtgctgccccgagccccgagcccctctgcagctcacccttggcttgttttccgcaaacccggtaaacgcaagcccttggggcagatgcagaagcagaagagggaggggaaacctgcctctgggtcaccctgttagcacagcgttctcatcgggagacagcatggaactctctctcgcagtgctcgaggctgtgtgtcagtgtttgctgggcttgtggctccttttttggctggataaagaagtcgctgtttttgtactgcttctgtggctcttcacagacctcacggatgtgaccggagatgagtgccgatgaccacgttttaaaggagaaagagagctcctggtggggccctcggggtggtctcaggtcccatttgcagtctgcaacagtgacgcgcagcccggtccggagcgtggtgagctttgtttgccttctgggtcagctttcgctgtgtctcctgtgtgtgttagaatccagagcccagaggaagtgcaagcgggtcctccgccaacggggagagcctcttcgcggcgctgttggcgacagcagcgctgtgattcgcgtagcaggggagttgtttgaaacaccttcctgagtagtccggccttgtcaatgagtgcttgttttcctttaaacagtctgacatatttactcgtcactttcaaaccagaagcatgagaggaaggagatattgtggggtccgtttaactcgatagaaagcgcagggggatggcccccggcgcgggctcttgacccgctcagcgctgaccccaccgccctggccgaggcacttggccttgctgagctggacttcctcctcctcctcctcatgaccggggtgaattagaacgtttttaaagacacccccttccaaattctgtaacacattgtaattggagaagaaggaaactctgcaaggctaaactgtcattcacaacttggctacacatagactctagtcagttttgtctccagaaccttaggcttttgtattttttaattttaatttcactgttaatccttattgtcttttttattaagatgttggaaaagcaggaggtagttgtgcctcaattattgcaaaaatgtaacaataaagttcctc

SEQ ID NO: 12984 - DNA, 1317 bp, Homo sapiens
  source 1..1317: mol_type = unassigned DNA
gcgagcggcgcgcggtccggcgcctggtgaagatcctgctgctgggcgcgggcgagagcggcaagtccacgttcctcaagcagatgcgcatcatccacggccgcgagttcgaccagaaggcgctgctggagttccgcgacaccatcttcgacaacatcctcaagggctcaagggttcttgttgatgcacgagataagcttggcattccttggcagtattctgaaaatgagaagcatgggatgttcctgatggccttcgagaacaaggcggggctgcctgtggagccggccaccttccagctgtacgtcccggccctgagcgcactctggagggattctggcatcagggaggctttcagccggagaagcgagtttcagctgaattactttcctagtaagcaagatatcctgctggctaggaaagccaccaagggaattgtggagcatgacttcgttattaagaagatcccctttaagatggtggatgtgggcggccagcggtcccagcgccagaagtggttccagtgcttcgacgggatcacgtccatcctgttcatggtctcctccagcgagtacgaccaggtcctcatggaggacaggcgcaccaaccggctggtggagtccatgaacatcttcgagaccatcgtcaacaacaagctcttcttcaacgtctccatcattctcttcctcaacaagatggacctcctggtggagaaggtgaagaccgtgagcatcaagaagcacttcccggacttcaggggcgacccgcacaggctggaggacgtccagcgctacctggtccagtgcttcgacaggaagagacggaaccgcagcaagccactcttccaccacttcaccaccgccatcgacaccgagaacgtccgcttcgtgttccatgctgtgaaagacaccatcctgcaggagaacctgaaggacatcatgctgcagtgagcgaggaagccccggggtttgtcgtcgttgagcagcccccacggctgtcggtcagactcttgggtgtgtgttgtctgtgtggtccttgagtgggtttctcggatccgtgccctggaatacctggctcaggaatgctgtcagaccagccagccagcgagctctaggcaaaaggacatggaaactgtcacgttagctactgaatcctgggggcgagtgaaactactgaaaatccgagtgatgatgttgtgaatacggaacacctaatcacacagcttgctttgcttttacagaaacgttcctctttttctgacgcagtttaattgaggaccgtgttgtgtgtgtatgtgtgtacacacgctctgtcttt

SEQ ID NO: 12985 - DNA, 1597 bp, Homo sapiens
  source 1..1597: mol_type = unassigned DNA
gctgcggcggcggcgcgggctgagtgcggccgcgcgggagtccgcggctggcgcggcccgagcggggacccggcggctcgccaggcggcggccgaggcggggcgggccggcccggggccgagggccggtggccgaggccggagggccgcggcgggcggcggccgaggcggctccggccagggccgggccgggggccggggggcggcggcgggcaggcggccgcgtcggccggggccgggacgatgactctggagtccatgatggcgtgttgcctgagcgatgaggtgaaggagtccaagcggatcaacgccgagatcgagaagcagctgcggcgggacaagcgcgacgcccggcgcgagctcaagctgctgctgctcggcacgggcgagagcgggaagagcacgttcatcaagcagatgcgcatcatccacggcgccggctactcggaggaggacaagcgcggcttcaccaagctcgtctaccagaacatcttcaccgccatgcaggccatgatccgggccatggagacgctcaagatcctctacaagtacgagcagaacaaggccaatgcgctcctgatccgggaggtggacgtggagaaggtgaccaccttcgagcatcagtacgtcagtgccatcaagaccctgtgggaggacccgggcatccaggaatgctacgaccgcaggcgcgagtaccagctctccgactctgccaagtactacctgaccgacgttgaccgcatcgccaccttgggctacctgcccacccagcaggacgtgctgcgggtccgcgtgcccaccaccggcatcatcgagtaccctttcgacctggagaacatcatcttccggatggtggatgtggggggccagcggtcggagcggaggaagtggatccactgctttgagaacgtgacatccatcatgtttctcgtcgccctcagcgaatacgaccaagtcctggtggagtcggacaacgagaaccggatggaggagagcaaagccctgttccggaccatcatcacctacccctggttccagaactcctccgtcatcctcttcctcaacaagaaggacctgctggaggacaagatcctgtactcgcacctggtggactacttccccgagttcgatggtccccagcgggacgcccaggcggcgcgggagttcatcctgaagatgttcgtggacctgaaccccgacagcgacaagatcatctactcacacttcacgtgtgccaccgacacggagaacatccgcttcgtgttcgcggccgtgaaggacaccatcctgcagctcaacctcaaggagtacaacctggtctgagcgcccaggcccagggagacgggatggagacacggggcaggaccttccttccacggagcctgcggctgccgggcgggtggcgctgccgagtccgggccggggcctctgcccgcgggaggagatttttttttttcatatttttaacaaatggtttttatttcacagttatcaggggatgtacatctctccctccgtacacttcgcgcaccttctcaccttttgtcaacggcaaaggcagcctttttctggccttgacttatggctcgcttttttct

SEQ ID NO: 12986 - DNA, 1416 bp, Homo sapiens
  source 1..1416: mol_type = unassigned DNA
ctccttccctccctccctcccccgctgtcctggcccgccctgcccggcccgccctgcgagtcagttcgctggttccctccctccctgggcgcgctcgggccgccgccgcgctccccgccctcgagcctcggtgccggagccgcccgccgccggaggaggaggtggagggagccggaggggcccgccgaggcggcggcggcggcggcaagatggcggacttcctgccgtcgcggtccgtgctgtccgtgtgcttccccggctgcctgctgacgagtggcgaggccgagcagcaacgcaagtccaaggagatcgacaaatgcctgtctcgggaaaagacctatgtgaagcggctggtgaagatcctgctgctgggcgcgggcgagagcggcaagtccacctacagcaacgtgatcaaaggtatgagggtgctggttgatgctcgagagaagcttcatattccctggggagacaactcaaaccaacaacatggagataagatgatgtcgtttgatacccgggcccccatggcagcccaaggaatggtggaaacaagggttttcttacaatatcttcctgctataagagcattatgggcagacagcggcatacagaatgcctatgaccggcgtcgagaatttcaactgggtgaatctgtaaaatatttcctggataacttggataaacttggagaaccagattatattccatcacaacaagatattctgcttgccagaagacccaccaaaggcatccatgaatacgactttgaaataaaaaatgttcctttcaaaatggttgatgtaggtggtcagagatcagaaaggaaacgttggtttgaatgtttcgacagtgtgacatcaatacttttccttgtttcctcaagtgaatttgaccaggtgcttatggaagatcgactgaccaatcgccttacagagtctctgaacatttttgaaacaatcgtcaataaccgggttttcagcaatgtctccataattctgttcttaaacaagacagacttgcttgaggagaaggtgcaaattgtgagcatcaaagactatttcctagaatttgaaggggatccccactgcttaagagacgtccaaaaattcctggtggaatgtttccggaacaaacgccgggaccagcaacagaagcccttataccaccacttcaccactgctatcaacacggagaacatccgccttgttttccgtgacgtgaaggatactattctgcatgacaacctcaagcagcttatgctacagtgatgtacaaaagacttgctgttttaatatctttttgtgtttttgatgttttctgtttgttttgttttttaaaatagcagtttacaaccagaattagaacaatcttaattctacgtttaacttcttgaaaatcttagtactttttctgcgg

SEQ ID NO: 12987 - DNA, 6311 bp, Homo sapiens
  source 1..6311: mol_type = unassigned DNA
ctccttccctccctccctcccccgctgtcctggcccgccctgcccggcccgccctgcgagtcagttcgctggttccctccctccctgggcgcgctcgggccgccgccgcgctccccgccctcgagcctcggtgccggagccgcccgccgccggaggaggaggtggagggagccggaggggcccgccgaggcggcggcggcggcggcaagatggcggacttcctgccgtcgcggtccgtgctgtccgtgtgcttccccggctgcctgctgacgagtggcgaggccgagcagcaacgcaagtccaaggagatcgacaaatgcctgtctcgggaaaagacctatgtgaagcggctggtgaagatcctgctgctgggcgcgggcgagagcggcaagtccaccttcctgaagcagatgcggatcatccacgggcaggacttcgaccagcgcgcgcgcgaggagttccgccccaccatctacagcaacgtgatcaaaggtatgagggtgctggttgatgctcgagagaagcttcatattccctggggagacaactcaaaccaacaacatggagataagatgatgtcgtttgatacccgggcccccatggcagcccaaggaatggtggaaacaagggttttcttacaatatcttcctgctataagagcattatgggcagacagcggcatacagaatgcctatgaccggcgtcgagaatttcaactgggtgaatctgtaaaatatttcctggataacttggataaacttggagaaccagattatattccatcacaacaagatattctgcttgccagaagacccaccaaaggcatccatgaatacgactttgaaataaaaaatgttcctttcaaaatggttgatgtaggtggtcagagatcagaaaggaaacgttggtttgaatgtttcgacagtgtgacatcaatacttttccttgtttcctcaagtgaatttgaccaggtgcttatggaagatcgactgaccaatcgccttacagagtctctgaacatttttgaaacaatcgtcaataaccgggttttcagcaatgtctccataattctgttcttaaacaagacagacttgcttgaggagaaggtgcaaattgtgagcatcaaagactatttcctagaatttgaaggggatccccactgcttaagagacgtccaaaaattcctggtggaatgtttccggaacaaacgccgggaccagcaacagaagcccttataccaccacttcaccactgctatcaacacggagaacatccgccttgttttccgtgacgtgaaggatactattctgcatgacaacctcaagcagcttatgctacagtgatgtacaaaagacttgctgttttaatatctttttgtgtttttgatgttttctgtttgttttgttttttaaaatagcagtttacaaccagaattagaacaatcttaattctacgtttaacttcttgaaaatcttagtactttttctgcggcctttggtttgtggctgaaagctgttgagtgactcatcgccaagatttgctgtaatgcaggctttgatctgtttcaccatggcttctattcaagtccagttaaaacctcccagctgacctcagactaggcatatttcaggctttaaattattctactttccaaactgaattctcctgcagtgccaagtatcaaaggtgtccttaaatacttgtagggatgaggttaggaatattcagttccaaaacaagatatcttctgtccgccttacatatagcagtgacacttgttgcctaactttatggtgacctcctattttgtaagggctgttagaagttctatctaagaaatggcattctgtaggtttatagaaggtttagccttcatattttaattgcttgtatacacaacagctgttttgcttttagatttctgtgtttctgaaggtaatgttcttcctgttttcaagtttacataaggatctttggtctgatgctgatgaagagttcacaggtggtatgggagagcaaaaggcaagctaatgctgtttaccgtgttttggtcaaacgtaacgagtgaaatagaatttgcctttctcatatttaattatcatgtagtttaatgtaccatatgtgaaacattctggccatagcagcaactaaaaactgcaagcaacttggtaacagaactttctaaataaacttaacctgttccagaatgtcatgtatttgacttttaagccctatctcagttggtcagtaaagaccaatccttactgtaggaaatcattgttgtatcatcacaaacatctatcttttgctgtcctgtccagtcccatcaactccacactgtgccatttgtggcatcgttttgtttatttggagtttgctaagggcagtatttttctgtcaagactattcaagaaggcattatttgagattcctgttcattcttggtgtgtctctaacagatacagtatgtatacatttgtataattgttgttgttgaaagtccagcttttttgaggtatattttaaatgttttaaggatgcttctaaggatcagtagtaatttttttagttcgcacctaaagatgattacattgacctcccccgactgcttaccaaattaaaatgtgtccacgaagtagctttgtgatcgcagatacattcatagtgaactcatcagaatggctggtttgcagtactgaaatactatcttctaggctgtatgtagtgctacaattagagaaacagaagtccaaggctggcgacagcttgaaaagtctgacagcttttctacttttcctgaaaattttaagactgtgatatctgtcattttactgtatagctgactgtgtactcaggtattttattggtccttgaaagattggtcgttatggatcacccagcctttccaagtcagtggctgttgttctgtcttgctgtctgatacgagagtggggcttttcagtgaactaaccagggattgttcttgacatacctgacttttctcacatttgaacttccactatcattgtatccatataacttctagcattttcatgccatggtaatccatgagctacacatacgtagcccggcaccgtgatgcaagttcatggtatcgtgcatgttcgtggtatcatggtatcattcatgcgtgtttgaatagttctacatctagtgcttcttgccaaaaagaatacattgtttaaattcacaaaattagcataattgcagtgctaatgaatatcggaatatgtgcacagtaacatttggactattcattggagagtttacccatacatttagcaaattgaatggccaaaacatttgactccagtgagggctcaagttagatccctatagaaagaggacacttcatcttacttaagtcatagttaagatctgtgatacgaaccatagatattgcctgacaaagcagaaatcaccaagtttcccccttttgaattaccaccaagaagtgttgaaacaccaaatagatatcatgttattttgggcatttgcagttttcttccctgctgcatgtaatgtctcagaatcaacattcttttaaaatctagactatattttgaggcaatgaattacttatattcaacttaggcttgttttgacattcagtagaactttaagttcaatctaaaggcttcagtccacatttttttatacgttgtattttaaaaacgtttgaaaggagtcttacacctgtatcatgaaaactgaatccttttgaaataccactatatgaagagagagatgaaatttagtgaacagaattgaaaaggtgctcataatttcactatgcaaacttaccccagtctctaaaaaagtaatttagatttaaagttctttgatgtatttgattttctaaatctttatggttatgatttggaataaaatgtgcctaatcctgtgttacattctgttcttaaatctgaatgccttctcatttaattctgaggaaatatcacacaagtgtcttcattgaccttgaagaaatgtatatacagttgccttataaaacaacataaatttagaccataacttttatagagaaagggttttgtcaaatgttttctgaaaatctgagtaattcaaagcatgcctctgcccctttaatatttttaataacctgcattgttgctgtctgccaaatattaaattgaaatcttcatttcaattttattatctggaaagggcactggattgctctgcaaccaaagaaagcaatatggaatgaaaaaactcattcacttttgtcttattttcttttaaggtgtattggcatgtaatttgcatagagaaggtcctctggttagtctctcaaattgaggctgtttagggaaatccttattcagttggtggcagtggttggtttaaagtagaaggaaataagatcgccttaataccagaaatgattagaagtgctgatttagattcaacaaataccatatgtccttatcattttttgtaagaagaaattggttaagtcctaactttcaatgtgtacccaaatacttgtatttatgcttttgataaaatgtattttcagcattaatacacatccgattatgccttatttatatatgaagaataaagttaccatgttacactgttatgtcctaaaattcaaatcactatttgagaaaccctcaaattggtgctttcattatataatgatacatttagacaaaaccccaaactaagccatttgaaacaagattctctccattgcagtttgtagcaatgttatttctgtgtatgtcatgagaaggctaaatatcagtgttaatttcttgtttgaatccgtgaaatcatgcctgtaaagcccaaacatttgtaacaaactccctaataaatttagagaaagtcactctgttaccatttcatttattttagttttatttgagaaattaagaccagaagttttgctcatgtctttttcacttggaaatctgacttagtacctagttaatttgtctctctcccatcattttaaggcgttcgcttctgttaatcacagatgatctgtccttgtgttgtgctgcttgactaaaagcactgttttgttttgttttgttttgttttttaatgataggatacagggtggcttttcagtctagtaaacatgaggaggggagagattgtgggtgggtgtgggtgtgtccgcatgtcccaaatacagcacatgcccatttttttatggtacgaggttagggcttattaataaatgtatactagatcttgaagtgtaagtctaagtctgaacattttaaacaagttggactttatggctttttcaagttccatcaagtagatactagtcttaggctggtaggtgattaacaacatcatttggagtacagtgtttgtaccactagcattcttatgtctgtacttgaacgtgtagttagcatttaagttatgttcactcttgtagcattcaggtcttaccatctggtttcaaatgcgagagcttatatgaacattgttttgaaagcatgaatgatatggcaatattttatgtcttgataaggagagttttgtgacatatacaaatctgctgttgatgatgaaagtttacaggtggatcagagtatgctggaactcagtgtgcataaaatttcagtcagtgaatatcactgaacgtcatatactacttggtatgtgactttggtttgtgttaagaaagcttgtatataatattttttgccatagtaagtgagaaattgtccttaatcatgcctgtttgatggtactaggaaagaaaggggtagagattaattcttgcacagtataagcaacagtgcaacaaactatgccatttaccttttacctcttacttgaaggcagaatcgcaaaacgtttgaaatggcttttctaaactactctactctggtgagagctcatttaccacaagaagccttataaaaaagtatattttgtaataaccccgtagatactgtacctaacaaaacatgactcgtattagctctataaaatatttgtggcttaggattttttttttacatatatctttttataactttccaggaactaagcacattatctgataattgttgtaaatttttttgtcagtgctttagttcaggatgggcaataaattatttctaaaggaggtctaaaagtggaaagaatggtttgattttataaaatgagttgctagttcattacagctttttacttttgtacatattttgcaaaacatttgcctcttgctattaatatttgctttgtaaaaattactgacatttaataaacatttgtaaacaattcaa

SEQ ID NO: 12988 - DNA, 1502 bp, Homo sapiens
  source 1..1502: mol_type = unassigned DNA
aataagggaactttttgcccgagacttcttgtcaagggcgtagggtgacagcctccttttgggcgagaatatgaaacttgaggagtgtcaggttgactgtactggaatcaggagagagtggacccatacagttagcatgaaaatgtagcatctgtgctttttcgccccagtgtcacggtcaggtatgagggtgctggttgatgctcgagagaagcttcatattccctggggagacaactcaaaccaacaacatggagataagatgatgtcgtttgatacccgggcccccatggcagcccaaggaatggtggaaacaagggttttcttacaatatcttcctgctataagagcattatgggcagacagcggcatacagaatgcctatgaccggcgtcgagaatttcaactgggtgaatctgtaaaatatttcctggataacttggataaacttggagaaccagattatattccatcacaacaagatattctgcttgccagaagacccaccaaaggcatccatgaatacgactttgaaataaaaaatgttcctttcaaaatggttgatgtaggtggtcagagatcagaaaggaaacgttggtttgaatgtttcgacagtgtgacatcaatacttttccttgtttcctcaagtgaatttgaccaggtgcttatggaagatcgactgaccaatcgccttacagagtctctgaacatttttgaaacaatcgtcaataaccgggttttcagcaatgtctccataattctgttcttaaacaagacagacttgcttgaggagaaggtgcaaattgtgagcatcaaagactatttcctagaatttgaaggggatccccactgcttaagagacgtccaaaaattcctggtggaatgtttccggaacaaacgccgggaccagcaacagaagcccttataccaccacttcaccactgctatcaacacggagaacatccgccttgttttccgtgacgtgaaggatactattctgcatgacaacctcaagcagcttatgctacagtgatgtacaaaagacttgctgttttaatatctttttgtgtttttgatgttttctgtttgttttgttttttaaaatagcagtttacaaccagaattagaacaatcttaattctacgtttaacttcttgaaaatcttagtactttttctgcggcctttggtttgtggctgaaagctgttgagtgactcatcgccaagatttgctgtaatgcaggctttgatctgtttcaccatggcttctattcaagtccagttaaaacctcccagctgacctcagactaggcatatttcaggctttaaattattctactttccaaactgaattctcctgcagtgccaagtatcaaaggtgtccttaaatacttgtagggatgaggttaggaatattcagttccaaaacaagatatcttctgtccgccttacatatagcagtgacacttgttgcctaactttatggtgacctcctattttgtaa

SEQ ID NO: 12989 - DNA, 2482 bp, Homo sapiens
  source 1..2482: mol_type = unassigned DNA
ctgcggtcactgctgaggttttcagaactttccaggcaaaggccagccaggtcctttgcctccaacccactccgcgcctacctcccgcctggggacacccctaggcccaggagatcctactctcccccgagcaccgacgttccaactcgtctgcgcccccgactgctgtccggctcctgtgccaaggggcgcgcgcatcttcccggggccagcaacgctcccaacttctcgactcgccctcctcctccccagagcgagagtggggcgggctgagcccggatccggggtgcactcgagcgttcccagcgctcggcattcaccccgcctcagagccgactttcgaagggggattgagcctcggaggtccaggcgtcttactccaaagctcaagtcggcccccgtcttttctttccacacccctgtgcccgtcgcatgctggccgggtgagcggccgggccgaggattcgggtgcccggggccgcgtcgccccgtcgggtactgagctgagcgcaccatggccggctgctgctgcctgtccgcggaggagaaggagtcgcagcgcatcagcgcggagatcgagcgacagcttcgtcgggacaagaaggacgcgcgccgtgagcttaagctgctgctgctgggaactggtgaaagtgggaaaagcacctttatcaagcagatgagaattatccatgggtctggttacagcgacgaagacagaaaggggttcacgaagctggtttaccaaaacatattcaccgccatgcaagccatgatcagagcgatggacacgctaaggatacagtatgtgtgtgaacagaataaggaaaatgcccagataatcagagaagtggaagtggacaaggtctccatgctctccagggagcaggtggaggccatcaagcagctctggcaagatccaggcatccaggagtgttacgacaggaggagggagtaccagctgtcggactctgccaaatattacctgactgacattgaccgcatcgccacaccatcattcgtgcctacccaacaagatgtgcttcgcgtccgagtgcccaccaccggcatcattgagtatccatttgacttggaaaacatcatctttcggatggtggatgttggtggccaacgatcggaaagacggaagtggattcactgctttgagagtgtcacctccattattttcttggttgctctgagtgaatatgaccaggtcctggctgagtgtgacaacgagaatcgcatggaagagagcaaagccttatttaaaaccatcatcacctacccctggtttctgaattcgtctgtgattttattcttgaacaagaaggatcttttggaagagaaaatcatgtactctcatctaattagctatttcccagaatacacaggaccgaaacaggatgtcagagctgccagagactttatcctgaagctttaccaagatcagaatcctgacaaagagaaagtcatctactctcacttcacatgtgctacagatacagacaatattcgctttgtgtttgctgctgtcaaagacacaattctacagctaaacctaagggaattcaaccttgtctaaaagctgctgcccactcctcccctataacagaagatgtgatttgcaaactccttgttttatttgcaagtgcttctgacatcaccagagccagccccatgccaggaactaaggatgtcatgtagatcgtggggacagagatgggtgatggaacttggaagatatttgagtttaccaacatactttaaaagtccttacatcccaaattgtgtttataattattttcttgacttttggctataagattttgtgtaatttttgaatttggtgttttctagaatttttaaaagccactttgatttagttttaaatatgtttaaaaatagcgattaaaattatgtaagcaaggagcctgttagtttatagatcatgccttcaaacctctagagttaatttgggtgacttttttaaaaataagaatgttaatgggtttgaagctttttattaaaccttgtaatttagagacatttttaattgtgtttctcacctcatgctgaagggtgactcctttaacatgccaccaaagattttttttaaacacttggttctttttgtgtgttaactttctaagccaaattaatggatatataagtatatctaatttagctttgccacagtttgatcaccaagaagccaaagctgacatagagtaaatgggctctagatagcatatatgttttattggtgaaaaatgtgtgtgtgtgcacgtgtgtgtgtgtgtacatttttacccccaatgtatatgaccagatcttaaaaatgtatgaaatggctagaagtccacattgtttgacaaatgttacgtaaccctgccaaagttctgatggccaccacagatttgctgtttgaattatgtatgctgtgcctttctgaggaggctaagaatataccattctgctatta

SEQ ID NO: 12990 - DNA, 2132 bp, Homo sapiens
  source 1..2132: mol_type = unassigned DNA
ggggagccctggcctccccacctcctcccgtccccaccctgttcccagcactcaagccttgccaccgccgagccgggcttcctgggtgtttcaggcaaggaagtctaggtccctggggggtgacccccaaggaaaaggcagcctccctgcgcacccggttgcccggagccctctccagggccggctgggctgggggttgccctggccagcaggggcccgggggcgatgccacccggtgccgactgaggccaccgcaccatggcccgctcgctgacctggcgctgctgcccctggtgcctgacggaggatgagaaggccgccgcccgggtggaccaggagatcaacaggatcctcttggagcagaagaagcaggaccgcggggagctgaagctgctgcttttgggcccaggcgagagcgggaagagcaccttcatcaagcagatgcggatcatccacggcgccggctactcggaggaggagcgcaagggcttccggcccctggtctaccagaacatcttcgtgtccatgcgggccatgatcgaggccatggagcggctgcagattccattcagcaggcccgagagcaagcaccacgctagcctggtcatgagccaggacccctataaagtgaccacgtttgagaagcgctacgctgcggccatgcagtggctgtggagggatgccggcatccgggcctactatgagcgtcggcgggaattccacctgctcgattcagccgtgtactacctgtcccacctggagcgcatcaccgaggagggctacgtccccacagctcaggacgtgctccgcagccgcatgcccaccactggcatcaacgagtactgcttctccgtgcagaaaaccaacctgcggatcgtggacgtcgggggccagaagtcagagcgtaagaaatggatccattgtttcgagaacgtgatcgccctcatctacctggcctcactgagtgaatacgaccagtgcctggaggagaacaaccaggagaaccgcatgaaggagagcctcgcattgtttgggactatcctggaactaccctggttcaaaagcacatccgtcatcctctttctcaacaaaaccgacatcctggaggagaaaatccccacctcccacctggctacctatttccccagtttccagggccctaagcaggatgctgaggcagccaagaggttcatcctggacatgtacacgaggatgtacaccgggtgcgtggacggccccgagggcagcaagaagggcgcacgatcccgacgcctcttcagccactacacatgtgccacagacacacagaacatccgcaaggtcttcaaggacgtgcgggactcggtgctcgcccgctacctggacgagatcaacctgctgtgacccaggccccacctggggcaggcggcaccggcgggcgggtgggaggtgggagtggctgcagggacccctagtgtccctggtctatctctccagcctcggcccacacgcaagggagtcgggggacggacggcccgctgctggccgctctcttctctgcctctcaccaggacagccgccccccagggtactcctgcccttgcttgactcagtttccctcctttgaaagggaaggagcaaaacggccatttgggatgccagggtggatgaaaaggtgaagaaatcaggggattgaggacttgggtgggtgggcatctctcaggagccccatctccgggcgtgtcacctcctgggcagggttctgggaccctctgtgggtgacgcacaccctgggatggggctagtagagccttcaggcgccttcgggcgtggactctggcgcactctagtggacaggagaaggaacgccttccaggaacctgtggactaggggtgcagggacttccctttgcaaggggtaacagaccgctggaaaacactgtcactttcagagctcggtggctcacagcgtgtcctgccccggtttgcggacgagagaaatcgcggcccacaagcatccccccatcccttgcaggctgggggctgggcatgctgcatcttaaccttttgtatttattccctcaccttctgcagggctccgtgcgggctgaaattaaagatttcttagaggctgcgtcgccagcgtcctgttt

SEQ ID NO: 12991 - DNA, 3279 bp, Homo sapiens
  source 1..3279: mol_type = unassigned DNA
actcgcgcgctgcgctggcctcctccccgccccgggcccaggcgcgcgcgcgcttgttcgctctcccattttttttttcccctccctccctgcctctctctctctccctctccctcgagctcccggctggctgcggctccctggcgctctccctctctctccggtaggctcaccgagcgatgcgagctctgggagacagcgacgccgcctcccgctagagacctgcccctcggcccggccccctgcccaaccctgcccagcgcgcgggggtcggcgaaggcgccgcggacgcaccgacggctgaagagcggcgatgcacatgcactagcagcaccccctaactcactccctccacatcccgcgccgccgccgccgcctcctccacctcctcctccgccgccgccgcctcctcctcctccggcagccgcggcagcaggacccaccctgccccccaccccaccctctgtcggctccggctgcggctccagcctcgactattattttatttattttgggtcgtgcacaagcctcagtgcctgcagtccgcgcctcctcggcccgcgggcgcctcctcccttggctccggagccccagaccccggccaccctcgattcgacaaccccagacccctgccagctgccgcgagtctccgctgctggaatcttgttagcggctgtctttttggagggttctggtttcccgacatttttgtttccagcccaggagaggatatcgtgattttccccccttgagcccaggctctgctctctgggggggtggggggcgctccaagccggggagccgtgccagccgagtcgtgcgggctgtggcagggaaggggccaccatgggatgtactctgagcgcagaggagagagccgccctcgagcggagcaaggcgattgagaaaaacctcaaagaggatggcatcagcgccgccaaagacgtgaaattactcctgctcggggctggagaatcaggaaaaagcaccattgtgaagcagatgaagatcatccatgaagatggcttctccggagaagacgtgaaacagtacaagcctgttgtctacagcaacactatccagtccctggcagccatcgtccgggccatggacactttgggcatcgaatatggtgataaggagagaaaggctgacgccaagatggtgtgtgatgtggtgagtcggatggaagacaccgagcccttctctgcagagctgctttctgccatgatgcggctctggggcgactcaggaatccaagagtgcttcaaccggtcccgggagtatcagctcaacgactctgccaaatactacctggacagcctggatcggattggggccgccgactaccagcccaccgagcaggacatcctccgaaccagggtcaaaaccactggcatcgtagaaacccacttcacattcaagaacctccacttcaggctgtttgacgtcggaggccagcgatctgaacgcaagaagtggatccattgcttcgaggacgtcacggccatcattttctgtgtcgcgctcagcggctatgaccaggtgctccacgaagacgaaaccacgaaccgcatgcacgagtctctcatgctcttcgactccatctgtaacaacaagttcttcatcgatacctccatcattctcttcctcaacaagaaagatctctttggcgagaagatcaagaagtcacctttgaccatctgctttcctgaatacacaggccccaatacctatgaagacgcagccgcctacatccaagcacaatttgaaagcaaaaaccgctcacccaacaaagaaatatattgtcacatgacttgtgccacagacacgaataacatccaggtggtgttcgacgccgtcaccgacatcatcattgccaacaacctccggggctgcggcttgtactgacctcttgtcctgtatagcaacctatttgactgcttcacggactctttgctgttgacgttgatctcctggtagcatgaccttttggcctttgtaagacacacagcctttctgtatcaagcccctgtctaacctacgaccccagagtgactgacggctgtgtatttctgtagaatgctgtagaatccggttttagttgagtcttcacatttagaatttgaaaggaaaaacagaacatttctcatgtgctttgtagcttaaaaaaaggaaaactcaccatttcatccatatttctttttcttgcaaaacaaacatacccatctgcaccgacgcctgcccccgtcccacctcgcggcgcagcccctggagctcctgctggggggcagggcccatctgccgcctggggctccggtgcggtgcactggtccgaggagtgtgctcaggccgggctttccagaaggccacaggccactgcaaaccctgctgcctgccggccgcccagacaccacagacgccacctggcggccctaagccactcccgccacacgctcactccaggttcgtatagaaaaagcacagctctcactggccagtagctgccaaaaagaacacccatcgtataaggaaatccagccccatagaaaacaatctgcccaccgaccccctttctaaggatagcctttgtaggggttttttggttccttttttttttttttcagtttttgtttttacttttgtcccgccgagtactatgtattaccagccccccaccccacagatcagttttcctagtctttgggaaacgggttgtgttttttttcctttgccgtgttggatttccggtcccggctgacacctcccttcgtgtgtgcgcccctccccacccctgcctttgtttcggtgccctgtgtccgctctctcatgtggggatgtttgtgctgcagacaaaaagaacaaaaaaaaatttttaaataccacaagatggaaaaaaaaaacaaaaaaatttaaaaagatggaatgtagtgtttacattaaagccgccgttttcatgaccaatcctatgtcatttctactttgactaatacccaaaccctaaacctcttcacggtttcacttttaagacttaatctttgctgaagaagaccagtcacagccatttcaaataaagaggaggcaaaaagacaaaacacacaaaaaattaaaaaaaaaaacttaaaaaaaaaaggaaaaaagaaaaaaaagcccacgggtctttgtaagcctttctattcccaatcggtgaggtttctgtgatatcttacacactgccagtctacttctctgactaatggaaaattcctgtgtagctcaataaaagagaatgtttgtctg

SEQ ID NO: 12992 - DNA, 1299 bp, Homo sapiens
  source 1..1299: mol_type = unassigned DNA
atgggatgtactctgagcgcagaggagagagccgccctcgagcggagcaaggcgattgagaaaaacctcaaagaggatggcatcagcgccgccaaagacgtgaaattactcctgctcggggctggagaatcaggaaaaagcaccattgtgaagcagatgaagatcatccatgaagatggcttctccggagaagacgtgaaacagtacaagcctgttgtctacagcaacactatccagtccctggcagccatcgtccgggccatggacactttgggcatcgaatatggtgataaggagagaaaggctgacgccaagatggtgtgtgatgtggtgagtcggatggaagacaccgagcccttctctgcagagctgctttctgccatgatgcggctctggggcgactcaggaatccaagagtgcttcaaccggtcccgggagtatcagctcaacgactctgccaaatactacctggacagcctggatcggattggggccgccgactaccagcccaccgagcaggacatcctccgaaccagggtcaaaaccactggcatcgtagaaacccacttcacattcaagaacctccacttcaggctgtttgacgtcggaggccagcgatctgaacgcaagaagtggatccattgcttcgaggacgtcacggccatcattttctgtgtcgcgctcagcggctatgaccaggtgctccacgaagacgaaaccacgaaccgcatgcacgaatccctgaagctttttgacagcatctgcaacaacaaatggttcacagacacgtccatcatcctgtttcttaacaagaaggacatatttgaagagaagatcaagaagtccccgctcaccatctgctttcctgaatatacaggccccagcgccttcacagaagccgtggcttacatccaggcccagtacgagagcaagaacaagtcagcccacaaagagatctacacccacgtcacctgcgccacggacaccaacaacatccagtttgtctttgatgctgtgacggacgtcatcatcgccaaaaacctgcggggctgtggactctactgagcccagccgccctgcccggcacccttgccctgcctggcctgccgccccccctcccctggaaccaggctccaccactctcagaccactctttgcacttgaggaagaagacctcagaggctggcaccaagggagggaggagggagcatcctccacccgcaccccccaacagaacttgtggtaacgcaggggcggggcggggctgctgagtgcatgctgcaaggccaggagactcca

SEQ ID NO: 12993 - DNA, 3402 bp, Homo sapiens
  source 1..3402: mol_type = unassigned DNA
tcttcgcccgccaggagcagggacgcgtccgagccaacacggggcgcgcgcccagacgcactttcccggctcggggtgcaagagagccaggcggccgcggcgcagcggaggggctgcgggcccggaacccaggccggtcagcgtcaggaaagagaggagccgtcgcaggagccgcacacgtctccaactctctattgctttttgcgcacattcctaacttcctgacgtccatcccagcgggcaggcatggggtgtttgggcggcaacagcaagacgacggaagaccagggcgtcgatgaaaaagaacgacgcgaggccaacaaaaagatcgagaagcagttgcagaaagagcgcctggcttacaaggctacccaccgcctgctgctcctgggggctggtgagtctgggaaaagcactatcgtcaaacagatgaggatcctgcacgtcaatgggtttaatcccgaggaaaagaaacagaaaattctggacatccggaaaaatgttaaagatgctatcgtgacaattgtttcagcaatgagtactataatacctccagttccgctggccaaccctgaaaaccaatttcgatcagactacatcaagagcatagcccctatcactgactttgaatattcccaggaattctttgaccatgtgaaaaaactttgggacgatgaaggcgtgaaggcatgctttgagagatccaacgaataccagctgattgactgtgcacaatacttcctggaaagaatcgacagcgtcagcttggttgactacacacccacagaccaggacctcctcagatgcagagttctgacatctgggatttttgagacacgattccaagtggacaaagtaaacttccacatgtttgatgttggtggccagagggatgagaggagaaaatggatccagtgctttaacgatgtcacagctatcatttacgtcgcagcctgcagtagctacaacatggtgattcgagaagataacaacaccaacaggctgagagagtccctggatctttttgaaagcatctggaacaacaggtggttacggaccatttctatcatcttgttcttgaacaaacaagatatgctggcagaaaaagtcttggcagggaaatcaaaaattgaagactatttcccagaatatgcaaattatactgttcctgaagacgcaacaccagatgcaggagaagatcccaaagttacaagagccaagttctttatccgggacctgtttttgaggatcagcacggccaccggtgacggcaaacattactgctacccgcacttcacctgcgccgtggacacagagaacatccgcagggtgttcaacgactgccgcgacatcatccagcggatgcacctcaagcagtatgagctcttgtgaggatgctgccgccaccctgcgacggagcggcgccccggactgcctgactgccagccccatgccatggtaggaggcagagtctctagttccatctcgctgccgtctgtcccgttctgtgtcgaccaccaagcctctggctacctctgtcccctcaggtttggttgtgtagcttctgttgtcattgaatacggcctcccgcagcatcccacccccaaaccaccgactctcattgccgacactgcagcagaatctctccgggtgggagccccattattcattctccctttattgattcatcgaggagaacttggtagatggggagaaaacacagttggtttttttttccacgttatcaaccgtgactgcaagagcgttcgtgcagtgccctgagccacggccgtctctgattctccctttatgaagctgcaggctgacgagagatggtcccttcccattggccttagcccaagacttggagtcgaccccaagcgacagagtgaccagaaacccttttacagtcacattcagagtcgctgctggcctcaggcatttgaattagagctactttgagcctcttaggcagaaaacctaccacattcactactgcaaaatgtgtcctgtctaaaaatgattctctaaactttccctatacttaggcatagtcttctttcttagattctctttgttgttgtccctattgctggtttattacactgtacagaccacaaaatgtaatattcttttgtataactactaaagaaaaatccttgtagatctttgtgccttcaccatggctatctatacctgtacatgaaatgtgtttgtattgtgctgaagagcttaatgtcaacattacctgctgcttactctgaaaaaaggaatgaatggtagctgtagaatttaggatattttatcaggttggcactttataaaatactccctgatttaaaaaattgtaagttatacacgttaatcatccacattctatcgacaatgtaccaacatcacaagctgttgcaaccacctgctgttacttctctgagctgtaaaaacctgaactcaattcaggggtacaaattgcaatctaatcttttcagggaaccagggatttttttctctctctctagacaatatgtttcctcattagtctgctaatgaaacacttcttcaagttccccaagtgggaacaggtccatcattcccttagtcaaaactttggacacaggctacgtcatacaagtaagcaaacagtaagagaaaaacaaaatgtggccaggcgcggtggctcacgcctgtaatcccagcactttgggaggccgaggcaggcggatcacgaggccaggagatcaagaccatcctggctaacatggcgaaaccctgtctctaccaaaaatacaaaaattagccaggcgtggtggcgggcacctgtaatctcagctactcgagaggctgaggcaggagaatctcttgaacctgggaggtggagattgcagtgagccgaggtcgtgccatcgcactccagcctggacatcaaagtgagactcaggccaaaaaaaaaaaaaaaaaaaaccttgacgtgtcaatgtttgtgtctggcctaggagaatgaggatgacagcttcacttgccttttgaagaagaaacattacaaaaccttaatctgaagtataaagtcaaaagatacggctctttctcacacttgcaagacttacaaatacagcctcaaacattatgacacaccaacaatatctagaaagtaagaactggtgtagcaatgatgcttcatattctagctgtagccacagagttgagggtagtttttgtaggtctaaaataataatctataaagatgtccaaagttaaattttcaacaatacaaatctagagaagtgacagcctacattacttcattattactcttcttttagtctttagtctttaatattttaaagtttactctataaatcagcattttgtaatcctttataaactcatccagatttaaatgct

SEQ ID NO: 12994 - DNA, 6225 bp, Homo sapiens
  source 1..6225: mol_type = unassigned DNA
cggttcggtccgctctgggcgttagcaagtgatctccagccaaggcggccgccaccccttgcacacagcagaaaatgcaaaatgaccctctggggcagtgaggggctgtggccctcggccccggcctgccgcacccccttcccgcagctggcggccggcagcgccgaacagggtccgggtgcagccccctcccgcccctccgctgaggcgccggcctgaactgggcgcgggaaccaggccgccctcggcgcccagcctgccctagtcccgcgcgccgcccccgctgtgccgcgcccacatgggtctgtgctacagtctgcggccgctgcttttcgggggcccaggggacgacccctgcgcggcctcggagccgccggtggaggacgcgcagcccgccccggccccggccctggccccagtccgggcggccgcaagggacacggcccggaccctgctccctcggggcggcgaagggagcccggcatgcgctcggcccaaagcagacaagccgaaggagaagcggcagcgcaccgagcagctgagtgccgaggagcgcgaggcggccaaggagcgcgaggcggtcaaggaggcgaggaaagtgagccggggcatcgaccgcatgctgcgcgaccagaagcgcgacctgcagcagacgcaccggctcctgctgctcggggctggtgagtctgggaaaagcactatcgtcaaacagatgaggatcctgcacgtcaatgggtttaatcccgaggaaaagaaacagaaaattctggacatccggaaaaatgttaaagatgctatcgtgacaattgtttcagcaatgagtactataatacctccagttccgctggccaaccctgaaaaccaatttcgatcagactacatcaagagcatagcccctatcactgactttgaatattcccaggaattctttgaccatgtgaaaaaactttgggacgatgaaggcgtgaaggcatgctttgagagatccaacgaataccagctgattgactgtgcacaatacttcctggaaagaatcgacagcgtcagcttggttgactacacacccacagaccaggacctcctcagatgcagagttctgacatctgggatttttgagacacgattccaagtggacaaagtaaacttccacatgtttgatgttggtggccagagggatgagaggagaaaatggatccagtgctttaacgatgtcacagctatcatttacgtcgcagcctgcagtagctacaacatggtgattcgagaagataacaacaccaacaggctgagagagtccctggatctttttgaaagcatctggaacaacaggtggttacggaccatttctatcatcttgttcttgaacaaacaagatatgctggcagaaaaagtcttggcagggaaatcaaaaattgaagactatttcccagaatatgcaaattatactgttcctgaagacgcaacaccagatgcaggagaagatcccaaagttacaagagccaagttctttatccgggacctgtttttgaggatcagcacggccaccggtgacggcaaacattactgctacccgcacttcacctgcgccgtggacacagagaacatccgcagggtgttcaacgactgccgcgacatcatccagcggatgcacctcaagcagtatgagctcttgtgaggatgctgccgccaccctgcgacggagcggcgccccggactgcctgactgccagccccatgccatggtaggaggcagagtctctagttccatctcgctgccgtctgtcccgttctgtgtcgaccaccaagcctctggctacctctgtcccctcaggtttggttgtgtagcttctgttgtcattgaatacggcctcccgcagcatcccacccccaaaccaccgactctcattgccgacactgcagcagaatctctccgggtgggagccccattattcattctccctttattgattcatcgaggagaacttggtagatggggagaaaacacagttggtttttttttccacgttatcaaccgtgactgcaagagcgttcgtgcagtgccctgagccacggccgtctctgattctccctttatgaagctgcaggctgacgagagatggtcccttcccattggccttagcccaagacttggagtcgaccccaagcgacagagtgaccagaaacccttttacagtcacattcagagtcgctgctggcctcaggcatttgaattagagctactttgagcctcttaggcagaaaacctaccacattcactactgcaaaatgtgtcctgtctaaaaatgattctctaaactttccctatacttaggcatagtcttctttcttagattctctttgttgttgtccctattgctggtttattacactgtacagaccacaaaatgtaatattcttttgtataactactaaagaaaaatccttgtagatctttgtgccttcaccatggctatctatacctgtacatgaaatgtgtttgtattgtgctgaagagcttaatgtcaacattacctgctgcttactctgaaaaaaggaatgaatggtagctgtagaatttaggatattttatcaggttggcactttataaaatactccctgatttaaaaaattgtaagttatacacgttaatcatccacattctatcgacaatgtaccaacatcacaagctgttgcaaccacctgctgttacttctctgagctgtaaaaacctgaactcaattcaggggtacaaattgcaatctaatcttttcagggaaccagggatttttttctctctctctagacaatatgtttcctcattagtctgctaatgaaacacttcttcaagttccccaagtgggaacaggtccatcattcccttagtcaaaactttggacacaggctacgtcatacaagtaagcaaacagtaagagaaaaacaaaatgtggccaggcgcggtggctcacgcctgtaatcccagcactttgggaggccgaggcaggcggatcacgaggccaggagatcaagaccatcctggctaacatggcgaaaccctgtctctaccaaaaatacaaaaattagccaggcgtggtggcgggcacctgtaatctcagctactcgagaggctgaggcaggagaatctcttgaacctgggaggtggagattgcagtgagccgaggtcgtgccatcgcactccagcctggacatcaaagtgagactcaggccaaaaaaaaaaaaaaaaaaaaccttgacgtgtcaatgtttgtgtctggcctaggagaatgaggatgacagcttcacttgccttttgaagaagaaacattacaaaaccttaatctgaagtataaagtcaaaagatacggctctttctcacacttgcaagacttacaaatacagcctcaaacattatgacacaccaacaatatctagaaagtaagaactggtgtagcaatgatgcttcatattctagctgtagccacagagttgagggtagtttttgtaggtctaaaataataatctataaagatgtccaaagttaaattttcaacaatacaaatctagagaagtgacagcctacattacttcattattactcttcttttagtctttagtctttaatattttaaagtttactctataaatcagcattttgtaatcctttataaactcatccagatttaaatgctactttttcatgaagaaaggataactttatagacagtcagtgcaacacacacattttatctcatcaccgtcttactgcctccccatccactgtctcataaagccctcagctgaactaagataaataatacaatggaaattattttcagttccccttgcactgtcaaagtaaaacaagaaaactgaaaagctgcacccccagcaagaaagggaagtatgctgttgtatgcatcattactcaacaattaccctctaactaaacatcctgtttaagagtttaattcaaacaacagccagactgttaagaaaaaaaacaaaaagaataacttttatctggcttacaattattaaagcatttattttcaggtaccaaaagccatatcccattccactttttaagtttcttttgatcactgacaggcattaacagatgtagcaacgtggtctcctatagagaaaattacacttatctaaaaatctgattccattaattgatcaagtataaaaatctacgaaaacaatatgttctgcacatcacatctgtacttttttttttttaaatatattttttgagacggagtctcactctgttgcccaggctggagtgcagtggcatgatcttggctcactgcaacctccgcctcccgggctcaagggattctcctgcctcagcctcagctggtattataggcacttgctaccatgcttggctaatttttgtatttctagcggagacgaggtttcaccatgttggccaggctggtcttgaactcctgacctcaagtgatccacccgcctcagcctcccaaagtgctgggattacaggtgtgagccactgtgcccggccacatctgtacttttaagggtacagctttacagtacataggaatttgagaaccacttcacaggaagagggaaacagcccaatatttatttatgtatacacataatcccaagtgtgtgctggggccaccaggcccttcctgggggaacaaggactgtcgtgcatgtgagtgacgacattaatagcatttacatactgtacagatgcaacctttgatgatacatatatttgataaaaatgagaaaacagatttgttgtagagtacctgtccacttttatagcatgagaacagtacaatcaactatttattttgcagttactcatttcagtgattgagaatttctgtgctgtgcagagagacggcctgtaattggtctcatcatccacttgattctaacatgatctctgcccaaagttccatttcttgggctttgatatttataatggcgcctgctcttcatcttgtcttacgctttccgagcaagttcaaaccagaaagaaaaggtgaggctagaagcccaaagtgagtgagtgtgaggaccacaaggaagcccaccactccacagtagatgatcaaaaccacatcctcacgtgggaggtagcacttggagagggtgtagtctgtgggcgtgatgctaccctggaaaggagaagggaaagttatgctgagagcaccaggcacacgttgaacaccgcagtcttagaaacagcagagggaagactgccttctcaggtccccctcaggtgaggcagggaacgggccctcctcacctgagaccaagggggcccagccttctccctgcacagctcacccccgaccagcccaggctccagcaggagagacaagtaaggcccaagtgtgcctgagtggaaaatgtctgggacactgacctgtcaaaactggcccctggctcactgggttcccatcaaatatagtgggggatccataacagagattcagagaggcaccgtggagttccagggtcatcggtcagcgaggaacaaggagggaaaggtgtcttcctgccccttgatgctcaactaagcatctgttccctagaaatacatgtgtccaggtcgtctccatgggcttttctttgcagatacttttatgtggaacaacagtggcaaatgttttcatttactttgaatttgaaaatgttagggtttcctccacctttttatgaagtaaaagaacctgtcgtaccagcatcatgagctggatgcaggagcccatggctgaaaggagttaaaacgcccagtggtcattaagtgaaacatcttttatcaacctgcaaaagctgcagcgttctctgccaggtcaaatgggcatgtttagaaaataagagaagatggctgagtatagctaatgaataaatggttgtttctttagaaaattaaacacacacagagtgtaagaggagaggatacggccctccctgaaggataaagtccacctggacggtgccctgccctcgcttctcacattaactgcccaggaatgtcatgctgattggttcccggaagggtgtttggcaaggggcagtgtatggagctacgtgtagaaggagagaaatttgtgtgtggcttttgtaaattttgaccgattgcagcaattaaatagttgattactgtgttgatttaaatacttatgaaagctttcagacaaaaataaactttcacgttaccatgatgaaa

SEQ ID NO: 12995 - DNA, 2087 bp, Homo sapiens
  source 1..2087: mol_type = unassigned DNA
aaacaattctcgtgtaaaaaggcattttactccgcgcgtcttccttacagccatttagttgggagtttgcggtgggcagggggagggagaagaaacgcctgctctgaatcggaaaacaccgaagagaccagaccatctctttcagcagcaggaaagagaggagccgtcgcaggagccgcacacgtctccaactctctattgctttttgcgcacattcctaacttcctgacgtccatcccagcgggcaggcatggggtgtttgggcggcaacagcaagacgacggaagaccagggcgtcgatgaaaaagaacgacgcgaggccaacaaaaagatcgagaagcagttgcagaaagagcgcctggcttacaaggctacccaccgcctgctgctcctgggggctggtgagtctgggaaaagcactatcgtcaaacagatgaggatcctgcacgtcaatgggtttaatcccgaggaaaagaaacagaaaattctggacatccggaaaaatgttaaagatgctatcgtgacaattgtttcagcaatgagtactataatacctccagttccgctggccaaccctgaaaaccaatttcgatcagactacatcaagagcatagcccctatcactgactttgaatattcccaggaattctttgaccatgtgaaaaaactttgggacgatgaaggcgtgaaggcatgctttgagagatccaacgaataccagctgattgactgtgcacaatacttcctggaaagaatcgacagcgtcagcttggttgactacacacccacagaccaggacctcctcagatgcagagttctgacatctgggatttttgagacacgattccaagtggacaaagtaaacttccacatgtttgatgttggtggccagagggatgagaggagaaaatggatccagtgctttaacgatgtcacagctatcatttacgtcgcagcctgcagtagctacaacatggtgattcgagaagataacaacaccaacaggctgagagagtccctggatctttttgaaagcatctggaacaacaggtggttacggaccatttctatcatcttgttcttgaacaaacaagatatgctggcagaaaaagtcttggcagggaaatcaaaaattgaagactatttcccagaatatgcaaattatactgttcctgaagacgcaacaccagatgcaggagaagatcccaaagttacaagagccaagttctttatccgggacctgtttttgaggatcagcacggccaccggtgacggcaaacattactgctacccgcacttcacctgcgccgtggacacagagaacatccgcagggtgttcaacgactgccgcgacatcatccagcggatgcacctcaagcagtatgagctcttgtgaggatgctgccgccaccctgcgacggagcggcgccccggactgcctgactgccagccccatgccatggtaggaggcagagtctctagttccatctcgctgccgtctgtcccgttctgtgtcgaccaccaagcctctggctacctctgtcccctcaggtttggttgtgtagcttctgttgtcattgaatacggcctcccgcagcatcccacccccaaaccaccgactctcattgccgacactgcagcagaatctctccgggtgggagccccattattcattctccctttattgattcatcgaggagaacttggtagatggggagaaaacacagttggtttttttttccacgttatcaaccgtgactgcaagagcgttcgtgcagtgccctgagccacggccgtctctgattctccctttatgaagctgcaggctgacgagagatggtcccttcccattggccttagcccaagacttggagtcgaccccaagcgacagagtgaccagaaacccttttacagtcacattcagagtcgctgctggcctcaggcatttgaattagagctactttgagcctcttaggcagaaaacctaccacattcactactgcaaaatgtgtcctgtctaaaaatgattctctaaactttccctatacttaggcatagtcttctttcttagattctctttgttgttg

SEQ ID NO: 12996 - DNA, 1285 bp, Homo sapiens
  source 1..1285: mol_type = unassigned DNA
agtctagaagctgagcagaacaaaggcggtgtgactgcaggaaagagaggagccgtcgcaggagccgcacacgtctccaactctctattgctttttgcgcacattcctaacttcctgacgtccatcccagcgggcaggcatggggtgtttgggcggcaacagcaagacgacggaagaccagggcgtcgatgaaaaagaacgacgcgaggccaacaaaaagatcgagaagcagttgcagaaagagcgcctggcttacaaggctacccaccgcctgctgctcctgggggctggtgagtctgggaaaagcactatcgtcaaacagatgaggatcctgcacgtcaatgggtttaatcccgaggaaaagaaacagaaaattctggacatccggaaaaatgttaaagatgctatcgtgacaattgtttcagcaatgagtactataatacctccagttccgctggccaaccctgaaaaccaatttcgatcagactacatcaagagcatagcccctatcactgactttgaatattcccaggaattctttgaccatgtgaaaaaactttgggacgatgaaggcgtgaaggcatgctttgagagatccaacgaataccagctgattgactgtgcacaatacttcctggaaagaatcgacagcgtcagcttggttgactacacacccacagaccaggacctcctcagatgcagagttctgacatctgggatttttgagacacgattccaagtggacaaagtaaacttccacatgtttgatgttggtggccagagggatgagaggagaaaatggatccagtgctttaacgatgtcacagctatcatttacgtcgcagcctgcagtagctacaacatggtgattcgagaagataacaacaccaacaggctgagagagtccctggatctttttgaaagcatctggaacaacaggtggttacggaccatttctatcatcttgttcttgaacaaacaagatatgctggcagaaaaagtcttggcagggaaatcaaaaattgaagactatttcccagaatatgcaaattatactgttcctgaagacgcaacaccagatgcaggagaagatcccaaagttacaagagccaagttctttatccgggacctgtttttgaggatcagcacggccaccggtgacggcaaacattactgctacccgcacttcacctgcgccgtggacacagagaacatccgcagggtgttcaacgactgccgcgacatcatccagcggatgcacctcaagcagtatgagctcttgtga

SEQ ID NO: 12997 - DNA, 1038 bp, Homo sapiens
  source 1..1038: mol_type = unassigned DNA
aaaagagactgaaggggagactggacagactgcaaagggctggaggccacattaaaagtgtggactttaccccatgggaaggaggaagcgcaggagtcatgagaaatgatggttcaggcagagattagagcataaagcagggaggtggggaaagccaagaggaacacgctcttggatgacgagtcaccatgaatcactgatcacctgggacatggttcagctgcacatgctgacgcagtgggtctgccagtgacgccgatatgctgcgagtctgggaaccccttttaaggagcagggaatcttaactctggctgtgcattacaactgcctggtactttgtcaccaccttcctggaaagaatcgacagcgtcagcttggttgactacacacccacagaccaggacctcctcagatgcagagttctgacatctgggatttttgagacacgattccaagtggacaaagtaaacttccacatgtttgatgttggtggccagagggatgagaggagaaaatggatccagtgctttaacgatgtcacagctatcatttacgtcgcagcctgcagtagctacaacatggtgattcgagaagataacaacaccaacaggctgagagagtccctggatctttttgaaagcatctggaacaacaggtggttacggaccatttctatcatcttgttcttgaacaaacaagatatgctggcagaaaaagtcttggcagggaaatcaaaaattgaagactatttcccagaatatgcaaattatactgttcctgaagacgcaacaccagatgcaggagaagatcccaaagttacaagagccaagttctttatccgggacctgtttttgaggatcagcacggccaccggtgacggcaaacattactgctacccgcacttcacctgcgccgtggacacagagaacatccgcagggtgttcaacgactgccgcgacatcatccagcggatgcacctcaagcagtatgagctcttgtgaggatgctgccgccaccctgcgacggagcggcgccccg

SEQ ID NO: 12998 - DNA, 1491 bp, Homo sapiens
  source 1..1491: mol_type = unassigned DNA
aagccagctgtatttacggtagcgagggctggaccggcggcggcatttacggtaacgggggccgggctcgcggaggcccgtcggttcggtccgctctgggcgttagcaagtgatctccagccaaggcggcgaagggagcccggcatgcgctcggcccaaagcagacaagccgaaggagaagcggcagcgcaccgagcagctgagtgccgaggagcgcgaggcggccaaggagcgcgaggcggtcaaggaggcgaggaaagtgagccggggcatcgaccgcatgctgcgcgaccagaagcgcgacctgcagcagacgcaccggctcctgctgctcggggctggtgagtctgggaaaagcactatcgtcaaacagatgaggatcctgcacgtcaatgggtttaatcccgaggaaaagaaacagaaaattctggacatccggaaaaatgttaaagatgctatcgtgacaattgtttcagcaatgagtactataatacctccagttccgctggccaaccctgaaaaccaatttcgatcagactacatcaagagcatagcccctatcactgactttgaatattcccaggaattctttgaccatgtgaaaaaactttgggacgatgaaggcgtgaaggcatgctttgagagatccaacgaataccagctgattgactgtgcacaatacttcctggaaagaatcgacagcgtcagcttggttgactacacacccacagaccaggacctcctcagatgcagagttctgacatctgggatttttgagacacgattccaagtggacaaagtaaacttccacatgtttgatgttggtggccagagggatgagaggagaaaatggatccagtgctttaacgatgtcacagctatcatttacgtcgcagcctgcagtagctacaacatggtgattcgagaagataacaacaccaacaggctgagagagtccctggatctttttgaaagcatctggaacaacaggtggttacggaccatttctatcatcttgttcttgaacaaacaagatatgctggcagaaaaagtcttggcagggaaatcaaaaattgaagactatttcccagaatatgcaaattatactgttcctgaagacgcaacaccagatgcaggagaagatcccaaagttacaagagccaagttctttatccgggacctgtttttgaggatcagcacggccaccggtgacggcaaacattactgctacccgcacttcacctgcgccgtggacacagagaacatccgcagggtgttcaacgactgccgcgacatcatccagcggatgcacctcaagcagtatgagctcttgtgaggatgctgccgccaccctgcgacggagcggcgccccggactgcctgactgccagccccatgccatggtaggaggcagagtctctagttccatctcgctgccgtctgtcccgttctgtgtcgaccaccaagcctctggctacctctgtcccctcag

SEQ ID NO: 12999 - DNA, 3347 bp, Homo sapiens
  source 1..3347: mol_type = unassigned DNA
ggaggggcgggcaggggcggggccgcggcggcgcgcggaggccgagctcggctgggcttggcgaggctgcggcgcggccaccggcgggagtgcagcggccactgtacccagagattcaaaaccccaaacccgggacttgggggcgctgagccgggccgggaagcagagcctggtcgtgaggaacagccgcccgttgctgtctgcccctttgcggacagcgtctccctcgactccgcttaggaagtggtgggggcggcgtggcccccgtcgggaggcgttcgaacgcccgctaggagagagaaaggattcccctgtgcttggagcccgcactcgggcgcggagggagcggcggcaggctctcgctttcggcaccatgggctgcacgctgagcgccgaggacaaggcggcggtggagcggagtaagatgatcgaccgcaacctccgtgaggacggcgagaaggcggcgcgcgaggtcaagctgctgctgctcggtgctggtgaatctggtaaaagtacaattgtgaagcagatgaaaattatccatgaagctggttattcagaagaggagtgtaaacaatacaaagcagtggtctacagtaacaccatccagtcaattattgctatcattagggctatggggaggttgaagatagactttggtgactcagcccgggcggatgatgcacgccaactctttgtgctagctggagctgctgaagaaggctttatgactgcagaacttgctggagttataaagagattgtggaaagatagtggtgtacaagcctgtttcaacagatcccgagagtaccagcttaatgattctgcagcatactatttgaatgacttggacagaatagctcaaccaaattacatcccgactcaacaagatgttctcagaactagagtgaaaactacaggaattgttgaaacccattttactttcaaagatcttcattttaaaatgtttgatgtgggaggtcagagatctgagcggaagaagtggattcattgcttcgaaggagtgacggcgatcatcttctgtgtagcactgagtgactacgacctggttctagctgaagatgaagaaatgaaccgaatgcatgaaagcatgaaattgtttgacagcatatgtaacaacaagtggtttacagatacatccattatactttttctaaacaagaaggatctctttgaagaaaaaatcaaaaagagccctctcactatatgctatccagaatatgcaggatcaaacacatatgaagaggcagctgcatatattcaatgtcagtttgaagacctcaataaaagaaaggacacaaaggaaatatacacccacttcacatgtgccacagatactaagaatgtgcagtttgtttttgatgctgtaacagatgtcatcataaaaaataatctaaaagattgtggtctcttttaagttttgcagttcatggtaaaatgcattttcaaaccaaatgagtacttatatatggatctctgtagactagagtcttgcagcaacacagaatgtaatataaggcaaatgcatctgggacttgaccaaagttgttctgttttgtttttttaactgaaagtaacagaaggacctttcttaaatgtgacagatggtcctgcagtgtgaaactgaaggacagtgttaaagctgggctctagtatattgatgatttctgcataagtgtaaatatgcaaatgtatgtatacatgtatttatgactttagttttcgacattatttttaggttttaagagtggcaacttaggattttagggtgatggctttggaaataacataaatataccttgtactgaatgacagactattactacgtttgccagttttaaacagctttatttatgttcatgtcctgtaaatttttaagtacagtaattaatattaggaaacattacagcccttatctagattatatgtatacttgtattaataaaaatgttatttgtacaaacattgcacagactattttaataacatgatttgttctttaaattttatgtgttttattgaaatgttcttaagatgaatacacctgcctttggatcaactatttaaacattgtatgcattttgatttttcctactttaagaaaataaaataatttaattttacattagattccacgttagatttggtttgaaaaactaaaatttcagatttctgaggatatactgtcttagacttattgtacacacttagtttttattcacttgttttcactctgaattttaatatttggctgatatgaatgcattgcctcaaaggtgatgtcatcttaatttttattcactttaaataactacatttttgtttataactaagtttggagggatcctaagagcatttttgtgggtaaaaaaaaaacctgtggacataatgaattttgagacattgattggtgaggcttttatttcccttgaggagtctcttgtacctagcatacatgatagctccttgttgggaagataacaagaaggatctttgaatactctattgctgatataatgcaagatttaaatttatacatataactaatttcaaatgtaattatcacactatgttaaaattacttttttcccttagataattcaaatttctccacttgcttgagattatatcatttctttttcaattatactattatttctgagaatgaaatggacgattacacttagaaaatgagtaatagtgtttaataagtcagtgattatatgtgtgctcaaataagtgttatgtatcagctagatactgagctttgatagaataattttcttttgattattcatgatgtgtcatctctgaccttgtttcagcaaagtaaacagcactccccaccccaccctcctttttttactcatcttggaaaaggttagtctttcagtacacgttgctggtaagtagtttccaagttacgtgttgtcactgggttgaagtatatttgtgtgtgtgtgtgtgtgtgtgtgtgtgtgtgtaaccataaactatattcatatctgtttcatttggaggattttcttctttgtaatgtaaagaaattcaaagttatcaaagttccttaaatgtgttagtttagattctttatgtgcctttcatgaaagatatgttttcattaattttactggtggacctgtaatatccacattgtgaagctgtgtatgaaattcaactataatatgaataaatttgaatcatgagaattatgggttaaaaagccacaaagaagcacatattggtgaccatcattaatgaaatcctgaactttattctgtgtaattgtgttaataaatcctaataaatttaaatttttaaaattt

SEQ ID NO: 13000 - DNA, 539 bp, Homo sapiens
  source 1..539: mol_type = unassigned DNA
gttacagctggaaggatggggagatagcaccatagatccactcctcattttatgggcaaagaagctaaggcctgtaaaaatggcatgcccaatggttacgaggaaatccttcaaaatgcgttcttgtgaaaaacgtgagagtgcaaggaaagagggagggataggaagaaggaaagagaagcaaaagttccctgtttctcacggccctgaaaccagccgacagggatttgcattttgaaaaaccttgcgtggctgccggcgctgggcatgctcaaacgcccagaactggcttttttcggcaactttggcagctctcccacccccacccgaaggggcaggaagtggtgggggcggcgtggcccccgtcgggaggcgttcgaacgcccgctaggagagagaaaggattcccctgtgcttggagcccgcactcgggcgcggagggagcggcggcaggctctcgctttcggcaccatgggctgcacgctgagcgccgaggacaaggcggcggtggagcggagtaagatgatcgaccgcaacct

SEQ ID NO: 13001 - DNA, 1633 bp, Homo sapiens
  source 1..1633: mol_type = unassigned DNA
gaaatcagtgcaccttttgtggggcctctgagatggggctgaagcgtctttcctgttaacttcctatggcgactccttaagtggtcaaggagcgctgattacattccccctgcgctgagaaaaggctgcgctggatgcttgatttttcttgctgtgggggcatggaagccacccaagtggggttgggaagctttgctttagtagtaggcaaggcagatactcgagtggtgaaaactgctgtgaaagagcgagagggtcacgccagacaacagggttctgtctccgctgccaccgtttctgatgaatgagatttgccaggtgctggtgaatctggtaaaagtacaattgtgaagcagatgaaaattatccatgaagctggttattcagaagaggagtgtaaacaatacaaagcagtggtctacagtaacaccatccagtcaattattgctatcattagggctatggggaggttgaagatagactttggtgactcagcccgggcggatgatgcacgccaactctttgtgctagctggagctgctgaagaaggctttatgactgcagaacttgctggagttataaagagattgtggaaagatagtggtgtacaagcctgtttcaacagatcccgagagtaccagcttaatgattctgcagcatactatttgaatgacttggacagaatagctcaaccaaattacatcccgactcaacaagatgttctcagaactagagtgaaaactacaggaattgttgaaacccattttactttcaaagatcttcattttaaaatgtttgatgtgggaggtcagagatctgagcggaagaagtggattcattgcttcgaaggagtgacggcgatcatcttctgtgtagcactgagtgactacgacctggttctagctgaagatgaagaaatgaaccgaatgcatgaaagcatgaaattgtttgacagcatatgtaacaacaagtggtttacagatacatccattatactttttctaaacaagaaggatctctttgaagaaaaaatcaaaaagagccctctcactatatgctatccagaatatgcaggatcaaacacatatgaagaggcagctgcatatattcaatgtcagtttgaagacctcaataaaagaaaggacacaaaggaaatatacacccacttcacatgtgccacagatactaagaatgtgcagtttgtttttgatgctgtaacagatgtcatcataaaaaataatctaaaagattgtggtctcttttaagttttgcagttcatggtaaaatgcattttcaaaccaaatgagtacttatatatggatctctgtagactagagtcttgcagcaacacagaatgtaatataaggcaaatgcatctgggacttgaccaaagttgttctgttttgtttttttaactgaaagtaacagaaggacctttcttaaatgtgacagatggtcctgcagtgtgaaactgaaggacagtgttaaagctgggctctagtatattgatgatttctgcataagtgtaaatatgcaaatgtatgtatacatgtatttatgactttagttttcgacattatttttaggttttaagagtggcaacttaggattttagggtgatggctttggaaat

SEQ ID NO: 13002 - DNA, 2016 bp, Homo sapiens
  source 1..2016: mol_type = unassigned DNA
atggagtatgcagggcatcttcctgccagctctgcccagggcaccatattggcatgcaccagctgcacaggtgctggggagtcagggaagagcaccatcgtcaagcagatgaagatcatccacgaggatggctactccgaggaggaatgccggcagtaccgggcggttgtctacagcaacaccatccagtccatcatggccattgtcaaagccatgggcaacctgcagatcgactttgccgacccctccagagcggacgacgccaggcagctatttgcactgtcctgcaccgccgaggagcaaggcgtgctccctgatgacctgtccggcgtcatccggaggctctgggctgaccatggtgtgcaggcctgctttggccgctcaagggaataccagctcaacgactcagctgcctactacctgaacgacctggagcgtattgcacagagtgactacatccccacacagcaagatgtgctacggacccgcgtaaagaccacggggatcgtggagacacacttcaccttcaaggacctacacttcaagatgtttgatgtgggtggtcagcggtctgagcggaagaagtggatccactgctttgagggcgtcacagccatcatcttctgcgtagccttgagcgcctatgacttggtgctagctgaggacgaggagatgaaccgcatgcatgagagcatgaagctattcgatagcatctgcaacaacaagtggttcacagacacgtccatcatcctcttcctcaacaagaaggacctgtttgaggagaagatcacacacagtcccctgaccatctgcttccctgagtacacaggggccaacaaatatgatgaggcagccagctacatccagagtaagtttgaggacctgaataagcgcaaagacaccaaggagatctacacgcacttcacgtgcgccaccgacaccaagaacgtgcagttcgtgtttgacgccgtcaccgatgtcatcatcaagaacaacctgaaggactgcggcctcttctgaggggcagcggggcctggcgggatgggccaccgccgactttgtaccccccaacccctgaggaagatgggggcaagaagatcacgctccccgcctgttcccccgccgcttttctcctctttcctctctttgttctcagctccccctgtcccctcagctccagacgtaggggaggggttgccacaggcctccctgtttgaagcctgcccttgtctgagatgctggtaatggccatggtacccccttctgggcatctgttctggtttttaaccattgtcttgttctgtgatgaggggaggggggcacatgctgagtctcccaaggctgcgtctggaggggcccctgcttctccagcctggacccccagctttgcccaacaccagcccctgccccagcccaagtccaaatgtttacagggagcctcctgcccagtcccccaaccccagccgctcggaggccccaaaggaaaaagcacaagaagcgtgagacgccaccattcctggaaaccacagtccacctgctcattctcgtagctttttaaaaaaatgaaagtaaaggaaaaaaaaaaaactgcaaatctagaaaactttttagagaaaaactatttaaaactgtcagatcctgaccagcaagcccccccccagccccccttccaagtgactccgtgccttgagtgtgtctgcgtgtttacacccgtccctctgctggccgcccccgtgcgagcggcacccctgccctgccctccacagaattgggttccaagggctgttccagacaactgccaacgtcactgagggccctgccccagcggccctggccccaggctctattaacctaaaatgtagctccctagcgctaacctaggaaccgccgctgcctgctggggggccacgcccctcatgcccttgtcccaggcccggggccttcagcgttgaacacttccttgcttttttcacatgttttatggaattgttcacctggtttgaaataataaaatgt

SEQ ID NO: 13003 - DNA, 2464 bp, Homo sapiens
  source 1..2464: mol_type = unassigned DNA
agtgccgggtcccggggtttggaaccacccctattgccttttctccgcgtggccccgcctgcagcccaggcccgagcctgggctgcgcctaacttcccccttcgctccgccctcgagccaatcaacagcctctaatctcctctggccccgcctgcaagcccgccccggcccagtcacaggcttggttcgcccaggccccacccccggcccgccccgccgtcggtgcgcggcggtagggaaggcgcctcccgcagtcgctcggaactgccgacccgagtgcttcccgcagagggctggtggtgggagcggagtgggtcgggcggggccgagccgggccgtgggccgtgtgggggccgggcggcggccgggccggcggacggcgggatgggctgcaccgtgagcgccgaggacaaggcggcggccgagcgctctaagatgatcgacaagaacctgcgggaggacggagagaaggcggcgcgggaggtgaagttgctgctgttgggtgctggggagtcagggaagagcaccatcgtcaagcagatgaagatcatccacgaggatggctactccgaggaggaatgccggcagtaccgggcggttgtctacagcaacaccatccagtccatcatggccattgtcaaagccatgggcaacctgcagatcgactttgccgacccctccagagcggacgacgccaggcagctatttgcactgtcctgcaccgccgaggagcaaggcgtgctccctgatgacctgtccggcgtcatccggaggctctgggctgaccatggtgtgcaggcctgctttggccgctcaagggaataccagctcaacgactcagctgcctactacctgaacgacctggagcgtattgcacagagtgactacatccccacacagcaagatgtgctacggacccgcgtaaagaccacggggatcgtggagacacacttcaccttcaaggacctacacttcaagatgtttgatgtgggtggtcagcggtctgagcggaagaagtggatccactgctttgagggcgtcacagccatcatcttctgcgtagccttgagcgcctatgacttggtgctagctgaggacgaggagatgaaccgcatgcatgagagcatgaagctattcgatagcatctgcaacaacaagtggttcacagacacgtccatcatcctcttcctcaacaagaaggacctgtttgaggagaagatcacacacagtcccctgaccatctgcttccctgagtacacaggggccaacaaatatgatgaggcagccagctacatccagagtaagtttgaggacctgaataagcgcaaagacaccaaggagatctacacgcacttcacgtgcgccaccgacaccaagaacgtgcagttcgtgtttgacgccgtcaccgatgtcatcatcaagaacaacctgaaggactgcggcctcttctgaggggcagcggggcctggcgggatgggccaccgccgactttgtaccccccaacccctgaggaagatgggggcaagaagatcacgctccccgcctgttcccccgccgcttttctcctctttcctctctttgttctcagctccccctgtcccctcagctccagacgtaggggaggggttgccacaggcctccctgtttgaagcctgcccttgtctgagatgctggtaatggccatggtacccccttctgggcatctgttctggtttttaaccattgtcttgttctgtgatgaggggaggggggcacatgctgagtctcccaaggctgcgtctggaggggcccctgcttctccagcctggacccccagctttgcccaacaccagcccctgccccagcccaagtccaaatgtttacagggagcctcctgcccagtcccccaaccccagccgctcggaggccccaaaggaaaaagcacaagaagcgtgagacgccaccattcctggaaaccacagtccacctgctcattctcgtagctttttaaaaaaatgaaagtaaaggaaaaaaaaaaaactgcaaatctagaaaactttttagagaaaaactatttaaaactgtcagatcctgaccagcaagcccccccccagccccccttccaagtgactccgtgccttgagtgtgtctgcgtgtttacacccgtccctctgctggccgcccccgtgcgagcggcacccctgccctgccctccacagaattgggttccaagggctgttccagacaactgccaacgtcactgagggccctgccccagcggccctggccccaggctctattaacctaaaatgtagctccctagcgctaacctaggaaccgccgctgcctgctggggggccacgcccctcatgcccttgtcccaggcccggggccttcagcgttgaacacttccttgcttttttcacatgttttatggaattgttcacctggtttgaaataataaaatgtagaaagaaaaaaaata

SEQ ID NO: 13004 - DNA, 2407 bp, Homo sapiens
  source 1..2407: mol_type = unassigned DNA
acacgttgcccagccgtgtggctgggatggtcggtacccatggccgtgcggtcgagccttgatgctccaggacagtcctggaaggcttcctggcagatccgtgggaagaaagccgacagaagggcgggaggcgggaggggaaaggtcccccgggatgggtagggcctcaacgctgggcatcggcgcaggtgtgtactgcagggagccagccagaccccccacggactgcctgaccttgggggaagcccggagtagaggaagaggccggacccccagacccgccattgactatgtccgccattgactatgtgttctgagagaaatttttttttttttttttgagactgagtctcactctttcgcccaggccggagtgcagtggcgcgatctcggctcactgcaagctccgcctcccgggttcacgccattctcctgcctcagcctcccgagtagctgggactacaggcgcccgctaccgcgcccggctaattttttgtatttttaatagagacggggtttcaccgtgttagccaggatggtctcgatctcctgacctcgtgatccgcccgccttggcctcccagagtgctgggatgacaggcgtgagcctctgagagcaaattttacccagttcctctctatcctcccgatgactctgaaatcaaactcagcaagtcatccgagcccccacggcgcagcggccctaggctggcatgggcgatgcggagctactccgccctcaggaagcaggcgaggtgcccagcgggagaatcacccacatcaccgtctaatctctgctgtgaagtggaagcgcgagaaggagggagcgtctcatgacggagggtgtgaagacgctaggctggacgaagcagaaaggcgggtgtcactggggacgttctgagggtgctggggagtcagggaagagcaccatcgtcaagcagatgaagatcatccacgaggatggctactccgaggaggaatgccggcagtaccgggcggttgtctacagcaacaccatccagtccatcatggccattgtcaaagccatgggcaacctgcagatcgactttgccgacccctccagagcggacgacgccaggcagctatttgcactgtcctgcaccgccgaggagcaaggcgtgctccctgatgacctgtccggcgtcatccggaggctctgggctgaccatggtgtgcaggcctgctttggccgctcaagggaataccagctcaacgactcagctgcctactacctgaacgacctggagcgtattgcacagagtgactacatccccacacagcaagatgtgctacggacccgcgtaaagaccacggggatcgtggagacacacttcaccttcaaggacctacacttcaagatgtttgatgtgggtggtcagcggtctgagcggaagaagtggatccactgctttgagggcgtcacagccatcatcttctgcgtagccttgagcgcctatgacttggtgctagctgaggacgaggagatgaaccgcatgcatgagagcatgaagctattcgatagcatctgcaacaacaagtggttcacagacacgtccatcatcctcttcctcaacaagaaggacctgtttgaggagaagatcacacacagtcccctgaccatctgcttccctgagtacacaggggccaacaaatatgatgaggcagccagctacatccagagtaagtttgaggacctgaataagcgcaaagacaccaaggagatctacacgcacttcacgtgcgccaccgacaccaagaacgtgcagttcgtgtttgacgccgtcaccgatgtcatcatcaagaacaacctgaaggactgcggcctcttctgaggggcagcggggcctggcgggatgggccaccgccgactttgtaccccccaacccctgaggaagatgggggcaagaagatcacgctccccgcctgttcccccgccgcttttctcctctttcctctctttgttctcagctccccctgtcccctcagctccagacgtaggggaggggttgccacaggcctccctgtttgaagcctgcccttgtctgagatgctggtaatggccatggtacccccttctgggcatctgttctggtttttaaccattgtcttgttctgtgatgaggggaggggggcacatgctgagtctcccaaggctgcgtctggaggggcccctgcttctccagcctggacccccagctttgcccaacaccagcccctgccccagcccaagtccaaatgtttacagggagcctcctgcccagtcccccaaccccagccgctcggaggccccaaaggaaaaagcacaagaagcgtgagacgccaccattcctggaaaccacagtccacctgctcattctcgtagctttttaaaaaaatgaaagtaaagg

SEQ ID NO: 13005 - DNA, 1663 bp, Homo sapiens
  source 1..1663: mol_type = unassigned DNA
tgtgagtgcggcagcggcagtgagtgggtgtcgacgcggcggaatgcccgtcgctgctgctgctgctgcccgacgggcctggggagggcacttccggtaccgctgcctcccagtgcccagccaggagtctctagacagcctctccccaggcgattgcagttactgtggtggccgaggaaatgcaagactggaccatagagctgggggaacgcagggcttctggctagttttgtgtcccgacaccagaagggtcccccatcccaccaggcctgctccttggagcccagctcaccttttgggctaaggtgctggggagtcagggaagagcaccatcgtcaagcagatgaagatcatccacgaggatggctactccgaggaggaatgccggcagtaccgggcggttgtctacagcaacaccatccagtccatcatggccattgtcaaagccatgggcaacctgcagatcgactttgccgacccctccagagcggacgacgccaggcagctatttgcactgtcctgcaccgccgaggagcaaggcgtgctccctgatgacctgtccggcgtcatccggaggctctgggctgaccatggtgtgcaggcctgctttggccgctcaagggaataccagctcaacgactcagctgcctactacctgaacgacctggagcgtattgcacagagtgactacatccccacacagcaagatgtgctacggacccgcgtaaagaccacggggatcgtggagacacacttcaccttcaaggacctacacttcaagatgtttgatgtgggtggtcagcggtctgagcggaagaagtggatccactgctttgagggcgtcacagccatcatcttctgcgtagccttgagcgcctatgacttggtgctagctgaggacgaggagatgaaccgcatgcatgagagcatgaagctattcgatagcatctgcaacaacaagtggttcacagacacgtccatcatcctcttcctcaacaagaaggacctgtttgaggagaagatcacacacagtcccctgaccatctgcttccctgagtacacaggggccaacaaatatgatgaggcagccagctacatccagagtaagtttgaggacctgaataagcgcaaagacaccaaggagatctacacgcacttcacgtgcgccaccgacaccaagaacgtgcagttcgtgtttgacgccgtcaccgatgtcatcatcaagaacaacctgaaggactgcggcctcttctgaggggcagcggggcctggcgggatgggccaccgccgactttgtaccccccaacccctgaggaagatgggggcaagaagatcacgctccccgcctgttcccccgccgcttttctcctctttcctctctttgttctcagctccccctgtcccctcagctccagacgtaggggaggggttgccacaggcctccctgtttgaagcctgcccttgtctgagatgctggtaatggccatggtacccccttctgggcatctgttctggtttttaaccattgtcttgttctgtgatgaggggaggggggcacatgctgagtctcccaaggctgcgtctggaggggcccctgcttctccagcctggacccccagctttgcccaacaccagcccctgccccagcccaagtccaaatgtt

SEQ ID NO: 13006 - DNA, 1486 bp, Homo sapiens
  source 1..1486: mol_type = unassigned DNA
agtagctctgactcctgtcccaggttatgctgagtcccagcagggaaccaccacagctctgaatcagcctgttagccgctgtccattgctcttcatctgctctttatctgaaaatcttcagaagctttccttcaaatgagatgaccacagcagtcttctctgcaggttgcaggaaatgagaggtgctggggagtcagggaagagcaccatcgtcaagcagatgaagatcatccacgaggatggctactccgaggaggaatgccggcagtaccgggcggttgtctacagcaacaccatccagtccatcatggccattgtcaaagccatgggcaacctgcagatcgactttgccgacccctccagagcggacgacgccaggcagctatttgcactgtcctgcaccgccgaggagcaaggcgtgctccctgatgacctgtccggcgtcatccggaggctctgggctgaccatggtgtgcaggcctgctttggccgctcaagggaataccagctcaacgactcagctgcctactacctgaacgacctggagcgtattgcacagagtgactacatccccacacagcaagatgtgctacggacccgcgtaaagaccacggggatcgtggagacacacttcaccttcaaggacctacacttcaagatgtttgatgtgggtggtcagcggtctgagcggaagaagtggatccactgctttgagggcgtcacagccatcatcttctgcgtagccttgagcgcctatgacttggtgctagctgaggacgaggagatgaaccgcatgcatgagagcatgaagctattcgatagcatctgcaacaacaagtggttcacagacacgtccatcatcctcttcctcaacaagaaggacctgtttgaggagaagatcacacacagtcccctgaccatctgcttccctgagtacacaggggccaacaaatatgatgaggcagccagctacatccagagtaagtttgaggacctgaataagcgcaaagacaccaaggagatctacacgcacttcacgtgcgccaccgacaccaagaacgtgcagttcgtgtttgacgccgtcaccgatgtcatcatcaagaacaacctgaaggactgcggcctcttctgaggggcagcggggcctggcgggatgggccaccgccgactttgtaccccccaacccctgaggaagatgggggcaagaagatcacgctccccgcctgttcccccgccgcttttctcctctttcctctctttgttctcagctccccctgtcccctcagctccagacgtaggggaggggttgccacaggcctccctgtttgaagcctgcccttgtctgagatgctggtaatggccatggtacccccttctgggcatctgttctggtttttaaccattgtcttgttctgtgatgaggggaggggggcacatgctgagtctcccaaggctgcgtctggaggggcccctgcttctccagcct

SEQ ID NO: 13007 - DNA, 2153 bp, Homo sapiens
  source 1..2153: mol_type = unassigned DNA
agtcgctcggaactgccgacccgagtgcttcccgcagagggctggtggtgggagcggagtgggtcgggcggggccgagccgggccgtgggccgtgtgggggccgggcggcggccgggccggcggacggcgggatgggctgcaccgtgagcgccgaggacaaggcggcggccgagcgctctaagatgatcgacaagaacctgcgggaggacggagagaaggcggcgcgggaggtgaagttgctgctgttgggatcatccacgaggatggctactccgaggaggaatgccggcagtaccgggcggttgtctacagcaacaccatccagtccatcatggccattgtcaaagccatgggcaacctgcagatcgactttgccgacccctccagagcggacgacgccaggcagctatttgcactgtcctgcaccgccgaggagcaaggcgtgctccctgatgacctgtccggcgtcatccggaggctctgggctgaccatggtgtgcaggcctgctttggccgctcaagggaataccagctcaacgactcagctgcctactacctgaacgacctggagcgtattgcacagagtgactacatccccacacagcaagatgtgctacggacccgcgtaaagaccacggggatcgtggagacacacttcaccttcaaggacctacacttcaagatgtttgatgtgggtggtcagcggtctgagcggaagaagtggatccactgctttgagggcgtcacagccatcatcttctgcgtagccttgagcgcctatgacttggtgctagctgaggacgaggagatgaaccgcatgcatgagagcatgaagctattcgatagcatctgcaacaacaagtggttcacagacacgtccatcatcctcttcctcaacaagaaggacctgtttgaggagaagatcacacacagtcccctgaccatctgcttccctgagtacacaggggccaacaaatatgatgaggcagccagctacatccagagtaagtttgaggacctgaataagcgcaaagacaccaaggagatctacacgcacttcacgtgcgccaccgacaccaagaacgtgcagttcgtgtttgacgccgtcaccgatgtcatcatcaagaacaacctgaaggactgcggcctcttctgaggggcagcggggcctggcgggatgggccaccgccgactttgtaccccccaacccctgaggaagatgggggcaagaagatcacgctccccgcctgttcccccgccgcttttctcctctttcctctctttgttctcagctccccctgtcccctcagctccagacgtaggggaggggttgccacaggcctccctgtttgaagcctgcccttgtctgagatgctggtaatggccatggtacccccttctgggcatctgttctggtttttaaccattgtcttgttctgtgatgaggggaggggggcacatgctgagtctcccaaggctgcgtctggaggggcccctgcttctccagcctggacccccagctttgcccaacaccagcccctgccccagcccaagtccaaatgtttacagggagcctcctgcccagtcccccaaccccagccgctcggaggccccaaaggaaaaagcacaagaagcgtgagacgccaccattcctggaaaccacagtccacctgctcattctcgtagctttttaaaaaaatgaaagtaaaggaaaaaaaaaaaactgcaaatctagaaaactttttagagaaaaactatttaaaactgtcagatcctgaccagcaagcccccccccagccccccttccaagtgactccgtgccttgagtgtgtctgcgtgtttacacccgtccctctgctggccgcccccgtgcgagcggcacccctgccctgccctccacagaattgggttccaagggctgttccagacaactgccaacgtcactgagggccctgccccagcggccctggccccaggctctattaacctaaaatgtagctccctagcgctaacctaggaaccgccgctgcctgctggggggccacgcccctcatgcccttgtcccaggcccggggccttcagcgttgaacacttccttgcttttttcacatgttttatggaattgttcacctggtttgaaataataaaatgt

SEQ ID NO: 13008 - DNA, 1086 bp, Homo sapiens
  source 1..1086: mol_type = unassigned DNA
atgggctgcaccgtgagcgccgaggacaaggcggcggccgagcgctctaagatgatcgacaagaacctgcgggaggacggagagaaggcggcgcgggaggtgaagttgctgctgttgggtgctggggagtcagggaagagcaccatcgtcaagcagatgaagatcatccacgaggatggctactccgaggaggaatgccggcagtaccgggcggttgtctacagcaacaccatccagtccatcatggccattgtcaaagccatgggcaacctgcagatcgactttgccgacccctccagagcggacgacgccaggcagctatttgcactgtcctgcaccgccgaggagcaaggcgtgctccctgatgacctgtccggcgtcatccggaggctctgggctgaccatggtgtgcaggcctgctttggccgctcaagggaataccagctcaacgactcagctgcctactacctgaacgacctggagcgtattgcacagagtgactacatccccacacagcaagatgtgctacggacccgcgtaaagaccacggggatcgtggagacacacttcaccttcaaggacctacacttcaagatgtttgatgtgggtggtcagcggtctgagcggaagaagtggatccactgctttgagggcgtcacagccatcatcttctgcgtagccttgagcgcctatgacttggtgctagctgaggacgaggagatgaaccgcatgcatgagagcatgaagctattcgatagcatctgcaacaacaagtggttcacagacacgtccatcatcctcttcctcaacaagaaggacctgtttgaggagaagatcacacacagtcccctgaccatctgcttccctgagtacacaggggccaacaaatatgatgaggcagccagctacatccagagtaagtttgaggacctgaataagcgcaaagacaccaaggagatctacacgcacttcacgtgcgccaccgacaccaaatctagaaaactttttagagaaaactatttaaaactgtcagatcctgaccagcaaccccccccagccccccttccaagtgactccgtgccttga

SEQ ID NO: 13009 - DNA, 3206 bp, Homo sapiens
  source 1..3206: mol_type = unassigned DNA
agctgacggagagggccaccgcccagcaatagacggtgcctcagcctgccgagccgcagtttccgtggtgtgagtgagtccgggcccgtgtcccctctcccgccgccgccatgggctgcacgttgagcgccgaagacaaggcggcagtggagcgaagcaagatgatcgaccgcaacttacgggaggacggggaaaaagcggccaaagaagtgaagctgctgctactcggtgctggagaatctggtaaaagcaccattgtgaaacagatgaaaatcattcatgaggatggctattcagaggatgaatgtaaacaatataaagtagttgtctacagcaatactatacagtccatcattgcaatcataagagccatgggacggctaaagattgactttggggaagctgccagggcagatgatgcccggcaattatttgttttagctggcagtgctgaagaaggagtcatgactccagaactagcaggagtgattaaacggttatggcgagatggtggggtacaagcttgcttcagcagatccagggaatatcagctcaatgattctgcttcatattatctaaatgatctggatagaatatcccagtctaactacattccaactcagcaagatgttcttcggacgagagtgaagaccacaggcattgtagaaacacatttcaccttcaaagacctatacttcaagatgtttgatgtaggtggccaaagatcagaacgaaaaaagtggattcactgttttgagggagtgacagcaattatcttctgtgtggccctcagtgattatgaccttgttctggctgaggacgaggagatgaaccgaatgcatgaaagcatgaaactgtttgacagcatttgtaataacaaatggtttacagaaacttcaatcattctcttccttaacaagaaagacctttttgaggaaaaaataaagaggagtccgttaactatctgttatccagaatacacaggttccaatacatatgaagaggcagctgcctatattcaatgccagtttgaagatctgaacagaagaaaagataccaaggagatctatactcacttcacctgtgccacagacacgaagaatgtgcagtttgtttttgatgctgttacagatgtcatcattaaaaacaacttaaaggaatgtggactttattgagaagcatggatgttagtgaaagttactacagtgtggagtgttgagaccagacaccttttgctgtctcatggggcagctacaagcatgaacgggaccagggaatggcagcagcatgcagaatcttagcactctttagcacaatattttgtattagggaacttttaattgacatgagatgctaaagtcagacattggaattggaagaactataaagtgtgattcgatcgtcaagacatcacttggatttcttaatcttaaatgcttatggaagatgtgaagttgaggtgctgcattctagaacttcaatatgtagcttactctttttttccccccttcttaaaccaccagtggttcatttttaaggttttttcatcaagagaagaataactttactaaattttatttctttatttgcaaaagaatctttattaaaacaaacaatcttaactatgcacatgatgtgaccagatcatcttgaaaatattcctctttagtaggaactctttgtttttaactcttggtatggtcagaatataatacttccataattacttataattctttccggttactggggctataaatacaactttttaaatgaaatttatgttattatcctgctcaaagtaccattatggtttccatatggtaattacattggaaagttctgcaataagattctagttctctcttttctttaagcttatggttgaaggttaaccttgtttgtgcagattaccaaattactgctgatgtagtatgataaagtcagcttcttggatacagacacacccagggcagctgccaatcagaaatgcaaattgctaaattccaaacagaaccagtgactttgctgctacatatttactaaattgaccactttgattcttgcttgtttgtctcagttatagggagttttgtacatggtgcctcttgttttccatcttcatggccttttctgttgagaaacatctaaagtgtattaacagtgcatgcttttactttgtaaatgtggtgccaaatccctgtttgccatcgtttttactgtaccgatgttaactgtagtaatccttagccagtatgttcttttgctgaaactgttgcattttgggacttttttccactttgtcatgtgtacatttttaatctgttatagttggcggcagtattaaaatggtgagtaaagagcccaggtttgctcctgtttgtaactagtcttttctggaaatactgtcttctgtttccttttgcctttgcagaatgtgctttagcctttgtctgagaatgggtttaggtagaagggtttcctgaaagtctagtcttttggtgtaatagtattgttgaaccttaggttttatgttatatctgcatatgagtgatatgtgatcatgattcattttgcagatttacattttgcttgtgtggaaagttacgttcacttcaacctacagacccttttgtataatgtacagcaaatgtcattaaatattgaatgctctattgggggaagacaaatgaagagaatgcattttgagcatttcaaatcagtagtttgggcagtgccttttggggtccaatctttttggattggattctatttcatcttttgatgtgacttttcactagtttacaaaaaaaaggttggtggtcaacaaaaaaagcaagtcatagcagttcagtgcctttgttggtagtttttaactttttttgtgattctttttggaaaatcatagcttacagatggtataactgtattatataatggaattttctttaggtgtgggaaaacttgatctgaaagaaaattatcagcttcaattggcgattgattcagtgcccacaatgtaaacagggttggtagttgttactcattttgaatataccttttccttattgtattctgtaatataggatcctggaaatgagacctggtggaatattattttcaactgtagtctttctatactgtggactaatgaaatggtgttgttgataatctaaaataaccaataatccaaaaaagttcatttt

SEQ ID NO: 13010 - DNA, 2417 bp, Homo sapiens
  source 1..2417: mol_type = unassigned DNA
ttgattgcaggtcctcctggggccagaagggtgcctgggaggccaggttctggggatcccctccatccagaagaaccacctgctcactctgtcccttcgcctgctgctgggaccatgggggctggggccagtgctgaggagaagcactccagggagctggaaaagaagctgaaagaggacgctgagaaggatgctcgaaccgtgaagctgctgcttctgggtgccggtgagtccgggaagagcaccatcgtcaagcagatgaagattatccaccaggacgggtactcgctggaagagtgcctcgagtttatcgccatcatctacggcaacacgttgcagtccatcctggccatcgtacgcgccatgaccacactcaacatccagtacggagactctgcacgccaggacgacgcccggaagctgatgcacatggcagacactatcgaggagggcacgatgcccaaggagatgtcggacatcatccagcggctgtggaaggactccggtatccaggcctgttttgagcgcgcctcggagtaccagctcaacgactcggcgggctactacctctccgacctggagcgcctggtaaccccgggctacgtgcccaccgagcaggacgtgctgcgctcgcgagtcaagaccactggcatcatcgagacgcagttctccttcaaggatctcaacttccggatgttcgatgtgggcgggcagcgctcggagcgcaagaagtggatccactgcttcgagggcgtgacctgcatcatcttcatcgcggcgctgagcgcctacgacatggtgctagtggaggacgacgaagtgaaccgcatgcacgagagcctgcacctgttcaacagcatctgcaaccaccgctacttcgccacgacgtccatcgtgctcttccttaacaagaaggacgtcttcttcgagaagatcaagaaggcgcacctcagcatctgtttcccggactacgatggacccaacacctacgaggacgccggcaactacatcaaggtgcagttcctcgagctcaacatgcggcgcgacgtgaaggagatctattcccacatgacgtgcgccaccgacacgcagaacgtcaaatttgtcttcgacgctgtcaccgacatcatcatcaaggagaacctcaaagactgtggcctcttctgaggtgcctgaattcatgcgtgtcagtcaccctgagacctggtagccctagctgccttgcagccccaaaccccaggaccctatcagccccctgggactccctggccccaacctgccacctcaccaaagctctgagccctgctagccttgaggcgcggaccctcccccatacctcccacagtatcccagcgcctcatgcccccaaccccaagccctgcccttcaccgcccggctgcactggcctctaggactcacagcagccagccccagctaggaacgggcaggacttggggcagctgaagctcacggtgactcagcagtgcccaactgaccaatctcccgcagctctcctgcccctgggggcccacgactcacctggtgggcctgggctcagcaaacagccctccctcccagtatttcatcaaggacagggaatatccctcccacacacaggccagctgctcaccctgccacctccatgtgacaagtttgacacctgtctacccagagccagtgactgtccctcccagcagcctccaaagggtccaaagtccaagctagctctggcctgtgtggcccccacataaataaattagtggggagggggcagacctgggggcccttgggtgccagagtgagacacagcaggacccttccccaaatactaggctcagagcaacctccagccttctccagcaggatctgctccctgtgtccttggacagcagatccacacaccacttccccacccacacacagtaccctgggctggttggacaacaggatggtgtgttaaggggttaagggagggtactgttgacaccagctatggccaatagctgggctgtcctgaggggtggctggggacagagtccagctcccttggatcagcccagaggattcaggataggacaaaggccctggctgtgcccaaaagggtctacctcaggtggggttacaagcaaacctgggtgaccctcttgtccctaccagcagcttctcttgccccttccattcagggttccctggcaggggaagctgagagccatggctgaactatcagggacaaaggcccatgtccccacatccctgctccctccttcctcatccagcaccaaatctttgcttatgtccacaggccagggcctgtgctgcagtcggggacaaggagcttccgtctggcaaggccggggcacaatttgcactcccctcagctagacgcacagactcagcaataaacctttgcatcaggc

SEQ ID NO: 13011 - DNA, 1224 bp, Homo sapiens
  source 1..1224: mol_type = unassigned DNA
ccctccatccagaagaaccacctgctcactctgtcccttcgcctgctgctgggaccatgggggctggggccagtgctgaggagaagcactccagggagctggaaaagaagctgaaagaggacgctgagaaggatgctcgaaccgtgaagctgctgcttctgggtgccggtgagtccgggaagagcaccatcgtcaagcagatgaagattatccaccaggacgggtactcgctggaagagtgcctcgagtttatcgccatcatctacggcaacacgttgcagtccatcctggccatcgtacgcgccatgaccacactcaacatccagtacggagactctgcacgccaggacgacgcccggaagctgatgcacatggcagacactatcgaggagggcacgatgcccaaggagatgtcggacatcatccagcggctgtggaaggactccggtatccaggcctgttttgagcgcgcctcggagtaccagctcaacgactcggcgggctactacctctccgacctggagcgcctggtaaccccgggctacgtgcccaccgagcaggacgtgctgcgctcgcgagtcaagaccactggcatcatcgagacgcagttctccttcaaggatctcaacttccggatgttcgatgtgggcgggcagcgctcggagcgcaagaagtggatccactgcttcgagggcgtgacctgcatcatcttcatcgcggcgctgagcgcctacgacatggtgctagtggaggacgacgaagtgaaccgcatgcacgagagcctgcacctgttcaacagcatctgcaaccaccgctacttcgccacgacgtccatcgtgctcttccttaacaagaaggacgtcttcttcgagaagatcaagaaggcgcacctcagcatctgtttcccggactacgatggacccaacacctacgaggacgccggcaactacatcaaggtgcagttcctcgagctcaacatgcggcgcgacgtgaaggagatctattcccacatgacgtgcgccaccgacacgcagaacgtcaaatttgtcttcgacgctgtcaccgacatcatcatcaaggagaacctcaaagactgtggcctcttctgaggccagggcctgtgctgcagtcggggacaaggagcttccgtctggcaaggccggggcacaatttgcactcccctcagctagacgcacagactcagcaataaacctttgcatcagg

SEQ ID NO: 13012 - DNA, 1339 bp, Homo sapiens
  source 1..1339: mol_type = unassigned DNA
ctcagtcaatgtaggcagagtacaagaccctacagcctgctctctcacctgccatcgtacagaccagcttttaggggagccaagttgggatactcaatcccaacttttttccttctcttccatctcacatacaggaaaccttacgagagaggattaggggcctgaaaaagctgacaagacggcaaatatgggaagtggagccagtgctgaggacaaagaactggccaagaggtccaaggagctagaaaagaagctgcaggaggatgctgataaggaagccaagactgtcaagctgctactgctgggtgctggggagtcaggaaagagcaccatcgtcaaacagatgaagatcattcaccaggatggctattcaccagaagaatgcctggagttcaaggctatcatctatggaaatgtgctgcagtccatcctggctatcatccgggccatgaccacactgggcatcgattatgctgaaccaagctgtgcggatgacgggcgacagctcaacaacctggctgactccattgaggagggaaccatgcctcctgagctcgtggaggtcattaggaggttgtggaaggatggtggggtgcaagcctgcttcgagagagctgcagaataccagcttaatgactccgcatcttactacctgaaccaattagaacgaattacagaccctgagtacctccctagtgagcaagatgtgctccgatccagagtcaaaaccacgggcatcattgaaaccaagttttccgtcaaagacttgaatttcaggatgtttgatgtgggagggcagagatccgagagaaagaagtggatccactgcttcgagggagtcacctgcatcattttctgtgcagccctcagtgcctatgatatggtgctggtggaagatgacgaagtgaatcgtatgcatgagtctttgcatctgttcaacagcatatgtaaccacaaattctttgcggctacttccattgtcctctttctcaacaagaaggacctctttgaggaaaaaatcaagaaagtccatctcagcatttgttttccagagtatgatggtaacaactcctatgatgatgcggggaattacataaagagccagttccttgacctcaatatgcgaaaagatgtcaaagaaatctacagtcacatgacctgtgctacagatacacagaatgtcaaatttgtgtttgatgcagttacagatattatcatcaaagaaaacctcaaggactgcggcctcttctaatcctcaccattcctcaggtataagttctataaacaggcttggaatctgggtaattaaaaacagaaaattatagtcaatataccatga

SEQ ID NO: 13013 - DNA, 3340 bp, Homo sapiens
  source 1..3340: mol_type = unassigned DNA
ggcggcgggcggcgggcggcgggcggcgcgggagggcgggcggagggaaccaggccggccggagtgtgtgcgccgcccgcggtccggtcacgtccccgcgtgggcgccgctgcccgcgtcgtacggaacgagggcgccgcggccccgtgctcgccgccccgccccgccccgccctgcccggagcagctcggcagatgctctgtgctgcggcccggaggtgaagggctggatgcacagtgggagccggaggcggggggctgcagggagcacaccagcgaccggccctccaaccctccagccactcagcaacatcgccacagcaaccagcaaccagacggcagcagccgaggcaaacacaagcggacggcttcccaccgtcgccgaggacagggaatgactacggcaaatcaggccactttgccaactagggaggtggagtgtcactagtggggaggggcggccaccgcccgctgcacagagcgccatgccggctggagaagaggcgctggggcaggggctgcagtgtggctcggcctcacccccctgctggcactgagtgcctccagggcagctgggctcttgtctgcctggtctcagtgtcccctgtggcaagagggagaggtgccccatcccgtgctccttgtctgggcccgctgctgccagaccatgggatgtcggcaaagctcagaggaaaaagaagcagcccggcggtcccggagaattgaccgccacctgcgctcagagagccagcggcaacgccgcgaaatcaagctgctcctgctgggcaccagcaactcaggcaagagcaccatcgtcaaacagatgaagatcatccacagcggcggcttcaacctggaggcctgcaaggagtacaagcccctcatcatctacaatgccatcgactcgctgacccgcatcatccgggccctggccgccctcaggatcgacttccacaaccccgaccgcgcctacgacgctgtgcagctctttgcgctgacgggccccgctgagagcaagggcgagatcacacccgagctgctgggtgtcatgcgacggctctgggccgacccaggggcacaggcctgcttcagccgctccagcgagtaccacctggaggacaacgcggcctactacctgaacgacctggagcgcatcgccgcagctgactatatccccactgtcgaggacatcctgcgctcccgggacatgaccacgggcattgtggagaacaagttcaccttcaaggagctcaccttcaagatggtggacgtgggggggcagaggtcagagcgcaaaaagtggatccactgcttcgagggcgtcacagccatcatcttctgtgtggagctcagcggctacgacctgaaactctacgaggataaccagacaagtcggatggcagagagcttgcgcctctttgactccatctgcaacaacaactggttcatcaacacctcactcatcctcttcctgaacaagaaggacctgctggcagagaagatccgccgcatcccgctcaccatctgctttcccgagtacaagggccagaacacgtacgaggaggccgctgtctacatccagcggcagtttgaagacctgaaccgcaacaaggagaccaaggagatctactcccacttcacctgcgccaccgacaccagtaacatccagtttgtcttcgacgcggtgacagacgtcatcatacagaacaatctcaagtacattggcctttgctgaggagctgggcccggggcccgcctgcctatggtgaaacccacggggtgtcatgccccaacgcgtgctagagaggcccaatccaggggcagaaaacagggggcctaaagaatgtcccccaccccttggcctctgcctccttggccccacatttctgcaaacataaatatttacggatagattgctaggtagatagacacacacacatgcacacacacacatctggagatggcaaaatcctctaaaatgtcgaggtctcttgaagacttgagaagctgtcacaaggtcactacaagcccaacctgccccttcactttgccttcctgagttggccccactccacttgggggtctgcattggattgttagggataggcagcagggctgaggcaaggtaggccaactgcacccctgtcgcctggaggagggccagctcgctgcccgagctctggcctagggaccttgccgctgaccaagagggaggaccagtgcagggtctgtgcaccttccctgctggcctgcacacagctgctcagcaccactttcattctggacctgggaccttaggagccgggtgacagcactaaccagacctccagccactcacagctctttttaaaaaacagcttcaaaatatgcagcaaaaaccaatacaacaaaacgagtggcacgatttatttcaaactaggccagctgggattccagcttttcttctactagtctgatgttttataaatcaaaacctggttttccttctctgacattttttttttgttttgttttttggtttttttttttttttggccaaatctcgtggtgtttcgcagaaaaaaatccagaaaatttcaaatgcagttgagtattcttttttaaatgcagattttcaaaacatattttttttcaggtggtcttttttgtgtctggcttgctgagtgtaaaagttgttatctggacgatctgtctctctgctccaaagaaattttggagtgagtggcagtcctgcgccagcctcgcgggacacgtgttgtacataagcctctgcagtgtcctcttgttaatggtggggttttctgctttgtttttatttaagaaaataaacacgacatatttaaagaaggttctttcacctgggagcaaatgaacaatagctaagtgtcttggtatttaaagagtaaattatttgtggctttgctgagtgaaggaaggggagcaaggggtggtgcccctggtcccagcatgccccgcgcctgagactggctggaaatgctctgactcctgtgaaggcacagccagcgttgtggcctgagggaggccctgctgggaccctgatctgggccttcctgtcccagggcctatgggcaactgcgttgaaaggacgttcgccaagggccgtgtgtaaatacgaactgcgccatggagaggagaggcactgccggagcccttgccagatctccctccctctctccgtgcagtagctgtgtgtccgaggtcagtgtgcggaatcacagccaaggacgtgaagagatgtacgggggaaagagaagctggggattggatgaaagtcaaaggttgtctactttaagaaaataaaataccctgaatggagccca

SEQ ID NO: 13014 - DNA, 1429 bp, Homo sapiens
  source 1..1429: mol_type = unassigned DNA
agatgctctgtgctgcggcccggaggtgaagggctggatgcacagtgggagccggaggcggggggctgcagggagcacaccagcgaccggccctccaaccctccagccactcagcaacatcgccacagcaaccagcaacgccgcgaaatcaagctgctcctgctgggcaccagcaactcaggcaagagcaccatcgtcaaacagatgaagatcatccacagcggcggcttcaacctggaggcctgcaaggagtacaagcccctcatcatctacaatgccatcgactcgctgacccgcatcatccgggccctggccgccctcaggatcgacttccacaaccccgaccgcgcctacgacgctgtgcagctctttgcgctgacgggccccgctgagagcaagggcgagatcacacccgagctgctgggtgtcatgcgacggctctgggccgacccaggggcacaggcctgcttcagccgctccagcgagtaccacctggaggacaacgcggcctactacctgaacgacctggagcgcatcgccgcagctgactatatccccactgtcgaggacatcctgcgctcccgggacatgaccacgggcattgtggagaacaagttcaccttcaaggagctcaccttcaagatggtggacgtgggggggcagaggtcagagcgcaaaaagtggatccactgcttcgagggcgtcacagccatcatcttctgtgtggagctcagcggctacgacctgaaactctacgaggataaccagacaagtcggatggcagagagcttgcgcctctttgactccatctgcaacaacaactggttcatcaacacctcactcatcctcttcctgaacaagaaggacctgctggcagagaagatccgccgcatcccgctcaccatctgctttcccgagtacaagggccagaacacgtacgaggaggccgctgtctacatccagcggcagtttgaagacctgaaccgcaacaaggagaccaaggagatctactcccacttcacctgcgccaccgacaccagtaacatccagtttgtcttcgacgcggtgacagacgtcatcatacagaacaatctcaagtacattggcctttgctgaggagctgggcccggggcccgcctgcctatggtgaaacccacggggtgtcatgccccaacgcgtgctagagaggcccaatccaggggcagaaaacagggggcctaaagaatgtcccccaccccttggcctctgcctccttggccccacatttctgcaaacataaatatttacggatagattgctaggtagatagacacacacacatgcacacacacacatctggagatggcaaaatcctctaaaatgtcgaggtctcttgaagacttgagaagctgtcacaaggtcactacaagcccaacctgccccttcactt

SEQ ID NO: 13015 - DNA, 3091 bp, Homo sapiens
  source 1..3091: mol_type = unassigned DNA
ctcacctctcaccatctgctctgtggctcccagtgctgactctggaagctttatcttgggtaaaagatgtgtgatcagacctttctcgttaatgtatttggctcatgtgacaaatgtttcaaacaacgagctctgagaccagttttcaagaagtctcaacaactcagctactgttcaacatgtgcagaaattatggcaaccgaggggctgcacgagaacgagacgctggcgtcgctgaagagcgaggccgagagcctcaagggcaagctggaggaggagcgagccaagctgcacgatgtggagctgcaccaggtggcggagcgggtggaggccctggggcagtttgtcatgaagaccagaaggaccctcaaaggccacgggaacaaagtcctgtgcatggactggtgcaaagataagaggaggatcgtgagctcgtcacaggatgggaaggtgatcgtgtgggattccttcaccacaaacaaggagcacgcggtcaccatgccctgcacgtgggtgatggcatgtgcttatgccccatcgggatgtgccattgcttgtggtggtttggataataagtgttctgtgtaccccttgacgtttgacaaaaatgaaaacatggctgccaaaaagaagtctgttgctatgcacaccaactacctgtcggcctgcagcttcaccaactctgacatgcagatcctgacagcgagcggcgatggcacatgtgccctgtgggacgtggagagcgggcagctgctgcagagcttccacggacatggggctgacgtcctctgcttggacctggccccctcagaaactggaaacaccttcgtgtctgggggatgtgacaagaaagccatggtgtgggacatgcgctccggccagtgcgtgcaggcctttgaaacacatgaatctgacatcaacagtgtccggtactaccccagtggagatgcctttgcttcagggtcagatgacgctacgtgtcgcctctatgacctgcgggcagatagggaggttgccatctattccaaagaaagcatcatatttggagcatccagcgtggacttctccctcagtggtcgcctgctgtttgctggatacaatgattacactatcaacgtctgggatgttctcaaagggtcccgggtctccatcctgtttggacatgaaaaccgcgttagcactctacgagtttcccccgatgggactgctttctgctctggatcatgggatcataccctcagagtctgggcctaatcatcttctgacagtgcactcatgtatacctgagaatttgaaatcttcacatgtaaatagatattacttctagaggagcttagagtttattgcagtgtagcttaggggagcaacccatggctcacaggtcactaagcgtctccaatatgactattaaaactgtcacctctggaaatacactagtgtgagccttcagcactgcgagaataccttcaagtacagtatttttcttttggaacactttttaaaatgtatctgtttttaaggttattctaaattatagtagcctcaactcattctgtcaccagtagaattcagcagttaatatattccatattatttctttgaatcaattcattttcagagcactttaaagtctgatatttctcgatgtgcactgtgatgcctggaaccttcctctggaagtgctgattttatggactgaggactggtgactggtctgtgatagaagcaaattccaattccaaatgtaattagacaaaaatcatttttttagaatgtgtttttattgtaaaagtatctttttcagcttcctgttctattgtcttttttcagatacaacatttttgtctatggtgaactgctgtaaatgacgcagagaaatgcctaaaaaggacaggtggtttgactcatggatgatgatgatgtcactgtgccacttggacagggcgttttctctgaattgaagggaaagccaatggtgtttgtaaacaaatgcttctgagagcaaagaaaagtcttctgtgtgggaacacaagatagtaaacttatttaaaaacctattagtagaattagtggaaacacttaggttaaagtgaatcttgtccatataaattatattcatggccgggcgcggtggctcacgcttgtaatcccagcactttgggaggccgaggcgggcggatcacgaggtcaggagttcgagaccacggtgaaaccctgtctctactaaaaaatacaaaaaattagccgggcgtggtggcgggcgcctgtagtcccagctactcggagaggctgaggcaggagaatggcgtgaacccgggaggtggagcttgcagtgagccgaggtcgagccactgcagcctgggtgacaaagcgagactccgtctcaaaaaaaaaaaaaaattatattcatatgtattgcattgcaattataattacatatgcagattgattgatagtcatgaataataacgtctgctcctcttacatagaaaaacgatattaaaagaagatcttctctttatttgagactcagaattccttctagaagaaggaagtgctttttgttataggatcccttcttttcctttttttgtttttttgtaagatgtagatgcttattctttgctttagaaaacttctcacttaaaaagatggcatgcacctaggggaataaaaggtcacctcagacaccaggtgtcattcctggtgaggcctgcctcgtcggtggcctggggtctgccggcaggttctggctgcacctgaaggctgcgtgcaccttgtcccctggacaggtctcctttcctggccctgctccagcccagcccttcttctagtggtagctctggctttgcaggcccagctccaggccctgctcctcagagagactcttccagagctggagctgggcacagccataagacaggactggaccagatgctcctgtaaacatccaggggtgtgccaggcccaccctcacaactgcttgttcaggtatcgtgatgggccactcggtccaaaatcagccaggccatcttttccatcatctcacttcaaataaacataataattatatttgatcatttgcagagca

SEQ ID NO: 13016 - DNA, 1735 bp, Homo sapiens
  source 1..1735: mol_type = unassigned DNA
atcgcggagggcggggccgcggggcggtgctcggggccggggacggctgctggagcggcgcccgccgcggctcagcgcattcccgctctccgcttccctctccgctgcgtccccgcgcgaagatggcaaccgaggggctgcacgagaacgagacgctggcgtcgctgaagagcgaggccgagagcctcaagggcaagctggaggaggagcgagccaagctgcacgatgtggagctgcaccaggtggcggagcgggtggaggccctggggcagtttgtcatgaagaccagaaggaccctcaaaggccacgggaacaaagtcctgtgcatggactggtgcaaagataagaggaggatcgtgagctcgtcacaggatgggaaggtgatcgtgtgggattccttcaccacaaacaaggagcacgcggtcaccatgccctgcacgtgggtgatggcatgtgcttatgccccatcgggatgtgccattgcttgtggtggtttggataataagtgttctgtgtaccccttgacgtttgacaaaaatgaaaacatggctgccaaaaagaagtctgttgctatgcacaccaactacctgtcggcctgcagcttcaccaactctgacatgcagatcctgacagcgagcggcgatggcacatgtgccctgtgggacgtggagagcgggcagctgctgcagagcttccacggacatggggctgacgtcctctgcttggacctggccccctcagaaactggaaacaccttcgtgtctgggggatgtgacaagaaagccatggtgtgggacatgcgctccggccagtgcgtgcaggcctttgaaacacatgaatctgacatcaacagtgtccggtactaccccagtggagatgcctttgcttcagggtcagatgacgctacgtgtcgcctctatgacctgcgggcagatagggaggttgccatctattccaaagaaagcatcatatttggagcatccagcgtggacttctccctcagtggtcgcctgctgtttgctggatacaatgattacactatcaacgtctgggatgttctcaaagggtcccgggtctccatcctgtttggacatgaaaaccgcgttagcactctacgagtttcccccgatgggactgctttctgctctggatcatgggatcataccctcagagtctgggcctaatcatcttctgacagtgcactcatgtatacctgagaatttgaaatcttcacatgtaaatagatattacttctagaggagcttagagtttattgcagtgtagcttaggggagcaacccatggctcacaggtcactaagcgtctccaatatgactattaaaactgtcacctctggaaatacactagtgtgagccttcagcactgcgagaataccttcaagtacagtatttttcttttggaacactttttaaaatgtatctgtttttaaggttattctaaattatagtagcctcaactcattctgtcaccagtagaattcagcagttaatatattccatattatttctttgaatcaattcattttcagagcactttaaagtctgatatttctcgatgtgcactgtgatgcctggaaccttcctctggaagtgctgattttatggactgaggactggtgactggtctgtgatagaagcaaattccaattccaaatgtaattagacaaaaatcatttttttagaatgtgtttttattgtaaaagtatctttttcagc

SEQ ID NO: 13017 - DNA, 2678 bp, Homo sapiens
  source 1..2678: mol_type = unassigned DNA
gcgcgaagatggcaaccgaggggctgcacgagaacgagacgctggcgtcgctgaagagcgaggccgagagcctcaagggcaagctggaggaggagcgagccaagctgcacgatgtggagctgcaccaggtggcggagcgggtggaggccctggggcagtttgtcatgaagaccagaaggaccctcaaaggccacgggaacaaagtcctgtgcatggactggtgcaaagataagaggaggatcgtgagctcgtcacaggatgggaaggtgatcgtgtgggattccttcaccacaaacaagatcctgacagcgagcggcgatggcacatgtgccctgtgggacgtggagagcgggcagctgctgcagagcttccacggacatggggctgacgtcctctgcttggacctggccccctcagaaactggaaacaccttcgtgtctgggggatgtgacaagaaagccatggtgtgggacatgcgctccggccagtgcgtgcaggcctttgaaacacatgaatctgacatcaacagtgtccggtactaccccagtggagatgcctttgcttcagggtcagatgacgctacgtgtcgcctctatgacctgcgggcagatagggaggttgccatctattccaaagaaagcatcatatttggagcatccagcgtggacttctccctcagtggtcgcctgctgtttgctggatacaatgattacactatcaacgtctgggatgttctcaaagggtcccgggtctccatcctgtttggacatgaaaaccgcgttagcactctacgagtttcccccgatgggactgctttctgctctggatcatgggatcataccctcagagtctgggcctaatcatcttctgacagtgcactcatgtatacctgagaatttgaaatcttcacatgtaaatagatattacttctagaggagcttagagtttattgcagtgtagcttaggggagcaacccatggctcacaggtcactaagcgtctccaatatgactattaaaactgtcacctctggaaatacactagtgtgagccttcagcactgcgagaataccttcaagtacagtatttttcttttggaacactttttaaaatgtatctgtttttaaggttattctaaattatagtagcctcaactcattctgtcaccagtagaattcagcagttaatatattccatattatttctttgaatcaattcattttcagagcactttaaagtctgatatttctcgatgtgcactgtgatgcctggaaccttcctctggaagtgctgattttatggactgaggactggtgactggtctgtgatagaagcaaattccaattccaaatgtaattagacaaaaatcatttttttagaatgtgtttttattgtaaaagtatctttttcagcttcctgttctattgtcttttttcagatacaacatttttgtctatggtgaactgctgtaaatgacgcagagaaatgcctaaaaaggacaggtggtttgactcatggatgatgatgatgtcactgtgccacttggacagggcgttttctctgaattgaagggaaagccaatggtgtttgtaaacaaatgcttctgagagcaaagaaaagtcttctgtgtgggaacacaagatagtaaacttatttaaaaacctattagtagaattagtggaaacacttaggttaaagtgaatcttgtccatataaattatattcatggccgggcgcggtggctcacgcttgtaatcccagcactttgggaggccgaggcgggcggatcacgaggtcaggagttcgagaccacggtgaaaccctgtctctactaaaaaatacaaaaaattagccgggcgtggtggcgggcgcctgtagtcccagctactcggagaggctgaggcaggagaatggcgtgaacccgggaggtggagcttgcagtgagccgaggtcgagccactgcagcctgggtgacaaagcgagactccgtctcaaaaaaaaaaaaaaattatattcatatgtattgcattgcaattataattacatatgcagattgattgatagtcatgaataataacgtctgctcctcttacatagaaaaacgatattaaaagaagatcttctctttatttgagactcagaattccttctagaagaaggaagtgctttttgttataggatcccttcttttcctttttttgtttttttgtaagatgtagatgcttattctttgctttagaaaacttctcacttaaaaagatggcatgcacctaggggaataaaaggtcacctcagacaccaggtgtcattcctggtgaggcctgcctcgtcggtggcctggggtctgccggcaggttctggctgcacctgaaggctgcgtgcaccttgtcccctggacaggtctcctttcctggccctgctccagcccagcccttcttctagtggtagctctggctttgcaggcccagctccaggccctgctcctcagagagactcttccagagctggagctgggcacagccataagacaggactggaccagatgctcctgtaaacatccaggggtgtgccaggcccaccctcacaactgcttgttcaggtatcgtgatgggccactcggtccaaaatcagccaggccatcttttccatcatctcacttcaaataaacataataattata

SEQ ID NO: 13018 - DNA, 2217 bp, Homo sapiens
  source 1..2217: mol_type = unassigned DNA
aacagaggacatttaggctggatgaaggcaggctcagggggctaccacgaccatcaggcatctgaagcccctctgtggagacccatcagactcgctctgtgttgccccggggcagggttggggatgaaagggggcaccagtagccatcagtaatcatccgcaaagggctctcttgtggacacttatgctgcaagagccacttcctccacggtcttatcacctcacccaggccctgtggagcagccagaaggcagggagagcttctcccttgcaggtcccctccattgctgtcagtacccagctggctccagggctctgtgatgccgccagctgggcctatgagggccccgaaccctgagtcctcactgcctttctcccaatcccaggaaggtatgctcagccagagcccaggcctcatacacactggcagtgacaaaaagtaaaattccagccctgtccccatgtctttccctgggcacccctgtgtgcctttactctatggctgacctttgtacttgtaagctatccagaggctctttgggcctctgccagagtttcctaaaacatacgtttgcttttctcattctcctgcccagaagcttccagagtgctctcttggcttcagactgagtccccacctgtgaacgggctcacctttcatttagtgcagacataggcccccctggagtttgtctctccccttcccttctttcacctggccagctctcactcttccttgaagaccaactcagatatcaccacactgggtttgggaccctcctgtgtgcacacctggatcccagcacttctcatgctgttgtcattgatccttgtctactggtgatgtcaactccccaagcgaacatcagaaatacttgcaaccaagcaaagctaaggttatctgacctgccacagtaagggagaacctccacttggcagaatcttagtaggttctgaaaatggaggaattagggaagggtacttagaggatttcagggtccaggcttggtgattttaaggtgggtcttgcaaggccgttttagctttggattggtgagcccagcaagcgaacagtctttgagtctggatgagcaagctgttaatcttgatcctgacagcgagcggcgatggcacatgtgccctgtgggacgtggagagcgggcagctgctgcagagcttccacggacatggggctgacgtcctctgcttggacctggccccctcagaaactggaaacaccttcgtgtctgggggatgtgacaagaaagccatggtgtgggacatgcgctccggccagtgcgtgcaggcctttgaaacacatgaatctgacatcaacagtgtccggtactaccccagtggagatgcctttgcttcagggtcagatgacgctacgtgtcgcctctatgacctgcgggcagatagggaggttgccatctattccaaagaaagcatcatatttggagcatccagcgtggacttctccctcagtggtcgcctgctgtttgctggatacaatgattacactatcaacgtctgggatgttctcaaagggtcccgggtctccatcctgtttggacatgaaaaccgcgttagcactctacgagtttcccccgatgggactgctttctgctctggatcatgggatcataccctcagagtctgggcctaatcatcttctgacagtgcactcatgtatacctgagaatttgaaatcttcacatgtaaatagatattacttctagaggagcttagagtttattgcagtgtagcttaggggagcaacccatggctcacaggtcactaagcgtctccaatatgactattaaaactgtcacctctggaaatacactagtgtgagccttcagcactgcgagaataccttcaagtacagtatttttcttttggaacactttttaaaatgtatctgtttttaaggttattctaaattatagtagcctcaactcattctgtcaccagtagaattcagcagttaatatattccatattatttctttgaatcaattcattttcagagcactttaaagtctgatatttctcgatgtgcactgtgatgcctggaaccttcctctggaagtgctgattttatggactgaggactggtgactggtctgtgatagaagcaaattccaattccaaatgtaattagacaaaaatcatttttttagaatgtgtttttattgtaaaagtatctttttc

SEQ ID NO: 13019 - DNA, 1176 bp, Homo sapiens
  source 1..1176: mol_type = unassigned DNA
tggctggaggcgtctgaggggcggtgtgggcgcgtcaggccgcgacgagggcgctgagacaaatttacatgtattggagaccagaccagaagcccttctgaattaagatctcacattcttgaaggtggcattgaagagcactaagatcggaagatgagtgagcttgaccagttacggcaggaggccgagcaacttaagaaccagattcgagacgccaggaaagcatgtgcagatgcaactctctctcagatcacaaacaacatcgacccagtgggaagaatccaaatgcgcacgaggaggacactgcgggggcacctggccaagatctacgccatgcactggggcacagactccaggcttctcgtcagtgcctcgcaggatggtaaacttatcatctgggacagctacaccaccaacaaggtccacgccatccctctgcgctcctcctgggtcatgacctgtgcatatgccccttctgggaactatgtggcctgcggtggcctggataacatttgctccatttacaatctgaaaactcgtgaggggaacgtgcgcgtgagtcgtgagctggcaggacacacaggttacctgtcctgctgccgattcctggatgacaatcagatcgtcaccagctctggagacaccacgtgtgccctgtgggacatcgagaccggccagcagacgaccacgtttaccggacacactggagatgtcatgagcctttctcttgctcctgacaccagactgttcgtctctggtgcttgtgatgcttcagccaaactctgggatgtgcgagaaggcatgtgccggcagaccttcactggccacgagtctgacatcaatgccatttgcttctttccaaatggcaatgcatttgccactggctcagacgacgccacctgcaggctgtttgaccttcgtgctgaccaggagctcatgacttactcccatgacaacatcatctgcgggatcacctctgtctccttctccaagagcgggcgcctcctccttgctgggtacgacgacttcaactgcaacgtctgggatgcactcaaagccgaccgggcaggtgtcttggctgggcatgacaaccgcgtcagctgcctgggcgtgactgacgatggcatggctgtggcgacagggtcctgggatagcttcctcaagatctggaactaa

SEQ ID NO: 13020 - DNA, 3132 bp, Homo sapiens
  source 1..3132: mol_type = unassigned DNA
aggcgtctgaggggcggacggaggcggcggcggcggcggcgggagcgggagcgggcggcgagtggggagcggggccgggagtggagcagccgccgcggcgggactggaccgagcctcgccggcgcgcacctgcccgcagcgcccgcggagcgcgcagcgcggcccgagcgcgacgacctgccgagcggcggccgaggcggcggtgtgggcgcgtcaggccgcgacgagggcgctgagacaaatttacatgtattggagaccagaccagaagcccttctgaattaagatctcacattcttgaaggtggcattgaagagcactaagatcggaagatgagtgagcttgaccagttacggcaggaggccgagcaacttaagaaccagattcgagacgccaggaaagcatgtgcagatgcaactctctctcagatcacaaacaacatcgacccagtgggaagaatccaaatgcgcacgaggaggacactgcgggggcacctggccaagatctacgccatgcactggggcacagactccaggcttctcgtcagtgcctcgcaggatggtaaacttatcatctgggacagctacaccaccaacaaggtccacgccatccctctgcgctcctcctgggtcatgacctgtgcatatgccccttctgggaactatgtggcctgcggtggcctggataacatttgctccatttacaatctgaaaactcgtgaggggaacgtgcgcgtgagtcgtgagctggcaggacacacaggttacctgtcctgctgccgattcctggatgacaatcagatcgtcaccagctctggagacaccacgtgtgccctgtgggacatcgagaccggccagcagacgaccacgtttaccggacacactggagatgtcatgagcctttctcttgctcctgacaccagactgttcgtctctggtgcttgtgatgcttcagccaaactctgggatgtgcgagaaggcatgtgccggcagaccttcactggccacgagtctgacatcaatgccatttgcttctttccaaatggcaatgcatttgccactggctcagacgacgccacctgcaggctgtttgaccttcgtgctgaccaggagctcatgacttactcccatgacaacatcatctgcgggatcacctctgtctccttctccaagagcgggcgcctcctccttgctgggtacgacgacttcaactgcaacgtctgggatgcactcaaagccgaccgggcaggtgtcttggctgggcatgacaaccgcgtcagctgcctgggcgtgactgacgatggcatggctgtggcgacagggtcctgggatagcttcctcaagatctggaactaacgccagtagcatgtggatgccatggagactggaagaccattccaacttggacgcgttaccatgagagcatatcctatccaaccgtactaacgtggacaccctacacctcccctcagaacttcaaaagggcaagatcttttttccttcacttattgctgaaaccaagagcacaattcccattgagagaaagatctctgtgctgtaaactaaaacaaattgtgcattccttccggggccatcgtctttgttttcttttttgtcttgaatgaattttaaaaggaaatatataataaaaatgttaaccagaaggtaaacttgagtgtaattgtcagacagacacacttttccaccagtgtatttgaattttagaccagtgaccctgttttgtggcattcatgcaaaacatgctgagggctttgttcatctggtcatcgtgtccaaatttcagtcatgtttgtagcaagattttggaagcattcatatttcctttttaaaatgtattcctttgtgttcaacagttaatcaaaaccagagagtctagggcagcctctctgatgttgtcaatgatgtaaattcagtccctggtttttaattttctgtctgatgtcacagatcattgttgcacacaaacgtggcatagaaaagaacatgttcagaagccatggggccaagcacatgcggggacggtctcaaatgcgtgatcagagaatccttcacctttgctgaaaagtgagctcagatccagcaccatgttcctcctgacccatcctgtctatcttctcagttgagtttttaatctcactttgggtttccttgtgaagttggagggaagtttataatagcctaacactaccccacccccaactaggaggaacctctgttttcaagagagatgcctgtcctgtgcttggatagtcagtcaattatttgtgtatgaaacaatgtacaaatcaatgttttgaaaataatgatctcagactttctaagttaaattttaaaaattttgattgtttgccatattgggtgggtttactcttagaatcgcatgctgtagaaatgctcaaaagtgcatatgggactcagtccttaggtgttctttttcttttaagaaataacctcttacagttgtaaccattgcggctctgtccacttctcgttgctgctctgtggcacatatcggaagcagtacagcgcgcggctctacacgcttgggtagcgggataagtcactgttttctttatttctttaaaaaaaaaaaagttctgttgcaaacgactgctgttggattctgagggtggggagggagagagagggagggagagggagtgaagagcctgccctcctatatggattcttcagggccctccacatctgaggtggctcattcccatcacacacagattgtcctggtgttcatttcaaggccagtgttcagcagcagcgtttggaaagcaggttctgtgggaccccccgccccgccccccgcactccttcatagcagcagtagtggcttctccatcctgttttctgcaacattctatacaaaactgtgctgtgaccttgcggtaggcctggatctggcaaagagaatacaaatgaaaccccttctttctctttccgtccaacaactctgtagagctctctgcacccttacccctttccaccttttgtatttaattttaaagtcagtgtactgcaaggaagctggatgcaagatagatactatattaaactgtactgttatttaagatgtaataaagcagtttgacatgaggga

SEQ ID NO: 13021 - DNA, 1240 bp, Homo sapiens
  source 1..1240: mol_type = unassigned DNA
caggttacctgtcctgctgccgattcctggatgacaatcagatcgtcaccagctctggagacaccacgtgtgccctgtgggacatcgagaccggccagcagacgaccacgtttaccggacacactggagatgtcatgagcctttctcttgctcctgacaccagactgttcgtctctggtgcttgtgatgcttcagccaaactctgggatgtgcgagaaggcatgtgccggcagaccttcactggccacgagtctgacatcaatgccatttgcttctttccaaatggcaatgcatttgccactggctcagacgacgccacctgcaggctgtttgaccttcgtgctgaccaggagctcatgacttactcccatgacaacatcatctgcgggatcacctctgtctccttctccaagagcgggcgcctcctccttgctgggtacgacgacttcaactgcaacgtctgggatgcactcaaagccgaccgggcaggtgtcttggctgggcatgacaaccgcgtcagctgcctgggcgtgactgacgatggcatggctgtggcgacagggtcctgggatagcttcctcaagatctggaactaacgccagtaggtaatgcagcagcccaaatgcccttctctgaggagaactgtgcgtgtttctcatagaacatttgaagttgtcattaacggtttctagataaatgttgatgtagcattgatttggaattgtgttgtgggaaacgtttacagaaagctgaagtcacgtgccctcagctgcagacactcatgcagtgatgggaagagcagtgacctggctgtgcgtctgcacttagattctctgcctcttttcacatttctttaaactctgtttaaaacagcatgtggatgccatggagactggaagaccattccaacttggacgcgttaccatgagagcatatcctatccaaccgtactaacgtggacaccctacacctcccctcagaacttcaaaagggcaagatcttttttccttcacttattgctgaaaccaagagcacaattcccattgagagaaagatctctgtgctgtaaactaaaacaaattgtgcattccttccggggccatcgtctttgttttcttttttgtcttgaatgaattttaaaaggaaatatataataaaaatgttaaccagaaggtaaacttgagtgtaattgtcagacagacacacttttccaccagtgtatttgaattttagaccagtg

SEQ ID NO: 13022 - DNA, 628 bp, Homo sapiens
  source 1..628: mol_type = unassigned DNA
gtcggcggccggagcccccgcgcgggccgcctatcgggtggagatggggtttcaccatgttgaccatgctggtctccaattcctgacctcagacaaatttacatgtattggagaccagaccagaagcccttctgaattaagatctcacattcttgaaggtggcattgaagagcactaagatcggaagatgagtgagcttgaccagttacggcaggaggccgagcaacttaagaaccagattcgagacgccaggaaagcatgtgcagatgcaactctctctcagatcacaaacaacatcgacccagtgggaagaatccaaatgcgcacgaggaggacactgcgggggcacctggccaagatctacgccatgcactggggcacagactccaggcttctcgtcagtgcctcgcaggatggtaaacttatcatctgggacagctacaccaccaacaaggtccacgccatccctctgcgctcctcctgggtcatgacctgtgcatatgccccttctgggaactatgtggcctgcggtggcctggataacatttgctccatttacaatctgaaaactcgtgaggggaacgtgcgcgtgagtcgtgagctggcaggacacacaggtacctgtcct

SEQ ID NO: 13023 - DNA, 423 bp, Homo sapiens
  source 1..423: mol_type = unassigned DNA
ctggaaggtctgggggactgagggaagcgaagagaaaagcaagagcaattaaatatctcacattcttgaaggtggcattgaagagcactaagatcggaagatgagtgagcttgaccagttacggcaggaggccgagcaacttaagaaccagattcgagacgccaggaaagcatgtgcagatgcaactctctctcagatcacaaacaacatcgacccagtgggaagaatccaaatgcgcacgaggaggacactgcgggggcacctggccaagatctacgccatgcactggggcacagactccaggcttctcgtcagtgcctcgcaggatggtaaacttatcatctgggacagctacaccaccaacaaggtccacgccatccctctgcgctcctcctgggtcatgacctgtgcatatgccccttc

SEQ ID NO: 13024 - DNA, 514 bp, Homo sapiens
  source 1..514: mol_type = unassigned DNA
gcgacgagggcgctgagacaaatttacatgtattggagaccagaccagaagcccttctgaattaagatctcacattcttgaaggtggcattgaagagcactaagatcggaagatgagtgagcttgaccagttacggcaggaggccgagcaacttaagaaccagattcgaatcacaaacaacatcgacccagtgggaagaatccaaatgcgcacgaggaggacactgcgggggcacctggccaagatctacgccatgcactggggcacagactccaggcttctcgtcagtgcctcgcaggatggtaaacttatcatctgggacagctacaccaccaacaaggtccacgccatccctctgcgctcctcctgggtcatgacctgtgcatatgccccttctgggaactatgtggcctgcggtggcctggataacatttgctccatttacaatctgaaaactcgtgaggggaacgtgcgcgtgagtcgtgagctggcaggacacacaggtacctgtcct

SEQ ID NO: 13025 - DNA, 2827 bp, Homo sapiens
  source 1..2827: mol_type = unassigned DNA
gcggcccgagcgcgacgacctgccgagcggcggccgaggcggcggtgtgggcgcgtcaggccgcgacgagggcgctgagacaaatttacatgtattggagaccagaccagaagcccttctgaattaagatctcacattcttgaaggtggcattgaagagcactaagatcggaagatgagtgagcttgaccagttacggcaggaggccgagcaacttaagaaccagattcgagcttctcgtcagtgcctcgcaggatggtaaacttatcatctgggacagctacaccaccaacaaggtccacgccatccctctgcgctcctcctgggtcatgacctgtgcatatgccccttctgggaactatgtggcctgcggtggcctggataacatttgctccatttacaatctgaaaactcgtgaggggaacgtgcgcgtgagtcgtgagctggcaggacacacaggttacctgtcctgctgccgattcctggatgacaatcagatcgtcaccagctctggagacaccacgtgtgccctgtgggacatcgagaccggccagcagacgaccacgtttaccggacacactggagatgtcatgagcctttctcttgctcctgacaccagactgttcgtctctggtgcttgtgatgcttcagccaaactctgggatgtgcgagaaggcatgtgccggcagaccttcactggccacgagtctgacatcaatgccatttgcttctttccaaatggcaatgcatttgccactggctcagacgacgccacctgcaggctgtttgaccttcgtgctgaccaggagctcatgacttactcccatgacaacatcatctgcgggatcacctctgtctccttctccaagagcgggcgcctcctccttgctgggtacgacgacttcaactgcaacgtctgggatgcactcaaagccgaccgggcaggtgtcttggctgggcatgacaaccgcgtcagctgcctgggcgtgactgacgatggcatggctgtggcgacagggtcctgggatagcttcctcaagatctggaactaacgccagtagcatgtggatgccatggagactggaagaccattccaacttggacgcgttaccatgagagcatatcctatccaaccgtactaacgtggacaccctacacctcccctcagaacttcaaaagggcaagatcttttttccttcacttattgctgaaaccaagagcacaattcccattgagagaaagatctctgtgctgtaaactaaaacaaattgtgcattccttccggggccatcgtctttgttttcttttttgtcttgaatgaattttaaaaggaaatatataataaaaatgttaaccagaaggtaaacttgagtgtaattgtcagacagacacacttttccaccagtgtatttgaattttagaccagtgaccctgttttgtggcattcatgcaaaacatgctgagggctttgttcatctggtcatcgtgtccaaatttcagtcatgtttgtagcaagattttggaagcattcatatttcctttttaaaatgtattcctttgtgttcaacagttaatcaaaaccagagagtctagggcagcctctctgatgttgtcaatgatgtaaattcagtccctggtttttaattttctgtctgatgtcacagatcattgttgcacacaaacgtggcatagaaaagaacatgttcagaagccatggggccaagcacatgcggggacggtctcaaatgcgtgatcagagaatccttcacctttgctgaaaagtgagctcagatccagcaccatgttcctcctgacccatcctgtctatcttctcagttgagtttttaatctcactttgggtttccttgtgaagttggagggaagtttataatagcctaacactaccccacccccaactaggaggaacctctgttttcaagagagatgcctgtcctgtgcttggatagtcagtcaattatttgtgtatgaaacaatgtacaaatcaatgttttgaaaataatgatctcagactttctaagttaaattttaaaaattttgattgtttgccatattgggtgggtttactcttagaatcgcatgctgtagaaatgctcaaaagtgcatatgggactcagtccttaggtgttctttttcttttaagaaataacctcttacagttgtaaccattgcggctctgtccacttctcgttgctgctctgtggcacatatcggaagcagtacagcgcgcggctctacacgcttgggtagcgggataagtcactgttttctttatttctttaaaaaaaaaaaagttctgttgcaaacgactgctgttggattctgagggtggggagggagagagagggagggagagggagtgaagagcctgccctcctatatggattcttcagggccctccacatctgaggtggctcattcccatcacacacagattgtcctggtgttcatttcaaggccagtgttcagcagcagcgtttggaaagcaggttctgtgggaccccccgccccgccccccgcactccttcatagcagcagtagtggcttctccatcctgttttctgcaacattctatacaaaactgtgctgtgaccttgcggtaggcctggatctggcaaagagaatacaaatgaaaccccttctttctctttccgtccaacaactctgtagagctctctgcacccttacccctttccaccttttgtatttaattttaaagtcagtgtactgcaaggaagctggatgcaagatagatactatattaaactgtactgttatttaagatgtaataaagcagtttgacatgaggg

SEQ ID NO: 13026 - DNA, 6706 bp, Homo sapiens
  source 1..6706: mol_type = unassigned DNA
catgcgccgggtcgtacacggcggccgcgcgcacgctgggggcgtggctgcgcgatgtaatcggtctctggacgctgcgcggcgctcctaggagcaggcgttcccgactccggcaagagggtggcgcctggactctcgccctcagagggaggcccgtcccacggtctgtggctacggatcccaggaccctcttcgcgggcgattcgcgtagcctcaggtaactgcatcctgcccagcatgacggccccctgcccgccgccacctccagacccccagtttgtcctccgaggcacccagtcaccggtgcatgcgctgcacttctgcgaaggagcccaggctcaggggcgcccgctcctcttctcagggtctcagagtggcctggtacacatctggagcctgcagacgcggagagcggttaccaccctggatggccacggcggccagtgtgtgacctggctgcagacgctgccccaggggcgccagctcctcagtcagggccgggacctgaagctgtgcctgtgggacctcgcggagggcaggagcgctgtcgtggactccgtgtgcttggagagtgtgggcttctgccggagcagcatcctggccgggggccagccacgctggacgcttgccgtgccagggaggggcagcgacgaggttcagattctggagatgccctccaagacgtcagtgtgcgccctgaagccgaaggcagatgccaagctgggcatgcccatgtgcctgcggctgtggcaggccgactgcagctcccgcccactccttctggccggctatgaggatggatcggtggtcctgtgggacgtctctgagcagaaggtgtgcagccgcatcgcctgccatgaggagcccgtcatggaccttgactttgactcccagaaggccaggggcatctcaggctccgcggggaaggcgctggctgtctggagcctggactggcagcaggccctgcaggtgcgtgggactcatgaactcaccaatcccgggatcgccgaggtcacgatccggccagatcgcaagatcctggccaccgcaggctgggaccaccgcatccgcgtgttccactggcggacgatgcagccactggccgtgctggccttccacagcgccgctgtccagtgcgtggccttcaccgccgatggcttgctggccgcgggctccaaggatcagcggatcagcctctggtcactctacccacgcgcatgactcacccactcccttcccgggagacgaggagggcgggcagggaggtgggcatcaggccccagccttggcctgaaacctcaagggcctctgaggaccagcaagtcatggcccaaggaccatggagtccccgctgtcttcatgaggttggtatttccttttgtggagtgcctcatcacaggacggtgactctgggggccagccagagccctggccgtccgaggcctgcaggagacgttggcttgggcctgctgtgttgccagctgagggtattttataataaatttccattgccaagttgcaggcttgaggtgggagctccctgaggaggccctggtcccccacttagcatcagtgccctcagacccccaccaggcaggatgctcagccccaccctcacacctgctgttgaatgggccaccccgagtgtgggtttcctgggccaggcctcaggagatgataggccccaaccatagctgcgtcgatgtccacatgacccctcaccccgaggaggccaggagctcccaacacacaggttgaggccaggatcaggatcaggaagtaactgaactccctaaagagtgaagcagagaaaggtgcctgtgagggacggcaaggggggcttgcagcgcacagggccaggccagatgtgggatccgggagggcacgcctgcccgcagagggtgcagtggggaaggcgcacagggtgcacctccaggtgagtgctgggcagaaggcacgagagcagcaagggagtgtgacaagcaccgcctcacagtggccaaggccacagtcacagctgcggctgcacacagggtggcccccagggcacaacacagcaagagcaggacttagcagccagagcctcacactgcatgcagccgggcccagcctggccggtcgtctcctcctaaaagcgggtgttgattgggaaagaaccatgaccctgaatattggagtggggcccatgggcagatccagagaagctgggaccacacacgcctgtgtctgcccggattgccggaagagcccctctagctgaaggcccggggtggcctcccttgaggcagttgccctgcaaggccctgccgatgctccttgggacccccacctgggcttctagtcctagaactagactcgagtccagcagacccccaggatgagatacagagggtgaccctgagagtggcaccagcctcctgcaggaccacatggcatttccaggtttccaggcagaaatctgaacatgtgtgggacggatcggaagggtgtgggatccaggtggccggagcaggggtggatcaggggagttcccggaacagacctgccaaacggagggctggactgggcgctgcagcttggggccaggaaggctccagtgccgggctgggggtgggggctggattacagcctgagggtggctgcactgagtgaagtggacatggccagccgccgtggggtacagccgaggagggcttccaaggcctggggatgggggtgttggatttgtcagtgagacctgtgcacccactgcagggggtcccaaggccgtgcctccccaaccccactgtgaggaacatggttgctggggggcccggagtccttgaggagtcctgtgaccacacttctctgttggtcagaggtaccatggggaccgttccatcaaacgggaatgtcagtgctggccgggaaagcggcccctggcccaagcttggagaccacctggctcgggtactggcctggctccgttggacaagggtggccaccaggtgcccaggacctttggagaggggggccctgctgcttttcctcgagtgtcctatagccgccaggatgcgtagggcactccgggaggtattttcatatcactgaggtgtcagggaggggaagggtcctgggtttaggctgcagtgactgcaggtgctgagggagctgtgccctgggtgctcatcacaggctgtcacagtgagggaaggtgtcaggttctgacatccccatgacagcggcagggtaggtggagtgggaattggctttgcagtttccctgcatgcccttgacagccttgccaaaggcacatctgccccgcctcagctcccaccctgagggttctgggcctctaccccttcccctgtttatgtccctgtcatctttggcatcatcactgtagttacaaaactccctacgtcccacagccacgaggtgggtatcccacatgagggcccaggtgtgcatgccagcatgaggttggcgagtggcactgcctgctgatgtcttacatagaggccatgaagagctgtgggcagggtgtacagaccctgagttggcccctggccctcgtgctttcagtcaaaggcacaagcagggtggatggcaggcggctgccccctagcctggccttgagctccctgccccaggccatgtggcgttgagcagtgtccaggcacatcttgttctgaatctcagtgtgcagggatggagtcgggacagcgtgagtcctgcatgcctaacacagccctcacccctccagtgcacaacggggccacgtgcccgcatctgggtggctaggcagatagggccccccttgccaggcagatccagcttctgaggccttatagacgtcctgtggagggcaggcccaggactttcattcacctggctgagctgcctgggagagcagcagaaccggtgctggggtccaagccggccaagagcagtgcagccctcctggtcctgttcctctcttgagctgctccgtggtgtccacagcagagccatgtggctctggacaggtcggcctttgtgtcaacagaacctgggtcgtgatgaatcaccatgcgtctgaccagccttgaaacccccacaacagaagaagaaacggtctcagctccagacatccagcttggaaaagatgcacctgaacattggcattctcttcctagcaaacagccacttcctgtaggctggcaggaacgccaacagagccagcagtgaaggcattaagtggggaggaggggtggcccggaggcagcacgcgaaggtcagcatgcagctcctgggatgaacctgagaggcgactcctggcagcatggctggtcgctgccatcacgcccctggccaacccaccaactgggagaggcagcccttccacatcttcctccataatgctcttgggtagcagtgaggcctctcaagccagagagaacttggtgtttggaaacaacggcggacatttcttgccattttcagtgccaactcaggtaggtgtgttctaccatcctgtgtttttggggtgtttttttttttgagtcagagtctcactctgtcccccaggctggagtgcaatggagcagtctcggctcactgcaacctctgattcccaggttcaagcgattctcctgcctcagcctcccgagaagctcaggaccacccacataggtgcaggccatcatgcccagctaattttttatttttttttatagagaaggagtctcgctatgttgcccaggctggtttcgaactcctgggctcaagcgatcgatcctcccgcctctagcctcccaaagcactagaattataggcctgagccactgcgcccggcccaccatcctgttcttattggaagaatttccatgtgtcgaggcacgggcacaacgtagctggtcctctgctcagggccccacaaggctgcgtcagggtggcagcgcggctgggggctttttctgttcaaatccagattctcgtggctgtgagccccagccctgggcactgtccgcctggtggtgtcttcacagccagcaggggtggccttggggtgttctgtggagtaactttcacggcccagagtgggatcctgagtggctggagccgtatgctccagcatccccagccgctgcctccggtgcaggtggagtgggcccctctgattaccaggagctgtcagaggggcagcaggtcccactccactggccggtgggcagctgtgtgcagggacgcgggtcctggcacgtctgcctggtgaggccctgcctccagtgccaaggggcctcccctctcgacggtgggcgccaccatgtgctgacctctgtgcagccccactttacaaggtaggttcggccagcaccccatccgcgggcgggcagcactcacccagcgttgcgccgccaacagggtccctcttagacaagcagctgtgcctagagccttttccttcctccctgcgtgttacctgcaggccaacagacggccctgggtctgggaccaggagaacctgcctccgcctctggcagtgggtgtccctgcaggcagattgggcttggcacgtagacaccgaggggtcagccgatgccgggagatgatcccgggaagggctccggagcacagcccaggacccgccgccgctgctgggcgctccatgttgacgtgctgtgcgtgtctccactccccaggcaatgatgttcaatcaggtgtttcccacctgtgtctctgccaagaagccacagaacaccctctgcacaaaaggagtgtttgcacaaagaaaaacaaccctccgggggttctttagaaatgcttatactcaattagctagaacttcatgtgaaatcccagcgtggaagacaacaagccggcaccggtgaaaactttgctgtgcacctgccctctaccaagctgccagccccaccagccctgtggtcctaggtgggcacagctgctgcacggtcccccaggcctgcctctcctcggggtctcaaccttcataccagatttgccagcatccccattcccgccttgtgggtggagagtccttgagaccctctgtcactctgtcagcttccccaggtcagcgagctgtggcttggctcccacgcatcagcttttatgggaggcccattaggagctgggcaggagggacagaggggaggccaggcagccactgctgagtgggacgggtagcccagcccatgaggctggccagccctacaggggaggtcccacagcactggccgggaagtccacataggaaagcatcagttgagggatgaagccacggacgatggggacaacggccacagggtgtgctaagctgaggaaattagtaggaggtgctcataagctgttttgttttttggtttgtttgtttgttttttcttttaagagaccagggacagtgggggtctcactctgtcacccaggctggagtgcagtggcatgatcatagcttactgcagcctccaactaataggctcaagtgatcctcctgcctcagcctcccgagtaactcatggcctttaagtgaactgcttccaccatccagctgtgcaggtggcctgggaacagcagcacatctgtcccctgccacctcttgcatgcacacttgacctcctgacttgggctctgaaacctgtaaaatgtggggtgtagagaaatcgagtcatttggcctcatcctggtgccattatctcttgctacattaataaaccacctcaaacag

SEQ ID NO: 13027 - DNA, 1699 bp, Homo sapiens
  source 1..1699: mol_type = unassigned DNA
ggcgttcccgactccggcaagagggtcagtgtggaggcgggagcccgggcggccggcttgaactccgtgcacgcgggcctggagctgcgcccctgcgtcttttcccgacttctgatccgcagaggggcactcggagccccagcctgggtcgcagtgccttcggtctgcgggcctcagtttctcggtccgcgccgggggtttgtgggggcacctggagacatttgggccgttctcgcagtctcgggaagccgcgcccgctccttgcctggcctcacggcggccgatctcgttctccactttctaggtggcgcctggactctcgccctcagagggaggcccgtcccacggtctgtggctacggatcccaggaccctcttcgcgggcgattcgcgtagcctcaggtaactgcatcctgcccagcatgacggccccctgcccgccgccacctccagacccccagtttgtcctccgaggcacccagtcaccggtgcatgcgctgcacttctgcgaaggagcccaggctcaggggcgcccgctcctcttctcagggtctcagagtggcctggtacacatctggagcctgcagacgcggagagcggttaccaccctggatggccacggcggccagtgtgtgacctggctgcagacgctgccccaggggcgccagctcctcagtcagggccgggacctgaagctgtgcctgtgggacctcgcggagggcaggagcgctgtcgtggactccgtgtgcttggagagtgtgggcttctgccggagcagcatcctggccgggggccagccacgctggacgcttgccgtgccagggaggggcagcgacgaggttcagattctggagatgccctccaagacgtcagtgtgcgccctgaagccgaaggcagatgccaagctgggcatgcccatgtgcctgcggctgtggcaggccgactgcagctcccgcccactccttctggccggctatgaggatggatcggtggtcctgtgggacgtctctgagcagaaggtgtgcagccgcatcgcctgccatgaggagcccgtcatggaccttgactttgactcccagaaggccaggggcatctcaggctccgcggggaaggcgctggctgtctggagcctggactggcagcaggccctgcaggtgcgtgggactcatgaactcaccaatcccgggatcgccgaggtcacgatccggccagatcgcaagatcctggccaccgcaggctgggaccaccgcatccgcgtgttccactggcggacgatgcagccactggccgtgctggccttccacagcgccgctgtccagtgcgtggccttcaccgccgatggcttgctggccgcgggctccaaggatcagcggatcagcctctggtcactctacccacgcgcatgactcacccactcccttcccgggagacgaggagggcgggcagggaggtgggcatcaggccccagccttggcctgaaacctcaagggcctctgaggaccagcaagtcatggcccaaggaccatggagtccccgctgtcttcatgaggttggtatttccttttgtggagtgcctcatcacaggacggtgactctgggggccagccagagccctggccgtccgaggcctgcaggagacgttggcttgggcctgctgtgttgccagctgagggtattttataataaatttccattgccaa

SEQ ID NO: 13028 - DNA, 1076 bp, Homo sapiens
  source 1..1076: mol_type = unassigned DNA
catgcgccgggtcgtacacggcggccgcgcgcacgctgggggcgtggctgcgcgatgtaatcggtctctggacgctgcgcggcgctcctaggagcaggcgttcccgactccggcaagagggtggcgcctggactctcgccctcagagggaggcccgtcccacggtctgtggctacggatcccaggaccctcttcgcgggcgattcgcgtagcctcaggtaactgcatcctgcccagcatgacggccccctgcccgccgccacctccagacccccagtttgtcctccgaggcacccagtcaccggtgcatgcgctgcacttctgcgaaggagcccaggctcaggggcgcccgctcctcttctcagggtctcagagtggcctggtacacatctggagcctgcagacgcggagagcggttaccaccctggatggccacggcggccagtgtgtgacctggctgcagacgctgccccaggggcgccagctcctcagtcagggccgggacctgaagctgtgcctgtgggacctcgcggagggcaggagcgctgtcgtggactccgtgtgcttggagagtgtgggcttctgccggagcagcatcctggccgggggccagccacgctggacgcttgccgtgccagggaggggcagcgacgaggttcagattctggagatgccctccaagacgtcagtgtgcgccctgaagccgaaggcagatgccaagctgggcatgcccatgtgcctgcggctgtggcaggccgactgcagctcccgcccactccttctggccggctatgaggatggatcggtggtcctgtgggacgtctctgagcagaaggtgtgcagccgcatcgcctgccatgaggagcccggcctctgaggaccagcaagtcatggcccaaggaccatggagtccccgctgtcttcatgaggttggtatttccttttgtggagtgcctcatcacaggacggtgactctgggggccagccagagccctggccgtccgaggcctgcaggagacgttggcttgggcctgctgtgttgccagctgagggtattttataataaatttccattgc

SEQ ID NO: 13029 - DNA, 1878 bp, Homo sapiens
  source 1..1878: mol_type = unassigned DNA
tccagtcccagaggggggatgtcttactcctttccgtgaagcaaaccctttgagtacggtttgcgtccacaaagcgtagggtgagaaccttgggagcgactgggcccgtctttgctccctcggtggggttttgtctcctggcttcccccaagtgcgaggcagttggtctcgcccagccgggtcctgggcgcggcggcggcagccgcgtcactggcgggcgggatccctccgctctggggaggcagcgctggcggcggggctggggccactgaggaaatccatccgcgccgccgccgccgccgccgccgccgccgccgccgcctccgccgcggaggaagacagcgccgcccgcgcaccgccagcgacctccgccgcagagtcccaccgccacaggcctcgggccagcggccaggagctgcctcccccagcccccgtcccgcggcccccagccgcccccaaccctgccccacgggcccggcgccatgagtgagctggagcaactgagacaggaggccgagcagctccggaaccagatccgggatgcccgaaaagcatgtggggactcaacactgacccagatcacagctgggctggacccagtggggagaatccagatgaggacccggaggaccctccgtgggcacctggcaaagatctatgccatgcactgggggaccgactcaaggctgctggtcagcgcctcccaggatgggaagctcatcatctgggacagctacaccaccaacaaggtccacgccatcccgctgcgctcctcctgggtaatgacctgtgcctacgcgccctcagggaactttgtggcctgtggggggttggacaacatctgctccatctacagcctcaagacccgcgagggcaacgtcagggtcagccgggagctgcctggccacactgggtacctgtcgtgttgccgcttcctggatgacaaccaaatcatcaccagctctggggataccacctgtgccctgtgggacattgagacaggccagcagacagtgggttttgctggacacagtggggatgtgatgtccctgtccctggcccccgatggccgcacgtttgtgtcaggcgcctgtgatgcctctatcaagctgtgggacgtgcgggattccatgtgccgacagaccttcatcggccatgaatccgacatcaatgcagtggctttcttccccaacggctacgccttcaccaccggctctgacgacgccacgtgccgcctcttcgacctgcgggccgatcaggagctcctcatgtactcccatgacaacatcatctgtggcatcacctctgttgccttctcgcgcagcggacggctgctgctcgctggctacgacgacttcaactgcaacatctgggatgccatgaagggcgaccgtgcaggagtcctcgctggccacgacaaccgcgtgagctgcctcggggtcaccgacgatggcatggctgtggccacgggctcctgggactccttcctcaagatctggaactaatggccccacccccactgggcccaggccaggaggggccctgcccatgcccacactacaggccagggctgcggggctggcgcaatcccagcccccttccccgggccacggggccttgggtccctgccctcccacccaggtttggttcctcccggggcccccactgtggagataagaaggggatggaatgggggaagaggaggagcaggaggccctcatccttctgctgccctggggttggggcctcacccctctggagggccggaggcaggaggtggaaaccccaggggctggcttttttaaaactggttttattttaatttttattatattttcagtttttccataaaggagccaattccaactctgtacctgg

SEQ ID NO: 13030 - DNA, 1524 bp, Homo sapiens
  source 1..1524: mol_type = unassigned DNA
cggcggcctcgggcctgacgtcagccctgcatcccccaggcctcgggccagcggccaggagctgcctcccccagcccccgtcccgcggcccccagccgcccccaaccctgccccacgggcccggcgccatgagtgagctggagcaactgagacaggaggccgagcagctccggaaccagatccgggatgcccgaaaagcatgtggggactcaacactgacccagatcacagctgggctggacccagtggggagaatccagatgaggacccggaggaccctccgtgggcacctggcaaagatctatgccatgcactgggggaccgactcaaggctgctggtcagcgcctcccaggatgggaagctcatcatctgggacagctacaccaccaacaaggtccacgccatcccgctgcgctcctcctgggtaatgacctgtgcctacgcgccctcagggaactttgtggcctgtggggggttggacaacatctgctccatctacagcctcaagacccgcgagggcaacgtcagggtcagccgggagctgcctggccacactgggtacctgtcgtgttgccgcttcctggatgacaaccaaatcatcaccagctctggggataccacctgtgccctgtgggacattgagacaggccagcagacagtgggttttgctggacacagtggggatgtgatgtccctgtccctggcccccgatggccgcacgtttgtgtcaggcgcctgtgatgcctctatcaagctgtgggacgtgcgggattccatgtgccgacagaccttcatcggccatgaatccgacatcaatgcagtggctttcttccccaacggctacgccttcaccaccggctctgacgacgccacgtgccgcctcttcgacctgcgggccgatcaggagctcctcatgtactcccatgacaacatcatctgtggcatcacctctgttgccttctcgcgcagcggacggctgctgctcgctggctacgacgacttcaactgcaacatctgggatgccatgaagggcgaccgtgcaggagtcctcgctggccacgacaaccgcgtgagctgcctcggggtcaccgacgatggcatggctgtggccacgggctcctgggactccttcctcaagatctggaactaatggccccacccccactgggcccaggccaggaggggccctgcccatgcccacactacaggccagggctgcggggctggcgcaatcccagcccccttccccgggccacggggccttgggtccctgccctcccacccaggtttggttcctcccggggcccccactgtggagataagaaggggatggaatgggggaagaggaggagcaggaggccctcatccttctgctgccctggggttggggcctcacccctctggagggccggaggcaggaggtggaaaccccaggggctggcttttttaaaactggttttattttaatttttattatattttcagtttttccataaaggagccaattccaactctgtacctgg

SEQ ID NO: 13031 - DNA, 1641 bp, Homo sapiens
  source 1..1641: mol_type = unassigned DNA
ctcgagagcggctcccacgggctttctgcgggcgcggcggggcgggcggtccctgcgctggagggagcagcggctcggggctgccttccccgccgctgtcacccccacccgcggcggacggctaatggggcgcagccggaccggggattatccggggcctcgggccagcggccaggagctgcctcccccagcccccgtcccgcggcccccagccgcccccaaccctgccccacgggcccggcgccatgagtgagctggagcaactgagacaggaggccgagcagctccggaaccagatccgggatgcccgaaaagcatgtggggactcaacactgacccagatcacagctgggctggacccagtggggagaatccagatgaggacccggaggaccctccgtgggcacctggcaaagatctatgccatgcactgggggaccgactcaaggctgctggtcagcgcctcccaggatgggaagctcatcatctgggacagctacaccaccaacaaggtccacgccatcccgctgcgctcctcctgggtaatgacctgtgcctacgcgccctcagggaactttgtggcctgtggggggttggacaacatctgctccatctacagcctcaagacccgcgagggcaacgtcagggtcagccgggagctgcctggccacactgggtacctgtcgtgttgccgcttcctggatgacaaccaaatcatcaccagctctggggataccacctgtgccctgtgggacattgagacaggccagcagacagtgggttttgctggacacagtggggatgtgatgtccctgtccctggcccccgatggccgcacgtttgtgtcaggcgcctgtgatgcctctatcaagctgtgggacgtgcgggattccatgtgccgacagaccttcatcggccatgaatccgacatcaatgcagtggctttcttccccaacggctacgccttcaccaccggctctgacgacgccacgtgccgcctcttcgacctgcgggccgatcaggagctcctcatgtactcccatgacaacatcatctgtggcatcacctctgttgccttctcgcgcagcggacggctgctgctcgctggctacgacgacttcaactgcaacatctgggatgccatgaagggcgaccgtgcaggagtcctcgctggccacgacaaccgcgtgagctgcctcggggtcaccgacgatggcatggctgtggccacgggctcctgggactccttcctcaagatctggaactaatggccccacccccactgggcccaggccaggaggggccctgcccatgcccacactacaggccagggctgcggggctggcgcaatcccagcccccttccccgggccacggggccttgggtccctgccctcccacccaggtttggttcctcccggggcccccactgtggagataagaaggggatggaatgggggaagaggaggagcaggaggccctcatccttctgctgccctggggttggggcctcacccctctggagggccggaggcaggaggtggaaaccccaggggctggcttttttaaaactggttttattttaatttttattatattttcagtttttccataaaggagccaattccaactctgtacctgg

SEQ ID NO: 13032 - DNA, 545 bp, Homo sapiens
  source 1..545: mol_type = unassigned DNA
ctttctccccacttccccggcggcctcgggcctgacgtcagccctgcatcccccagccgcccccaaccctgccccacgggcccggcgccatgagtgagctggagcaactgagacaggaggccgagcagctccggaaccagatccgggatgcccgaaaagcatgtggggactcaacactgacccagatcacagctgggctggacccagtggggagaatccagatgaggacccggaggaccctccgtgggcacctggcaaagatctatgccatgcactgggggaccgactcaaggctgctggtcagcgcctcccaggatgggaagctcatcatctgggacagctacaccaccaacaaggtccacgccatcccgctgcgctcctcctgggtaatgacctgtgcctacgcgccctcagggaactttgtggcctgtggggggttggacaacatctgctccatctacagcctcaagacccgcgagggcaacgtcagggtcagccgggagctgcctggccacactgggtacctgtcgtgttgccgcttcctg

SEQ ID NO: 13033 - DNA, 1285 bp, Homo sapiens
  source 1..1285: mol_type = unassigned DNA
gccgccgccgccgccgccgccgccgccgcctccgccgcggaggaagacagcgccgcccgcgcaccgccagcgacctccgccgcagagtcccaccgccacaggctgctggtcagcgcctcccaggatgggaagctcatcatctgggacagctacaccaccaacaaggtccacgccatcccgctgcgctcctcctgggtaatgacctgtgcctacgcgccctcagggaactttgtggcctgtggggggttggacaacatctgctccatctacagcctcaagacccgcgagggcaacgtcagggtcagccgggagctgcctggccacactgggtacctgtcgtgttgccgcttcctggatgacaaccaaatcatcaccagctctggggataccacctgtgccctgtgggacattgagacaggccagcagacagtgggttttgctggacacagtggggatgtgatgtccctgtccctggcccccgatggccgcacgtttgtgtcaggcgcctgtgatgcctctatcaagctgtgggacgtgcgggattccatgtgccgacagaccttcatcggccatgaatccgacatcaatgcagtggctttcttccccaacggctacgccttcaccaccggctctgacgacgccacgtgccgcctcttcgacctgcgggccgatcaggagctcctcatgtactcccatgacaacatcatctgtggcatcacctctgttgccttctcgcgcagcggacggctgctgctcgctggctacgacgacttcaactgcaacatctgggatgccatgaagggcgaccgtgcaggagtcctcgctggccacgacaaccgcgtgagctgcctcggggtcaccgacgatggcatggctgtggccacgggctcctgggactccttcctcaagatctggaactaatggccccacccccactgggcccaggccaggaggggccctgcccatgcccacactacaggccagggctgcggggctggcgcaatcccagcccccttccccgggccacggggccttgggtccctgccctcccacccaggtttggttcctcccggggcccccactgtggagataagaaggggatggaatgggggaagaggaggagcaggaggccctcatccttctgctgccctggggttggggcctcacccctctggagggccggaggcaggaggtggaaaccccaggggctggcttttttaaaactggttttattttaatttttattatattttcagtttttccataaaggagccaattccaactc

SEQ ID NO: 13034 - DNA, 1478 bp, Homo sapiens
  source 1..1478: mol_type = unassigned DNA
cgggatccctccgctctggggaggcagcgctggcggcggggctggggccactgaggaaatccatccgcgccgccgccgccgccgccgccgccgccgccgccgcctccgccgcggaggaagacagcgccgcccgcgcaccgccagcgacctccgccgcagagtcccaccgccacaggatgcccgaaaagcatgtggggactcaacactgacccagatcacagctgggctggacccagtggggagaatccagatgaggacccggaggaccctccgtgggcacctggcaaagatctatgccatgcactgggggaccgactcaaggctgctggtcagcgcctcccaggatgggaagctcatcatctgggacagctacaccaccaacaaggtccacgccatcccgctgcgctcctcctgggtaatgacctgtgcctacgcgccctcagggaactttgtggcctgtggggggttggacaacatctgctccatctacagcctcaagacccgcgagggcaacgtcagggtcagccgggagctgcctggccacactgggtacctgtcgtgttgccgcttcctggatgacaaccaaatcatcaccagctctggggataccacctgtgccctgtgggacattgagacaggccagcagacagtgggttttgctggacacagtggggatgtgatgtccctgtccctggcccccgatggccgcacgtttgtgtcaggcgcctgtgatgcctctatcaagctgtgggacgtgcgggattccatgtgccgacagaccttcatcggccatgaatccgacatcaatgcagtggctttcttccccaacggctacgccttcaccaccggctctgacgacgccacgtgccgcctcttcgacctgcgggccgatcaggagctcctcatgtactcccatgacaacatcatctgtggcatcacctctgttgccttctcgcgcagcggacggctgctgctcgctggctacgacgacttcaactgcaacatctgggatgccatgaagggcgaccgtgcaggagtcctcgctggccacgacaaccgcgtgagctgcctcggggtcaccgacgatggcatggctgtggccacgggctcctgggactccttcctcaagatctggaactaatggccccacccccactgggcccaggccaggaggggccctgcccatgcccacactacaggccagggctgcggggctggcgcaatcccagcccccttccccgggccacggggccttgggtccctgccctcccacccaggtttggttcctcccggggcccccactgtggagataagaaggggatggaatgggggaagaggaggagcaggaggccctcatccttctgctgccctggggttggggcctcacccctctggagggccggaggcaggaggtggaaaccccaggggctggcttttttaaaactggttttattttaatttttattatattttcagtt

SEQ ID NO: 13035 - DNA, 1146 bp, Homo sapiens
  source 1..1146: mol_type = unassigned DNA
cccgcgcaccgccagcgacctccgccgcagagtcccaccgccacaggtccacgccatcccgctgcgctcctcctgggtaatgacctgtgcctacgcgccctcagggaactttgtggcctgtggggggttggacaacatctgctccatctacagcctcaagacccgcgagggcaacgtcagggtcagccgggagctgcctggccacactgggtacctgtcgtgttgccgcttcctggatgacaaccaaatcatcaccagctctggggataccacctgtgccctgtgggacattgagacaggccagcagacagtgggttttgctggacacagtggggatgtgatgtccctgtccctggcccccgatggccgcacgtttgtgtcaggcgcctgtgatgcctctatcaagctgtgggacgtgcgggattccatgtgccgacagaccttcatcggccatgaatccgacatcaatgcagtggctttcttccccaacggctacgccttcaccaccggctctgacgacgccacgtgccgcctcttcgacctgcgggccgatcaggagctcctcatgtactcccatgacaacatcatctgtggcatcacctctgttgccttctcgcgcagcggacggctgctgctcgctggctacgacgacttcaactgcaacatctgggatgccatgaagggcgaccgtgcaggagtcctcgctggccacgacaaccgcgtgagctgcctcggggtcaccgacgatggcatggctgtggccacgggctcctgggactccttcctcaagatctggaactaatggccccacccccactgggcccaggccaggaggggccctgcccatgcccacactacaggccagggctgcggggctggcgcaatcccagcccccttccccgggccacggggccttgggtccctgccctcccacccaggtttggttcctcccggggcccccactgtggagataagaaggggatggaatgggggaagaggaggagcaggaggccctcatccttctgctgccctggggttggggcctcacccctctggagggccggaggcaggaggtggaaaccccaggggctggcttttttaaaactggttttattttaatttttattatattttcagtttttccat

SEQ ID NO: 13036 - DNA, 910 bp, Homo sapiens
  source 1..910: mol_type = unassigned DNA
accatcgaagctgggggtgtgtgtggagggtgtgcgccttgtggggtgaatttcaagaggcaccgccccttttaaaattaggtgcttggagggcggtgcctgtgcgggctggggcagaagccaggcctcgggccagcggccaggagctgcctcccccagcccccgtcccgcggcccccagccgcccccaaccctgccccacgggcccggcgccatgagtgagctggagcaactgagacaggaggccgagcagctccggaaccagatccgggatgcccgaaaagcatgtggggactcaacactgacccagatcacagctgggctggacccagtggggagaatccagatgaggacccggaggaccctccgtgggcacctggcaaagatctatgccatgcactgggggaccgactcaaggctgctggtcagcgcctcccaggatgggaagctcatcatctgggacagctacaccaccaacaaggtccacgccatcccgctgcgctcctcctgggtaatgacctgtgcctacgcgccctcagggaactttgtggcctgtggggggttggacaacatctgctccatctacagcctcaagacccgcgagggcaacgtcagggtcagccgggagctgcctggccacactgggtacctgtcgtgttgccgcttcctggatgacaaccaaatcatcaccagctctggggataccacctgtgccctgtgggacattgagacaggccagcagacagtgggttttgctggacacagtggggatgtgatgtccctgtccctggcccccgatggccgcacgtttgtgtcaggcgcctgtgatgcctctatcaagctgtgggacgtgcgggattccatgtgccgacagaccttcatcggccatgaatccgacatcaatgcagtgg

SEQ ID NO: 13037 - DNA, 1479 bp, Homo sapiens
  source 1..1479: mol_type = unassigned DNA
cgggcgggatccctccgctctggggaggcagcgctggcggcggggctggggccactgaggaaatccatccgcgccgccgccgccgccgccgccgccgccgccgccgcctccgccgcggaggaagacagcgccgcccgcgcaccgccagcgacctccgccgcagagtcccaccgccacagcatgtggggactcaacactgacccagatcacagctgggctggacccagtggggagaatccagatgaggacccggaggaccctccgtgggcacctggcaaagatctatgccatgcactgggggaccgactcaaggctgctggtcagcgcctcccaggatgggaagctcatcatctgggacagctacaccaccaacaaggtccacgccatcccgctgcgctcctcctgggtaatgacctgtgcctacgcgccctcagggaactttgtggcctgtggggggttggacaacatctgctccatctacagcctcaagacccgcgagggcaacgtcagggtcagccgggagctgcctggccacactgggtacctgtcgtgttgccgcttcctggatgacaaccaaatcatcaccagctctggggataccacctgtgccctgtgggacattgagacaggccagcagacagtgggttttgctggacacagtggggatgtgatgtccctgtccctggcccccgatggccgcacgtttgtgtcaggcgcctgtgatgcctctatcaagctgtgggacgtgcgggattccatgtgccgacagaccttcatcggccatgaatccgacatcaatgcagtggctttcttccccaacggctacgccttcaccaccggctctgacgacgccacgtgccgcctcttcgacctgcgggccgatcaggagctcctcatgtactcccatgacaacatcatctgtggcatcacctctgttgccttctcgcgcagcggacggctgctgctcgctggctacgacgacttcaactgcaacatctgggatgccatgaagggcgaccgtgcaggagtcctcgctggccacgacaaccgcgtgagctgcctcggggtcaccgacgatggcatggctgtggccacgggctcctgggactccttcctcaagatctggaactaatggccccacccccactgggcccaggccaggaggggccctgcccatgcccacactacaggccagggctgcggggctggcgcaatcccagcccccttccccgggccacggggccttgggtccctgccctcccacccaggtttggttcctcccggggcccccactgtggagataagaaggggatggaatgggggaagaggaggagcaggaggccctcatccttctgctgccctggggttggggcctcacccctctggagggccggaggcaggaggtggaaaccccaggggctggcttttttaaaactggttttattttaatttttattatattttcagtttttccataaa

SEQ ID NO: 13038 - DNA, 887 bp, Homo sapiens
  source 1..887: mol_type = unassigned DNA
tgaagcaaaccctttgagtacggtttgcgtccacaaagcgtagggcctcgggccagcggccaggagctgcctcccccagcccccgtcccgcggcccccagccgcccccaaccctgccccacgggcccggcgccatgagtgagctggagcaactgagacaggaggccgagcagctccggaaccagatccgggatgcccgaaaagcatgtggggactcaacactgacccagatcacagctgggctggacccagtggggagaatccagatgaggacccggaggaccctccgtgggcacctggcaaagatctatgccatgcactgggggaccgactcaaggctgctggtcagcgcctcccaggatgggaagctcatcatctgggacagctacaccaccaacaaggtccacgccatcccgctgcgctcctcctgggtaatgacctgtgcctacgcgccctcagggaactttgtggcctgtggggggttggacaacatctgctccatctacagcctcaagacccgcgagggcaacgtcagggtcagccgggagctgcctggccacactgggtacctgtcgtgttgccgcttcctggatgacaaccaaatcatcaccagctctggggataccacctgtgccctgtgggacattgagacaggccagcagacagtgggttttgctggacacagtggggatgtgatgtccctgtccctggcccccgatggccgcacgtttgtgtcaggcgcctgtgatgcctctatcaagctgtgggacgtgcgggattccatgtgccgacagaccttcatcggccatgaatccgacatcaatgcagtggctttcttccccaacggctacgccttcaccaccggctctgacgacgccacgtgccgcc

SEQ ID NO: 13039 - DNA, 1923 bp, Homo sapiens
  source 1..1923: mol_type = unassigned DNA
ccacaataggggcagacctgtccatccttctctgtgggtcccctgtacctttctcccccaacaggatcagacccagaggcagctggttggggtttgtcgagaagaaggattatccagatcagtcctttctaatctcagctcctgcctgtaccctcccatactcaccaaaccctcttccccaccaccctgagctgaggagcacagtttgaggcccccccaaccccccgccggtcggggccaggccaggccaggccagctcctctggcagcagagcctgggcaggtgacgggcgggcgcgggcgtcgcagctgagggagtaaggaggctcccaggaaccggagctggaaacccggccgaggtccagccagagcccaagagccagagtgacccctcgacctgtcagccatgggggagatggagcaactgcgtcaggaagcggagcagctcaagaagcagattgcagatgccaggaaagcctgtgctgacgttactctggcagagctggtgtctggcctagaggtggtgggacgagtccagatgcggacgcggcggacgttaaggggacacctggccaagatttacgccatgcactgggccactgattctaagctgctggtaagtgcctcgcaagatgggaagctgatcgtgtgggacagctacaccaccaacaaggtgcacgccatcccactgcgctcctcctgggtcatgacctgtgcctatgccccatcagggaactttgtggcatgtggggggctggacaacatgtgttccatctacaacctcaaatcccgtgagggcaatgtcaaggtcagccgggagctttctgctcacacaggttatctctcctgctgccgcttcctggatgacaacaatattgtgaccagctcgggggacaccacgtgtgccttgtgggacattgagactgggcagcagaagactgtatttgtgggacacacgggtgactgcatgagcctggctgtgtctcctgacttcaatctcttcatttcgggggcctgtgatgccagtgccaagctctgggatgtgcgagaggggacctgccgtcagactttcactggccacgagtcggacatcaacgccatctgtttcttccccaatggagaggccatctgcacgggctcggatgacgcttcctgccgcttgtttgacctgcgggcagaccaggagctgatctgcttctcccacgagagcatcatctgcggcatcacgtccgtggccttctccctcagtggccgcctactattcgctggctacgacgacttcaactgcaatgtctgggactccatgaagtctgagcgtgtgggcatcctctctggccacgataacagggtgagctgcctgggagtcacagctgacgggatggctgtggccacaggttcctgggacagcttcctcaaaatctggaactgaggaggctggagaaagggaagtggaaggcagtgaacacactcagcagccccctgcccgaccccatctcattcaggtgttctcttctatattccgggtgccattcccactaagctttctcctttgagggcagtggggagcatgggactgtgcctttgggaggcagcatcagggacacaggggcaaagaactgccccatctcctcccatggccttccctccccacagtcctcacagcctctcccttaatgagcaaggacaacctgcccctccccagccctttgcaggcccagcagacttgagtctgaggccccaggccctaggattcctcccccagagccactacctttgtccaggcctgggtggtatagggcgtttggccctgtgactatggctctggcaccactagggtcctggccctcttcttattcatgctttctcctttttctacctttttttctctcctaagacacctgcaataaagtgtagcaccctggta

SEQ ID NO: 13040 - DNA, 3321 bp, Homo sapiens
  source 1..3321: mol_type = unassigned DNA
ccccggcacgtccccgccgggcccgcgcgcctcgtgcctcgcgcctcgcgcctccagccacgtccccgccccggctccggcgcgccgcggagttggctgctgggaggtgcgggactgggtgtggccggcggctctggtctcggctgtgagctgcgctctccacgccggctccgcgctccaggggctgctgagcgcccagcggacaccggcagcgcgcggtcgacgcgggcctgagctccctccagctgttttcactcattagctcctgaggtaaacaaattgaaaaaatgagcgaactggaacagttgaggcaagaagcagaacaactgcggaatcagattcaggatgctcggaaagcatgtaatgatgcaacgcttgttcagattacatcaaatatggactctgtgggtcgaatacaaatgcgaacaagacgtacactgaggggccacctagctaaaatctatgctatgcattggggatacgattccaggctgctagtcagtgcttctcaagatggaaaattaattatttgggatagctatacaacaaataagatgcatgctattcctttgaggtcctcctgggtgatgacctgtgcttatgctccctctggtaattatgttgcctgtggaggcttggacaacatctgctctatatataacttaaagaccagagagggaaatgtgagagtaagccgagagttgccaggtcacacagggtacttgtcctgctgtcgttttttagatgacagccaaattgttacaagttcaggagatacaacttgtgctttatgggacatcgaaactgcccagcagaccaccacattcactgggcattctggagatgtgatgagtctttctttgagtcctgacatgaggacttttgtttctggtgcttgtgatgcctcttccaaattatgggatattcgagatggaatgtgtagacagtctttcacgggacatgtctcagatatcaatgctgtcagttttttcccaaatggatatgccttcgccactggctctgatgatgccacttgccggctctttgaccttcgtgcagatcaagagttattattgtattctcatgacaatatcatctgtggaatcacttctgtagccttctcaaaaagtgggcgtctcttgttggctggttacgatgactttaattgtaatgtatgggacacgctaaaaggagatcgtgcaggtgtccttgctggtcatgacaaccgtgtgagctgcttaggtgtaactgatgatggcatggctgtggcaacaggctcttgggacagttttcttagaatctggaattaacagtgtcatacatatttgttctccattgatatatctggagaaatcaatgctacagcctatagctgtgaaaaaattctaccttatatttgcaggtgaagatttttctattagattatctacaaaaacaagctttcagtaaactaccaaaaaaaaagtgggggtggaggaaaaaaggcaaaggcgccttctgagatcaaaaggaccagtgtattaatttgaggggttgggttattttaaccttggtgaattgttgtgtgtactcagagtgtattttctttgtgtagaacagaatgtacacattatagcagctcgccattgtgtttgcattttttaagaagtacatttttaactttgtatacacaagaaatgtcatatttttgagttttgtaatggaagaaccaggcacagaaacagacagaaatgatactgtatgtgtgtgtatttatgtctgaagaaagtccccttgaattctgatatctctttgaatctaagagatcctgatagcttcatgtttaagagcattgacaggtggggcacctctgaggggagttcattgtttctcatgcatcatttgccatatactattaatcaaagtgcttgctttcagtcctttgaggggacagataatctgaaggccagagattagagatttcactgatattttggacatacataagaaacatcattataattaataaaaagtaggtaatagcatataaatggttcttgacattttaaaagcctggttatgatcagttgacactttgagtacccccctaaatagctggactttccttttcatttcatatttggaactaagtttgtagcgtatactcatctttcagaagtttggtaaacattgggattgtccctgcatctgaacatctttcccagtgctatcagtatacatctagagaggaaatgcaatgtgacagtgttacatttggagagaagtgtgaaatctaaccaatcgctagcacatatttgttgtaatacggtggtttatttcatgtttgcatactataaaatctgaattgatgtgaaatatctgtgcctttaaatttcttaaacctttaagctttttgttctgttttgcaacattttgtagtatttcttcccttccttagcacaaaatactggtttctaagtggttttgcttcaaaggatgtctagatgtaagtgattccacttaaagccaaaataaaaattcctaaagcagttcttaaaggagttagagagctatattaaacagtttttctgtggtataataatgtgtctcttactagaagtcccccacgaccaagttaaagatacttttcctgttggattctcttttacaaataagtctaaatgactgataatagaagattgttagtcttgcttgatggtaaagtcttggattattctgatatatagacgtgcattgttttgtaacttagttacttttcagataggtctgtgttaacttttgaacatgtgtaacttaacctaaatactcccaaactttacctctaaatttttgtttttatgttgtgaatgtgctaatatgtgcatcaactgtaaagatgtatcagttttattaaaatcagttgacaattagaataataaagtggataaaggcaaattaagatataggaccaaaacagaatattgtagatggcagttatgaatgtatatttatattttgattaagatttctattaactttttggctgggcagagtggcttacacctataatcccagcaatttgggaggccaaggtgggcagatcacttgaggtcaggagttcgcgaccagcctacccaacatggtgaaaccccatctcttctaaaaatacaaacattagccgggcgtggtggcacattcctgtaatcccagctactcgggaggctgaggcaggagattcgcctgaacccgggaggcagaggttgcagtgagccgagattgtgccactgcactccagcctaggcgacagagtgagactccatctcaaattggaaaaaaaaaaaa

SEQ ID NO: 13041 - DNA, 1360 bp, Homo sapiens
  source 1..1360: mol_type = unassigned DNA
agctgccacgcgggaactggccccacgaccgccggcgcaggcacttcccgggcggtccagaccgctcgccccggggagcgaggaacggtcggcggtccaagtcctgcagacccccctggtttctcgtcactccccgaggcctccttccaggaactcagagcacgagcccctgttttcactcattagctcctgaggtaaacaaattgaaaaaatgagcgaactggaacagttgaggcaagaagcagaacaactgcggaatcagattcaggatgctcggaaagcatgtaatgatgcaacgcttgttcagattacatcaaatatggactctgtgggtcgaatacaaatgcgaacaagacgtacactgaggggccacctagctaaaatctatgctatgcattggggatacgattccaggctgctagtcagtgcttctcaagatggaaaattaattatttgggatagctatacaacaaataagatgcatgctattcctttgaggtcctcctgggtgatgacctgtgcttatgctccctctggtaattatgttgcctgtggaggcttggacaacatctgctctatatataacttaaagaccagagagggaaatgtgagagtaagccgagagttgccaggtcacacagggtacttgtcctgctgtcgttttttagatgacagccaaattgttacaagttcaggagatacaacttgtgctttatgggacatcgaaactgcccagcagaccaccacattcactgggcattctggagatgtgatgagtctttctttgagtcctgacatgaggacttttgtttctggtgcttgtgatgcctcttccaaattatgggatattcgagatggaatgtgtagacagtctttcacgggacatgtctcagatatcaatgctgtcagttttttcccaaatggatatgccttcgccactggctctgatgatgccacttgccggctctttgaccttcgtgcagatcaagagttattattgtattctcatgacaatatcatctgtggaatcacttctgtagccttctcaaaaagtgggcgtctcttgttggctggttacgatgactttaattgtaatgtatgggacacgctaaaaggagatcgtgcaggtgtccttgctggtcatgacaaccgtgtgagctgcttaggtgtaactgatgatggcatggctgtggcaacaggctcttgggacagttttcttagaatctggaattaacagtgtcatacatatttgttctccattgatatatctggagaaatcaatgctacagcctatagctgtgaaaaaattctaccttatatttgcaggtgaagatttttctattagattatctacaaaaac

SEQ ID NO: 13042 - DNA, 571 bp, Homo sapiens
  source 1..571: mol_type = unassigned DNA
ctgggtgtggccggcggctctggtctcggctgtgagctgcgctctccacgccggctccgcgctccaggggctgctgagcgcccagcggacaccggcagcgcgcggtcgacgcgggcctgagctccctccagagatggatacctgccatgtagcccaggctggtcttgaactcctggcctcaagtgatctgcccacctcagcctcccaaagtgctgggattatgggcatgagccactgcgcctggcctatcctgcctttgtgccaggcagtcctcctcatgtgtattacagctgttttcactcattagctcctgaggtaaacaaattgaaaaaatgagcgaactggaacagttgaggcaagaagcagaacaactgcggaatcagattcaggatgctcggaaagcatgtaatgatgcaacgcttgttcagattacatcaaatatggactctgtgggtcgaatacaaatgcgaacaagacgtacactgaggggccacctagctaaaatctatgctatgcattggggatacgattccaggctgctagtcagtgcttctcaagatggaaaattaat

SEQ ID NO: 13043 - DNA, 975 bp, Homo sapiens
  source 1..975: mol_type = unassigned DNA
cgctctcactcgcggtcgcctggccgttgtcattgtccctccgctgtcaccttttcaagccccaggctggctgcttcagaagcccctgaccccatggaggagtgggacgtgccacagatgaagaaagaggtggagagcctcaagtaccagctggccttccagcgggagatggcgtccaagaccatccccgagctgctgaagtggatcgaggacgggatccccaaggaccccttcctgaaccccgacctgatgaagaacaacccatgggtggaaaagggcaaatgcaccatcctgtgagccccgcacccggcccctctcacaccatcctgtgagaccacgcccggccccactcccaccatcttgtaagactgtgcccagccccactcactccatcctgtgagtcccactcccagccccactcccaccatcctgtgagcccatgcccggccccactcacaccaacctgtgagccccactcccggccccactcactccatcttgtaagactatgcccagccccattcactccatcctgtgagtcccactcccagccccactcccaccatcctgtgagccccacttccagccccactcccaccatcctgtgagccccactcccagccccactcccaccatcctgtgagccccactcccggccccactcactccatcctgtgagccccactcccagccccactcacaccaacctgtgagccccactcccggccccactcacaacatcttgtaagactgtgcccggccccattcactccatcctgtgagaccacgcccggccccactcactctatcctgtgagaccacgcctggccccactcccaccatcctgtgagccccactcctggccccactcacaccatcctatgagcccacgcccggccccactcccaccatcctgtgaaccccactccactcgcacgtgattacagtctgtaaaggtgtgactttataaagaca

SEQ ID NO: 13044 - DNA, 3729 bp, Homo sapiens
  source 1..3729: mol_type = unassigned DNA
aacaaagggagaagggggattaaagtcaaatcactgtcagcagcccaggagcagacaaaaccaccagagtaagccctgaaatggaaatgagagggaaaagaagcaagccgctaacagctaccaagaagaggaggaagtgggagatgcgctgcttcctgtagaaagaacgttgattgaagacaaagctgggtggggactagtccctgggctgcagccgctgctacacatactcacaacgctgccgccgcgctccgtgggcaactcctactactgctgggctgggctgggctgggctgggctgcgccggagctcgcctgcacagatcagctccggagaggggaaaaccacgctcctcggaccaagcctcgggagctaagtgtttctgaaagatctatccagcactccgatggccagcaacaacaccgccagcatagcacaagccaggaagctggtagagcagcttaagatggaagccaatatcgacaggataaaggtgtccaaggcagctgcagatttgatggcctactgtgaagcacatgccaaggaagaccccctcctgacccctgttccggcttcagaaaacccgtttagggagaagaagtttttctgtgccatcctttaagtctttgagaggggcctgaagagcctccgggctcctgggacattgatgtagagtttttagtgaagtgggcacctttctagtccacggcatttgaagagagcgaggagaaccattctggaaactctaggctatgcatgtttaaagatctggtcccctttatgagaatgcaagccgatccacatcctgacttaagagatctgattctgacgaactgcctggaggaggggaatatataaaaataaaattggtgtcacttcttttctgctatcccccagccccccccccaaaatcctcatgtttctgcttcatattttgaaaaataacaattaaaacagacagctgtactgaggtaagatatgtgtgaccttcttggaatgaatattgtctttagaataccctttgataagctgagctgtcccgtgtagatgcaattcggtttaatggcattgatgtatagtcactgtgcctttctttttctttcttccttctcctctacccctccttccacccctccccattagagtagtgtggagataaggctggactggtctatcagattgaactccaagaatgatcacacaaaatgtttagggagatgttccccgtggtgtatcctcatggtaacaacgacaaaaaatgccggttgtctgtgttctcttttcactattcctaacatgtgtacatgatagctttgattctgcaagtaaaagtaaatcctgtgttgtgactggtgctttcatatatttgtgacaatttttgagtaatattgcatgaaaatgtccctatgttacatccattcagaagttttgttgttttactctaaagctgggaaaggaaatgagagggaaaagaccccggagagggaagaaaatctcagtattttgaaaattgagattacttcagagccttagccacacctaaaatacctcctagttaatagtggtataaatgcctcttcaatacgttttccagaatccaaagcattttggtttatccaggacccagggcagcacagctgtcaccaagcaggagagttaaggattcaccatgagctgggaaatgcttttgccatgagtatgagcaaattccctctttccctgaatcatggacattctagattaaaagaacatttttttgtgctcttaacaagaaaaccatggccctcctttgttcaagtatcagaagaaataaacccacagctccagagaaggtgaccattctcagaactccagctattcactctccagggagaaggacctcaaatcgccactctttgggcggcaggtgcggtccccacggccggctctacgaggaagagttctggctcttttgtccactgagatggtcttggtttttcacttaacaaattttttaatggaatctttgtttttgttctccatcttgtttgttagagtctctcggcctttatttacaaattccttgcaactagagcgctccttccccaagatatggtagtgagagtaatttttcattgtagctgtagtctccatcagtaacagcaggccctggaagacttgatcacctttttctgtgtcattttcagtcaaagagggcctctcttacatcttgtttgctttcaaatccccaaatatcatctccatctcccaattaattttattgtctctttcctctctattcgctttctcctgttttttttttaaaaaaaaagcatgaaaaaggaagagaaaaagtttgatatgccaaggacagattttgaaacagacttggtaaatgttttccttagctccttcatgggcatgctggtgaaagaataaatacatccaattaaagctcatgctggggtcggggagaagaggatactgaaacatttgtgaaatgtatgaatgcacttctgtaaccagatacttctgttcttctgttcaaattgtggggtttttgttacagttaggacgcccatgaagatttaggggtgaaaaaaacagcagagtatttattaaactacagcattgtacaattagcttagtaacactatggaataagctaaaacatatcacagtttttacatgggccaaaacatgaattgagtatgtggtcacatgaaaacacggatgaatgaataaaacactctttggtggtgactgaggcatcattagaaggcccagacgatttccactattcacagcatttccttttctcagaaggactctttatatttccatgtaaatctagatctttggagcaattaagatggaattacaatttctagggagcattttaaggaaaatgttttggctttttcataattttatgtcttacagtatggaattataatacgaaaatctttatatgagttttggcttcttggtatttgtacttattcaggggaaaaagtctttcgattacttatgcctctatagagcttaatttcttgagaaattcaacagtcattttcaccagcataattttatcttaaggaataactaataggaaaagtcagcttaattatttaaggccctagtttctacatataatatattcgatagaaatgaaaatctgccgtggaattaactaataagtagtaacaataaacttcatatttagaatgcaaagtctataaagaataattttacatgatcctcaatatcaactccagtttaaaaagtgttatttttaaaacatttgaaaccaagtactgtttaatttcaatcagaagatgcaaatacatactttgatctatgtttgattttgctaataatatttgaaggagattgcctaccaaggacaaaacaataaatttaaaaatcaaacgatttctccatacgctcatagtcacatatggaattttgagaaaataaagcatgctgtctttaggaatttttatacttctttgtctttcttccttaatatttgcttctagctgctcttggcaatgatgaattgttatgtatgcattaatgttttgcagcccaaaagttgttcacatttttcctatataagatctgtggagtgtgtgtttcaaagagagaactacagaaatgttaaagcaggaaaacctgaatgtgatgtgcacattttcatcccacatggacaatgtatgtgttttaataaatggaattttcagattc

SEQ ID NO: 13045 - DNA, 577 bp, Homo sapiens
  source 1..577: mol_type = unassigned DNA
agagcatgcagagccagcaagagcggatggctgaagaattacacgcagtggaaaagcagcaccgtggagctgggtgattcctgagcccaacctgtgcctctggtctaggggcatgcaggggaaattgcaacctccaatggaaagagaagcaagagatggtgtaccttcaggcaaagtgtttctgaaagatctatccagcactccgatggccagcaacaacaccgccagcatagcacaagccaggaagctggtagagcagcttaagatggaagccaatatcgacaggataaaggtgtccaaggcagctgcagatttgatggcctactgtgaagcacatgccaaggaagaccccctcctgacccctgttccggcttcagaaaacccgtttagggagaagaagtttttctgtgccatcctttaagtctttgagaggggcctgaagagcctccgggctcctgggacattgatgtagagtttttagtgaagtgggcacctttctagtccacggcatttgaagagagcgaggagaaccattctggaaactctaggctatgcatgtttaaagatctggtcccct

SEQ ID NO: 13046 - DNA, 569 bp, Homo sapiens
  source 1..569: mol_type = unassigned DNA
agtgtcttcctccctcagcttgtgcagctgctttcaggataacctcagacacagctatcatttgccaccagatctgccagtgagcctcaggctttaggaactgaagagtgtttctgaaagatctatccagcactccgatggccagcaacaacaccgccagcatagcacaagccaggaagctggtagagcagcttaagatggaagccaatatcgacaggataaaggtgtccaaggcagctgcagatttgatggcctactgtgaagcacatgccaaggaagaccccctcctgacccctgttccggcttcagaaaacccgtttagggagaagaagtttttctgtgccatcctttaagtctttgagaggggcctgaagagcctccgggctcctgggacattgatgtagagtttttagtgaagtgggcacctttctagtccacggcatttgaagagagcgaggagaaccattctggaaactctaggctatgcatgtttaaagatctggtcccctttatgagaatgcaagccgatccacatcctgacttaagagatctgattctgacgaactgcc

SEQ ID NO: 13047 - DNA, 908 bp, Homo sapiens
  source 1..908: mol_type = unassigned DNA
actcacaacgctgccgccgcgctccgtgggcaactcctactactgctgggctgggctgggctgggctgggctgcgccggagctcgcctgcacagatcagctccggagaggggaaaaccacgctcctcggaccaagcctcgggagctaagccagatctgccagtgagcctcaggctttaggaactgaagagggatgatactgtgaagtgttcaggaatgaagtctcgtgatgtctgctacctagtttcaaatggcaggagagacagagggatggggaagcaaaagtgaccattgttaactctaggtggttgtgtttctgaaagatctatccagcactccgatggccagcaacaacaccgccagcatagcacaagccaggaagctggtagagcagcttaagatggaagccaatatcgacaggataaaggtgtccaaggcagctgcagatttgatggcctactgtgaagcacatgccaaggaagaccccctcctgacccctgttccggcttcagaaaacccgtttagggagaagaagtttttctgtgccatcctttaagtctttgagaggggcctgaagagcctccgggctcctgggacattgatgtagagtttttagtgaagtgggcacctttctagtccacggcatttgaagagagcgaggagaaccattctggaaactctaggctatgcatgtttaaagatctggtcccctttatgagaatgcaagccgatccacatcctgacttaagagatctgattctgacgaactgcctggaggaggggaatatataaaaataaaattggtgtcacttcttttctgctatcccccagccccccccccaaaatcctcatgtttctgcttcatattttgaaaaataacaattaaaacagacagctgtactgaggtaa

SEQ ID NO: 13048 - DNA, 3419 bp, Homo sapiens
  source 1..3419: mol_type = unassigned DNA
gtttttctctctgctttctcaacagccagatctgccagtgagcctcaggctttaggaactgaagagtgtttctgaaagatctatccagcactccgatggccagcaacaacaccgccagcatagcacaagccaggaagctggtagagcagcttaagatggaagccaatatcgacaggataaaggtgtccaaggcagctgcagatttgatggcctactgtgaagcacatgccaaggaagaccccctcctgacccctgttccggcttcagaaaacccgtttagggagaagaagtttttctgtgccatcctttaagtctttgagaggggcctgaagagcctccgggctcctgggacattgatgtagagtttttagtgaagtgggcacctttctagtccacggcatttgaagagagcgaggagaaccattctggaaactctaggctatgcatgtttaaagatctggtcccctttatgagaatgcaagccgatccacatcctgacttaagagatctgattctgacgaactgcctggaggaggggaatatataaaaataaaattggtgtcacttcttttctgctatcccccagccccccccccaaaatcctcatgtttctgcttcatattttgaaaaataacaattaaaacagacagctgtactgaggtaagatatgtgtgaccttcttggaatgaatattgtctttagaataccctttgataagctgagctgtcccgtgtagatgcaattcggtttaatggcattgatgtatagtcactgtgcctttctttttctttcttccttctcctctacccctccttccacccctccccattagagtagtgtggagataaggctggactggtctatcagattgaactccaagaatgatcacacaaaatgtttagggagatgttccccgtggtgtatcctcatggtaacaacgacaaaaaatgccggttgtctgtgttctcttttcactattcctaacatgtgtacatgatagctttgattctgcaagtaaaagtaaatcctgtgttgtgactggtgctttcatatatttgtgacaatttttgagtaatattgcatgaaaatgtccctatgttacatccattcagaagttttgttgttttactctaaagctgggaaaggaaatgagagggaaaagaccccggagagggaagaaaatctcagtattttgaaaattgagattacttcagagccttagccacacctaaaatacctcctagttaatagtggtataaatgcctcttcaatacgttttccagaatccaaagcattttggtttatccaggacccagggcagcacagctgtcaccaagcaggagagttaaggattcaccatgagctgggaaatgcttttgccatgagtatgagcaaattccctctttccctgaatcatggacattctagattaaaagaacatttttttgtgctcttaacaagaaaaccatggccctcctttgttcaagtatcagaagaaataaacccacagctccagagaaggtgaccattctcagaactccagctattcactctccagggagaaggacctcaaatcgccactctttgggcggcaggtgcggtccccacggccggctctacgaggaagagttctggctcttttgtccactgagatggtcttggtttttcacttaacaaattttttaatggaatctttgtttttgttctccatcttgtttgttagagtctctcggcctttatttacaaattccttgcaactagagcgctccttccccaagatatggtagtgagagtaatttttcattgtagctgtagtctccatcagtaacagcaggccctggaagacttgatcacctttttctgtgtcattttcagtcaaagagggcctctcttacatcttgtttgctttcaaatccccaaatatcatctccatctcccaattaattttattgtctctttcctctctattcgctttctcctgttttttttttaaaaaaaaagcatgaaaaaggaagagaaaaagtttgatatgccaaggacagattttgaaacagacttggtaaatgttttccttagctccttcatgggcatgctggtgaaagaataaatacatccaattaaagctcatgctggggtcggggagaagaggatactgaaacatttgtgaaatgtatgaatgcacttctgtaaccagatacttctgttcttctgttcaaattgtggggtttttgttacagttaggacgcccatgaagatttaggggtgaaaaaaacagcagagtatttattaaactacagcattgtacaattagcttagtaacactatggaataagctaaaacatatcacagtttttacatgggccaaaacatgaattgagtatgtggtcacatgaaaacacggatgaatgaataaaacactctttggtggtgactgaggcatcattagaaggcccagacgatttccactattcacagcatttccttttctcagaaggactctttatatttccatgtaaatctagatctttggagcaattaagatggaattacaatttctagggagcattttaaggaaaatgttttggctttttcataattttatgtcttacagtatggaattataatacgaaaatctttatatgagttttggcttcttggtatttgtacttattcaggggaaaaagtctttcgattacttatgcctctatagagcttaatttcttgagaaattcaacagtcattttcaccagcataattttatcttaaggaataactaataggaaaagtcagcttaattatttaaggccctagtttctacatataatatattcgatagaaatgaaaatctgccgtggaattaactaataagtagtaacaataaacttcatatttagaatgcaaagtctataaagaataattttacatgatcctcaatatcaactccagtttaaaaagtgttatttttaaaacatttgaaaccaagtactgtttaatttcaatcagaagatgcaaatacatactttgatctatgtttgattttgctaataatatttgaaggagattgcctaccaaggacaaaacaataaatttaaaaatcaaacgatttctccatacgctcatagtcacatatggaattttgagaaaataaagcatgctgtctttaggaatttttatacttctttgtctttcttccttaatatttgcttctagctgctcttggcaatgatgaattgttatgtatgcattaatgttttgcagcccaaaagttgttcacatttttcctatataagatctgtggagtgtgtgtttcaaagagagaactacagaaatgttaaagcaggaaaacctgaatgtgatgtgcacattttcatcccacatggacaatgtatgtgttttaataaatggaattttcagattca

SEQ ID NO: 13049 - DNA, 2125 bp, Homo sapiens
  source 1..2125: mol_type = unassigned DNA
acaacgctgccgccgcgctccgtgggcaactcctactactgctgggctgggctgggctgggctgggctgcgccggagctcgcctgcacagatcagctccggagaggggaaaaccacgctcctcggaccaagcctcgggagctaagccagatctgccagtgagcctcaggctttaggaactgaagagtgtttctgaaagatctatccagcactccgatggccagcaacaacaccgccagcatagcacaagccaggaagctggtagagcagcttaagatggaagccaatatcgacaggataaaggtgtccaaggcagctgcagatttgatggcctactgtgaagcacatgccaaggaagaccccctcctgacccctgttccggcttcagaaaacccgtttagggagaagaagtttttctgtgccatcctttaagtctttgagaggggcctgaagagcctccgggctcctgggacattgatgtagagtttttagtgaagtgggcacctttctagtccacggcatttgaagagagcgaggagaaccattctggaaactctaggctatgcatgtttaaagatctggtcccctttatgagaatgcaagccgatccacatcctgacttaagagatctgattctgacgaactgcctggaggaggggaatatataaaaataaaattggtgtcacttcttttctgctatcccccagccccccccccaaaatcctcatgtttctgcttcatattttgaaaaataacaattaaaacagacagctgtactgaggtaagatatgtgtgaccttcttggaatgaatattgtctttagaataccctttgataagctgagctgtcccgtgtagatgcaattcggtttaatggcattgatgtatagtcactgtgcctttctttttctttcttccttctcctctacccctccttccacccctccccattagagtagtgtggagataaggctggactggtctatcagattgaactccaagaatgatcacacaaaatgtttagggagatgttccccgtggtgtatcctcatggtaacaacgacaaaaaatgccggttgtctgtgttctcttttcactattcctaacatgtgtacatgatagctttgattctgcaagtaaaagtaaatcctgtgttgtgactggtgctttcatatatttgtgacaatttttgagtaatattgcatgaaaatgtccctatgttacatccattcagaagttttgttgttttactctaaagctgggaaaggaaatgagagggaaaagaccccggagagggaagaaaatctcagtattttgaaaattgagattacttcagagccttagccacacctaaaatacctcctagttaatagtggtataaatgcctcttcaatacgttttccagaatccaaagcattttggtttatccaggacccagggcagcacagctgtcaccaagcaggagagttaaggattcaccatgagctgggaaatgcttttgccatgagtatgagcaaattccctctttccctgaatcatggacattctagattaaaagaacatttttttgtgctcttaacaagaaaaccatggccctcctttgttcaagtatcagaagaaataaacccacagctccagagaaggtgaccattctcagaactccagctattcactctccagggagaaggacctcaaatcgccactctttgggcggcaggtgcggtccccacggccggctctacgaggaagagttctggctcttttgtccactgagatggtcttggtttttcacttaacaaattttttaatggaatctttgtttttgttctccatcttgtttgttagagtctctcggcctttatttacaaattccttgcaactagagcgctccttccccaagatatggtagtgagagtaatttttcattgtagctgtagtctccatcagtaacagcaggccctggaagacttgatcacctttttctgtgtcattttcagtcaaagagggcctctcttacatcttgtttgctttcaaatccccaaatatcatctccatctcccaattaattttattgtctctttcctctctattcgctttctcctgttttttttttaaaaaaaaagcatg

SEQ ID NO: 13050 - DNA, 573 bp, Homo sapiens
  source 1..573: mol_type = unassigned DNA
atgcagagccagcaagagcggatggctgaagaattacacgcagtggaaaagcagcaccgtggagctgggtgattcctgagcccaacctgtgcctctggtctaggggcatgcaggggaaattgcaacctccaatggaaagagaagcaagagatggtgtaccttcaggcaaagacaagaatcccagagcatagaaaagtcacacagctaattaagtgttggagcccggatttgaacccagtgtttctgaaagatctatccagcactccgatggccagcaacaacaccgccagcatagcacaagccaggaagctggtagagcagcttaagatggaagccaatatcgacaggataaaggtgtccaaggcagctgcagatttgatggcctactgtgaagcacatgccaaggaagaccccctcctgacccctgttccggcttcagaaaacccgtttagggagaagaagtttttctgtgccatcctttaagtctttgagaggggcctgaagagcctccgggctcctgggacattgatgtagagtttttagtgaagtgggcacctttctagtccacggcat

SEQ ID NO: 13051 - DNA, 920 bp, Homo sapiens
  source 1..920: mol_type = unassigned DNA
cttcccacaaactgggaggaaaactgagacctcctggtcacccgccgccgggccttttagaaactcccacaagctctgccttccctccctggtcctcttcagaccccctcttagttcttcgcggctaacggtaagctctctccttacctctccctaatcggcccctctggagaggaaaagaaaacttaagagtcgggtcgcgctagcctccagcagccgccgcgcccaccgactgctccgccccttctcctccccctcctccaggctcgcgctcggggccgggtgtggagctggaacagagggctggcaaggcgcgcatgcgcaccgagggtggagccgctgagcacagaaccggaaacttagagacaaagttcggagccccgcccccgccgcgcgccgctgagttgtctggccccgccgacccacggcccacgacccaccgacccacgaatcggcccggccgtcgcgtgcaccatgtctggctcctccagcgtcgccgctatgaagaaagtggttcaacagctccggctggaggccggactcaaccgcgtaaaagtttcccaggcagctgcagacttgaaacagttctgtctgcagaatgctcaacatgaccctctgctgactggagtatcttcaagtacaaatcccttcagaccccagaaagtctgttcctttttgtagtaaaatgaatctttcaaaggtttcccaaaccactccttatgatccagtgaatattcaagagagctacatttgaagcctgtacaaaagcttatccctgtaacacatgtgccataatatacaaacttctactttcgtcagtccttaacatctacctctctgaattttcatgaatttctatttcacaagggtaattgttttatatacactggcagcagcatacaataaaacttagtatgaaa

SEQ ID NO: 13052 - DNA, 790 bp, Homo sapiens
  source 1..790: mol_type = unassigned DNA
cttcccacaaactgggaggaaaactgagacctcctggtcacccgccgccgggccttttagaaactcccacaagctctgccttccctccctggtcctcttcagaccccctcttagttcttcgcggctaacggctcgcgctcggggccgggtgtggagctggaacagagggctggcaaggcgcgcatgcgcaccgagggtggagccgctgagcacagaaccggaaacttagagacaaagttcggagccccgcccccgccgcgcgccgctgagttgtctggccccgccgacccacggcccacgacccaccgacccacgaatcggcccggccgtcgcgtgcaccatgtctggctcctccagcgtcgccgctatgaagaaagtggttcaacagctccggctggaggccggactcaaccgcgtaaaagtttcccaggcagctgcagacttgaaacagttctgtctgcagaatgctcaacatgaccctctgctgactggagtatcttcaagtacaaatcccttcagaccccagaaagtctgttcctttttgtagtaaaatgaatctttcaaaggtttcccaaaccactccttatgatccagtgaatattcaagagagctacatttgaagcctgtacaaaagcttatccctgtaacacatgtgccataatatacaaacttctactttcgtcagtccttaacatctacctctctgaattttcatgaatttctatttcacaagggtaattgttttatatacactggcagcagcatacaataaaacttagtatgaaacttt

SEQ ID NO: 13053 - DNA, 720 bp, Homo sapiens
  source 1..720: mol_type = unassigned DNA
aatcatattagtgaagattaggaagaagctttaaaatcccaaggctagtgtgcattgctagaattgttaagagagagagctcatatgaaattggttatcgtgggatatttaaaataaaacaaagaacagtttactttcaggcaaaaagatgccagtaatcaatattgaggacctgacagaaaaggacaaattgaagatggaagttgaccagctcaagaaagaagtgacactggaaagaatgctagtttccaaatgttgtgaagaagtaagagattacgttgaagaacgatctggcgaggatccactggtaaagggcatcccagaggacaaaaatcccttcaaggagctcaaaggaggctgtgtgatttcataatacaaacaaaaagaaaaaaaattaaacaaattcttggaaatatctcaaatgttaataacaatatgaatttttctcatgcatactattactactaagcatgtacgtgaatttttaaatttatagatgtaaacttttaataaaaattggggtgtggtaacccatcattctatgtttttcttaacatagctggcacagggtttaacacataattgccaataaatattgcttaaagttctttaaaaagaactatgttttataaatgattctatattattctgagttgtcagcatatatttactgttttatgttttttcacttccctttcaacacttacaattttctaccca

SEQ ID NO: 13054 - DNA, 538 bp, Homo sapiens
  source 1..538: mol_type = unassigned DNA
gctcatatgaaattggttatcgtgggatatttaaaataaaacaaagaacagtttactttgtaagttaagagctgagggaattgttggctaagactgacttgaaataactccagcaattcatgcatagctgctaaccttctacatcttcagcaggcaaaaagatgccagtaatcaatattgaggacctgacagaaaaggacaaattgaagatggaagttgaccagctcaagaaagaagtgacactggaaagaatgctagtttccaaatgttgtgaagaagtaagagattacgttgaagaacgatctggcgaggatccactggtaaagggcatcccagaggacaaaaatcccttcaaggagctcaaaggaggctgtgtgatttcataatacaaacaaaaagaaaaaaaattaaacaaattcttggaaatatctcaaatgttaataacaatatgaatttttctcatgcatactattactactaagcatgtacgtgaatttttaaatttatagatgtaaacttttaataaaaattggggtgt

SEQ ID NO: 13055 - DNA, 889 bp, Homo sapiens
  source 1..889: mol_type = unassigned DNA
tggatgaagagtgagctaggagaacttcgtaaggtgaaactgtggggatccaatgggcaacacaaagcatcttggttaaggaggttaggggccggtctaggacttgcctcaggaggaaggacagcctcagagcatgctcagaggtgggaagggaaggaggagaaagcaggcgaagcggggccatctgctttatctgaagattttcagctgatgaagaactaggaggctcaaacactatcttacctgagtccaggacaagtgacttggagagtgtgctcttctgtggcaggatcaggtctgtctagggcaggatggcccaggatctcagcgagaaggacctgttgaagatggaggtggagcagctgaagaaagaagtgaaaaacacaagaattccgatttccaaagcgggaaaggaaatcaaggagtacgtggaggcccaagcaggaaacgatccttttctcaaaggcatccctgaggacaagaatcccttcaaggagaaaggtggctgtctgataagctgatggcatggagccctgccctgagtgtctgtccctcttcagccaagcccaagtctcctagacccccagggagccagtgaactgtcaccttctcttcatcacagaatgagtaaagatccctgaacaaatgcattgtgaacccattccccactcccaccttcaactcttttctcccattatttcctccacctgctgggtctctgctgaccttgctgggaacactctgaggacagtgtggctggccgagcggttggccccatgggtggtggggtgtgagaagcctgcaataccccaagaccccagagggcagtccttaggaagcacttacaccacctgggaacccctccgtcttttccctctactctcatcct

SEQ ID NO: 13056 - DNA, 585 bp, Homo sapiens
  source 1..585: mol_type = unassigned DNA
attccgggacaagaggaagtcagtcctgctccccgagcctgtgtctctctgtcccctgcccagaggaagggggaagccaggggcccatttgggggcccagcccccaatcccacccagcagaggaagccaaggccatctgctttatctgaagattttcagctgatgaagaactaggaggctcaaacactatcttacctgagtccaggacaagtgacttggagagtgtgctcttctgtggcaggatcaggtctgtctagggcaggatggcccaggatctcagcgagaaggacctgttgaagatggaggtggagcagctgaagaaagaagtgaaaaacacaagaattccgatttccaaagcgggaaaggaaatcaaggagtacgtggaggcccaagcaggaaacgatccttttctcaaaggcatccctgaggacaagaatcccttcaaggagaaaggtggctgtctgataagctgatggcatggagccctgccctgagtgtctgtccctcttcagccaagcccaagtctcctagacccccagggagccagtgaactgtcaccttctcttcatcacagaatgagtaaag

SEQ ID NO: 13057 - DNA, 918 bp, Homo sapiens
  source 1..918: mol_type = unassigned DNA
tttttattgaatgagtggatgaagagtgagctaggagaacttcgtaaggccatctgctttatctgaagattttcagctgatgaagaactaggaggctcaaacactatcttacctgagtccaggacaagtgacttggagagtgtgctcttctgtggcaggatcaggtctgtctagggcaggatggcccaggatctcagcgagaaggacctgttgaagatggaggtggagcagctgaagaaagaagtgaaaaacacaagaattccgatttccaaagcgggaaaggaaatcaaggagtacgtggaggcccaagcaggaaacgatccttttctcaaaggcatccctgaggacaagaatcccttcaaggagaaaggtggctgtctgataagctgatggcatggagccctgccctgagtgtctgtccctcttcagccaagcccaagtctcctagacccccagggagccagtgaactgtcaccttctcttcatcacagaatgagtaaagatccctgaacaaatgcattgtgaacccattccccactcccaccttcaactcttttctcccattatttcctccacctgctgggtctctgctgaccttgctgggaacactctgaggacagtgtggctggccgagcggttggccccatgggtggtggggtgtgagaagcctgcaataccccaagaccccagagggcagtccttaggaagcacttacaccacctgggaacccctccgtcttttccctctactctcatcctaggaataaagcatttccacgccagagtagtttgggctgggggccagggttgggtggtcctgtccctccatatcatgtcctaccctatggtcctgttcctagtcatttagatcaccccagatggcctgatgacaacaagagtttgtgaagttatgatttca

SEQ ID NO: 13058 - DNA, 500 bp, Homo sapiens
  source 1..500: mol_type = unassigned DNA
tttttattgaatgagtggatgaagagtgagctaggagaacttcgtaaggtgaaactgtggggatccaatgggcaacacaaagcatcttggttaaggaggttaggggccggtctaggacttgcctcaggaggaaggacagcctcagagcatgctcagaggccatctgctttatctgaagattttcagctgatgaagaactaggaggctcaaacactatcttacctgagtccaggacaagtgacttggagagtgtgctcttctgtggcaggatcaggtctgtctagggcaggatggcccaggatctcagcgagaaggacctgttgaagatggaggtggagcagctgaagaaagaagtgaaaaacacaagaattccgatttccaaagcgggaaaggaaatcaaggagtacgtggaggcccaagcaggaaacgatccttttctcaaaggcatccctgaggacaagaatcccttcaaggagaaaggtggctgtctgataagctga

SEQ ID NO: 13059 - DNA, 783 bp, Homo sapiens
  source 1..783: mol_type = unassigned DNA
ggcgaagcggggtaagtggggctgcagggtggaggtggagaaatagaagcgctgcgggctctaagctagtgaggtcaccaaaagtgtgaggctaacgcaaggcaaggtggtgaaaaggtggcttctgttttcgcgtttgtttttgtggggagaatgtctgtctctctgctctgctgtagtgagggcttgaaggctcaagcgggtgatgggcttagaactttgagcctatgatcagcttaggcatcagagattttggtttccaggccatctgctttatctgaagattttcagctgatgaagaactaggaggctcaaacactatcttacctgagtccaggacaagtgacttggagagtgtgctcttctgtggcaggatcaggtctgtctagggcaggatggcccaggatctcagcgagaaggacctgttgaagatggaggtggagcagctgaagaaagaagtgaaaaacacaagaattccgatttccaaagcgggaaaggaaatcaaggagtacgtggaggcccaagcaggaaacgatccttttctcaaaggcatccctgaggacaagaatcccttcaaggagaaaggtggctgtctgataagctgatggcatggagccctgccctgagtgtctgtccctcttcagccaagcccaagtctcctagacccccagggagccagtgaactgtcaccttctcttcatcacagaatgagtaaagatccctgaacaaatgcattgtgaacccattccccactcccaccttcaactcttttctcccattatt

SEQ ID NO: 13060 - DNA, 6539 bp, Homo sapiens
  source 1..6539: mol_type = unassigned DNA
cgtcggcccagactatccgctcccaccgcgcccccggcccacctggtggccccggccctggccgccgcccccgcggcggttcccggagctcgtcccggacgcgcgcccgggcggcgggggctcggcggccaccgctgcctcgggggagcgagggcgggagggtgtgtgtgcgcgctgtgagcagggggtgccggcggggctgcagcggaggcactttggaagaatgactctggagtccatcatggcgtgctgcctgagcgaggaggccaaggaagcccggcggatcaacgacgagatcgagcggcagctccgcagggacaagcgggacgcccgccgggagctcaagctgctgctgctcgggacaggagagagtggcaagagtacgtttatcaagcagatgagaatcatccatgggtcaggatactctgatgaagataaaaggggcttcaccaagctggtgtatcagaacatcttcacggccatgcaggccatgatcagagccatggacacactcaagatcccatacaagtatgagcacaataaggctcatgcacaattagttcgagaagttgatgtggagaaggtgtctgcttttgagaatccatatgtagatgcaataaagagtttatggaatgatcctggaatccaggaatgctatgatagacgacgagaatatcaattatctgactctaccaaatactatcttaatgacttggaccgcgtagctgaccctgcctacctgcctacgcaacaagatgtgcttagagttcgagtccccaccacagggatcatcgaatacccctttgacttacaaagtgtcattttcagaatggtcgatgtagggggccaaaggtcagagagaagaaaatggatacactgctttgaaaatgtcacctctatcatgtttctagtagcgcttagtgaatatgatcaagttctcgtggagtcagacaatgagaaccgaatggaggaaagcaaggctctctttagaacaattatcacatacccctggttccagaactcctcggttattctgttcttaaacaagaaagatcttctagaggagaaaatcatgtattcccatctagtcgactacttcccagaatatgatggaccccagagagatgcccaggcagcccgagaattcattctgaagatgttcgtggacctgaacccagacagtgacaaaattatctactcccacttcacgtgcgccacagacaccgagaatatccgctttgtctttgctgccgtcaaggacaccatcctccagttgaacctgaaggagtacaatctggtctaattgtgcctcctagacacccgccctgcccttccctggtgggctattgaagatacacaagagggactgtatttctgtggaaaacaatttgcataatactaatttattgccgtcctggactctgtgtgagcgtgtccacagagtttgtagtaaatattatgattttatttaaactattcagaggaaaaacagaggatgctgaagtacagtcccagcacatttcctctctatcttttttttaggcaaaaccttgtgactcagtgtattttaaattctcagtcatgcactcacaaagataagacttgtttctttctgtctctctctctttttcttttctatggagcaaaacaaagctgatttcccttttttcttcccccgctaattcatacctccctcctgatgtttttcccaggttacaatggcctttatcctagttccattcttggtcaagtttttctctcaaatgatacagtcaggacacatcgttcgatttaagccatcatcagcttaatttaagtttgtagtttttgctgaaggattatatgtattaatacttacggttttaaatgtgttgctttggatacacacatagtttcttttttaatagaatatactgtcttgtctcactttggactgggacagtggatgcccatctaaaagttaagtgtcatttcttttagatgtttaccttcagccatagcttgattgctcagagaaatatgcagaaggcaggatcaaagacacacaggagtcctttcttttgaaatgccacgtgccattgtctttcctcccttctttgcttctttttcttaccctctctttcaattgcagatgccaaaaaagatgccaacagacactacattaccctaatggctgctacccagaacctttttataggttgttcttaatttttttgttgttgttgttcaagcttttcctttcttttttttcttggtgtttgggccacgattttaaaatgacttttattatgggtatgtgttgccaaagctggctttttgtcaaataaaatgaatacgaacttaaaaaataaaagctggtatcttaaaatgtaagagagtaagactgtgaagcctaaaatgactggctgagaatgaaccagaaatgccatttgccaaacagttgtaactagaaatttgattctcacggtccattcttttctttgtccttaagatgacattgttagtgttcacgtcccatgttcagtgtccaaaccggcaatgtaaaaagtatcctgtgtggtttaacaggaaatctgtttatgtctctttatttgaaaccagttttactctcagtggttctttaagttcaatgaagtctgccaggaacattggttggtagtattattccgacacctttaatttccaaaatctgaagttcctgctagtttaccaccttcatgatcttcttgaactggtaactgattaggttgaacttatggaagatttgtggacttaactcaaaagtaacctctcagtgttctatagaacatgtatttgtgtaactgaacctaccaggagaaatgtttggaattctatatgtgcaatttttcaacaaatgcaaaaaaaatacagcacatgtattgacaagcttctgtcaagcagcttgagttgaaatttgatttaagaaaataaatcatgattgttcaaagctgctgggacgttagaattaggccatgatactggtctcattttaactacagtggtatttggcactagtgtaaacttccatataaatcactcttttggaacaacaaagggggagggagaaaaatcacggcctgttaaatgagtaccaaagccgcccaacagtaatgagatgttctcatccttgattctcccagcctcaaacaacacagcttactttttttttcccttgctcagaaagtacctgtaatttaacaaacagactgcctgtaggtatagtgcaattacaaatgctctaatcattgtacatacatctctcttgatattgcagcatccatactggctttgtaatcattaattttttggcagattgaatgtgctgtattgatatgtatctatgtaattgtattgtatgtctatagctaattcacgttttgaataatgttattttatttacttttttaagagaggagaatgtaaatttgtcagtttatttctgactagggatattttctttccatttagaaaagaagaaaaaaaaaaaaccttactgtcatacagagcggtactagcgtcgtgctgtataaaatcatttgcacattcctgagtagaggtatactgattataagacccaaaggtaatttcatagcaaaatacataaaatcagtcggagcttttatacaaacatggaaaccaactttgtagaacttttgccatttgatctaggattggaatatgagcttttatacaattcatattcttatttggcaaatgcacagtttagtattacctctctgatggcctttactagaaaggcagttttagaagctattgtgatccactaaggaaatgttttaacagctagagaccactgcttgcctgaaagggcgttcttaaatttggtgcagcaaaaaaaaaaaaaaaaaaaaaaaaaattaaacaacaacatttgaaggcctacagtgtgtatagagaaaacctcatcacaagatcataagtgttacagttttagggaatcaagatattctatttaatagagctatagtaaatgtagtcaattaaacctgatctcaaagcttgaagaagctgagcaaaacagggaaagattgttatatttgtctttatgaaattgggatggaatttgctatgcagaattgaggtttgtggcttcgctgttcctgtagggtgcatgacaagatcccttctcttgagaaaggaaaaaattgatcaccctagcagcagtgatgcatagaaacctaattttagccacaccagtcaatcgaagctaaaggattttcttttttgtttcttcggggttttattgaaggggctaggggcgggacgggattcttttcagttttgtataaaaacaaagtttactcatgctttatattatattgtgattgcaagcgttataagcgtgtgccactggcctcctattgttgatgcttaggtaatggaggcctgtggtgagttttatggtgacttgggcatgtcttattcaaaaacaaaaacataaaacacagaaacctttcttcagcataccaaggcaagcagccatttcatgactcacttaacacattgcagtgtaccagtttacagatgatttttccctttttgcgtgacatggcagttctaacccccagagaattccttatttgtaaattggaagtttctactatgccttacagagcttaaattcagaagtttgtgcctcatatctgaaacaaagggaaataacacacccattcaaaagtaaataaatctcctagaagtttttgtttttaacatttccatataaagagctctgttgaatgtcatgaatagactggaaaaaaaaattttaagaacctgcatatgttgtttactagcagatgacaactacaaaaggaatctgaagaacacgtaaaacttgtatttttttttttttggtagattaactagcaggcctattttaaaaaggtaattcagctaaagggcaatttacttttttgtacttcagactatcttgattgtcaaagtgtacgaactgtaattttaaaatttatactgccacatgattgtaaattttagttgtcttaagttaggaattggtgaaaagctatttatgctggatttgggtcaaaatgacttatttgcaaaaaaataaataatgggaagaaagggctgtataatgaaatactgcaagactcacatattggttggaaatttccctcaaatcacctaccgattacccttgatttccctttgttttcagtttctcaaaacgaatgaaatgaaatatagcagaatgttaacccatataaaaataaagtgtacccaaatattgtaatgtatattgctgctcttcttcaaattaaataagggtttaaaaccacttaattggtaatcaacatctcaattgatacaaataaggtgtgcttggtatacattaatattttcttccaaagatatatctttggttagaaacacaaaaaaataaaactagtaatattgtatgtttatctatctctacatatttccagcatatgtagcgttaatagatctgtcctggtaactgtgtctttgggatttcattttggttccatcaaattaggaaaagaaatggcttagttgtatatgattagctagagatttttggagccagacacctgctgtttagtagataacttagtacagaccctaaacttgtcatttgtttttctcacagaatagccatttcctgctgtcttcccaatgatcactgccctttcaataacactcttgcctctagaatcatatgttcaaagtatgaatacacacctagcacatagtaggtgctcaaatattaatttcctccttgccttccttatctaccctgtgtcctccatttccccgtatgattccaacccaatatagcaaatgacatttacatgttatgaaaacatctattgggtaaaatcagatcttggataaagaaattctgacttttatataagcttttggtagacagaaaaaacagaaaggtattcgttggtagaacatttttaagttcaggaaagaaagctggaataatactacgtaactttgtccaggttactttgactgaaacacgtttttggtggatttcttttcctcaaagaactctctaaatgcaactccttgctggattcctcacccatcatcctgttggaaacccttactagacctatgtatttagggagttttgtcagaaaacatttttaacttgcagtatttaaaagaatatttactgttcctaaaatgtcattcaaatgcatgtactgtctattgtttggggatgggaactagttttgcaaaaaacacctaatgttgtataataatgccccaatgatcttgctggttaaaaatacagtatttttggccataattttgtactatagtattcttcattgttgagttttgcttccattaaagttgcccgagcccctctcagaatgttttgtattagtaggagtactgaaatacatctttccttccttaacacaccttgtgcatattgcattttccaaaataaacaagtttaatggtttcaaaaaaaaaaaaacaccaaaaaa

SEQ ID NO: 13061 - DNA, 1273 bp, Homo sapiens
  source 1..1273: mol_type = unassigned DNA
cactgcactccagcctgccagcctgggtgacagaccaagactccttctcaaagaaaaaaaaaaaaacaacttctaaatgcttcattaccgtttttcataggataaagaggctcatgcacaattagttcgagaagttgatgtggagaaggtgtctgcttttgagaatccatatgtagatgcaataaagagtttatggaatgatcctggaatccaggaatgctatgatagacgacgagaatatcaattatctgactctaccaaatactatcttaatgacttggaccgcgtagctgaccctgcctacctgcctacgcaacaagatgtgcttagagttcgagtccccaccacagggatcatcgaatacccctttgacttacaaagtgtcattttcagaatggtcgatgtagggggccaaaggtcagagagaagaaaatggatacactgctttgaaaatgtcacctctatcatgtttctagtagcgcttagtgaatatgatcaagttctcgtggagtcagacaatgagaaccgaatggaggaaagcaaggctctctttagaacaattatcacatacccctggttccagaactcctcggttattctgttcttaaacaagaaagatcttctagaggagaaaatcatgtattcccatctagtcgactacttcccagaatatgatggaccccagagagatgcccaggcagcccgagaattcattctgaagatgttcgtggacctgaacccagacagtgacaaaattatctactcccacttcacgtgcgccacagacaccgagaatatccgctttgtctttgctgccgtcaaggacaccatcctccagttgaacctgaaggagtacaatctggtctaattgtgcctcctagacacccgccctgcccttccctggtgggctattgaagatacacaagagggactgtatttctgtggaaaacaatttgcataatactaatttattgccgtcctggactctgtgtgagcgtgtccacagagtttgtagtaaatattatgattttatttaaactattcagaggaaaaacagaggatgctgaagtacagtcccagcacatttcctctctatcttttttttaggcaaaaccttgtgactcagtgtattttaaattctcagtcatgcactcacaaagataagacttgtttctttctgtctctctctctttttcttttctatggagcaaaacaaagctgatttcccttttttcttcccccgctaattcatacctccctcctgatgtttttc

SEQ ID NO: 13062 - DNA, 551 bp, Homo sapiens
  source 1..551: mol_type = unassigned DNA
ggtgtgcatccattatcagtgccctatggggtcaggagggaatgggggaacggtgggcagactcgcagctggattcccggagcactcatgggacaggagagagtggcaagagtacgtttatcaagcagatgagaatcatccatgggtcaggatactctgatgaagataaaaggggcttcaccaagctggtgtatcagaacatcttcacggccatgcaggccatgatcagagccatggacacactcaagatcccatacaagtatgagcacaataaggctcatgcacaattagttcgagaagttgatgtggagaaggtgtctgcttttgagaatccatatgtagatgcaataaagagtttatggaatgatcctggaatccaggaatgctatgatagacgacgagaatatcaattatctgactctaccaaatactatcttaatgacttggaccgcgtagctgaccctgcctacctgcctacgcaacaagatgtgcttagagttcgagtccccaccacagggatcatcgaatacccctttgacttacaaagtgtc

SEQ ID NO: 13063 - DNA, 7490 bp, Homo sapiens
  source 1..7490: mol_type = unassigned DNA
tgcctccctccgtctctgccaggcatggcggcaacctcacaccttccctttgctgcgtttctataaatgctttgaaaaaattactcttttcttccctcgctggaaaacaccacaaccagctcctcagagtgtgtcacagagtcaacaggctctcgggccagagggcctgagaagaggactgtcgcaccgtaagatcgccacatccggtcctcggttactatggtaacagctgcaggcacaacttcgtgccctttgacctccccccaaaagtccttgtcccgcttgggtttcccttctcgcccgcttttgcacttatgatctgtaaacctgctccttatcatcgttcccacaaggaatttgggtcccaacaggtcggcacccaggactctcagaccgccgccctcccctaaagacctctgaccgtgcccccggtgtagtccagcaacctggacgcagtctcggctttccactaaggtcaagcccggggctttgtagtatagcctcagcgtgtccacgccccctctcccctaggtagtaggccccgccctccgctccgccgccccctccaggtgagtggtaggttctcccgggagcgcaaggtagtgatgacacgcgccccccctcctccgaacgcgagttggtagcgtccgtgacggagttagcctggtcctcccacgcgcgcctccttcctcgccgccggggcgccctctcggtgccactggctctcacgtgccagtagcccaccccgcatcatcctctcgcctcgctcctggagggaagtgactatatctcccccgtccgccttccatcgccgccgcggcggtaattctgtcgggcccgcccgctgacgtcacctgctagccccgcctcctctagggtcccgggcccctgcggcgggggctgccccggggggcagtcagttgaggcggcgggagctcggcggagggcgggccaggtgactggtccgggccatgccgaggaagaagccattcagcgtgaagcagaagaagaagcagttgcaggacaaacgggagcggaagagagggcttcaagatgggctgcgctccagttccaacagccgcagcgggagccgggagcggcgagaggaacagaccgacacctcggacggggagtctgtgacccatcatatccgcaggcttaaccagcagccttctcaggggctgggtccacgaggctacgacccaaatcgataccgactgcattttgagagagacagcagggaggaggtagagaggagaaagagagcagcccgggagcaagttctacagccggtcagtgctgagttgttggagctggacatccgggaggtgtatcagcctggctcagttctggactttcctcgacgtcctccttggagctatgagatgtccaaggagcaactaatgagccaagaggaacggagcttccaagactatcttgggaagattcatggggcttactcctctgagaaactcagctactttgagcacaatctggagacatggaggcagctgtggcgggtgttagagatgtctgacatcgtcctgcttatcactgatatccgacatccagttgtgaatttcccgccagcactttatgagtatgtgactggagaacttggactggccctggtgctggttttgaacaaggtggatctggccccgccagctcttgtggttgcctggaagcattatttccatcaacactatccccagctccacgtcgtccttttcacctcttttcctcgggacccccgcaccccacaggaccctagtagtgtcttgaagaagagtcggaggcgggggagaggatggactcgggccctggggccagagcagttgctgagagcctgtgaagccatcactgtggggaaagtggacttgagcagctggcgggagaagattgctcgggatgtggctggggccacctggggtaatggctctggggaggaggaggaagaggaggatggcccagcagtcctggtggagcagcagactgattcagcaatggagccaactggcccaacccaagagcgctacaaggatggggtggtgaccatcggctgtgtgggtttccctaatgtgggaaagtcctcgctgatcaatgggctggtggggcggaaagtcgtgagtgtctccagaaccccgggccatacccgatactttcagacctactttcttaccccctctgtgaagctctgtgactgcccaggcctcatcttcccatctcttctgcctaggcagttgcaggttctggcagggatctaccctatcgcccagatccaggagccctacactgctgtgggctacctggcctcccgaattcccgtgcaggccctgctccacctgcgccacccagaggctgaggacccctcagcggaacacccctggtgtgcctgggacatctgtgaagcctgggcagagaaacgtggttacaagacagccaaggcggctcggaatgatgtgtacagagcagccaacagtctcttgcggctggcagtggacggccgcctcagcctgtgttttcatcccccaggctacagtgaacagaaaggcacctgggagtcccatccagagaccacggagctggtggttttgcagggcagggtggggccagcaggtgacgaggaggaggaggaagaggaagagctgagcagctcctgtgaggaggagggagaggaggaccgggatgcggatgaggagggagaaggggatgaggagaccccaacctcggctccagggtccagcctggctggccgaaacccttatgccctgctgggtgaggatgagtgctgagttcctcgcccagcgccatcttccctcccagtatctttgcttttggactgacctgggggtatctcccctctgccaccccaattgtgaataaagattgtttgctttgtagccccttccccagatgaactgaggtgagagcggctgttccaggctaacagctgtgggaggcttctctcctcttctcccttcttttttcatgcattctctttgcaagggaaagttctcttaggagtttagtaggttctcagtctctgaaacctgcttcctctacccattctcccactctgcaccttaggaatcccgttatctacatggggaggggaggtctaaatccagctcccttttggagtttgtgccattctccgatttgagcagcagccctgtgtgccccctgccgccagacctgctcattccaggagcttctgggagaaggaacagtaagagaggaactgtgtcccaagctgatgtctcttaatgagatttttacaggaattgttcaaattcagcaaatatttattgagggtctattgtgtgtcttgacctgtgctgagcaccaagcatataaggatgtaccaccagagcctgacctaaatttgaagcctggccatgatcaaaaccccaccttcaggcacccaagtttttggattaagaagggtgaatgatgttctccaaatcctgggggctcatgcagtataattctaggacttcatgttgatacaaatttttagttaaggcaaaacgcttgtgaaaatgttgattaaatgtgtacgagtagttttaattactggtgaacaactagcgtgcacatttatgatttgagcagaacagccctttaagtacagtgttaagtttcattgtttaaaagcttggcagctacgagtatttgaggtacataggggcgggcacagaaccagcctcctgaattccatttactctggtttgggggtggaacaaagatgatccagtgcagggtctgagctagaacctagcaggtggccagaaccattttagggtttcacctcagcatttcggcagaaatcagctctctcgtgagtcagggcaccttaggctttgctgtatatccctttgttaagccagcagctagactcctagattgaattcttttagaaatgggagaatgagcttttttattgactgccagtgttgtctgtattggatgatagcaaaaagtgtagttggacaggttgcccactagatggagtgagaagtaccagactccttttttctctaaagcagatcctttcaggatctgagtcactgggcagtttctctaatgcgagcagacagaccctgttaaccaaggagcaaaggaaagtatatttaaagaggctaaggtgtttggccacatattgctttaggttcatctccattggtctcagtgtggacataactcctggaattcactccagtgcaaagtttaaataataccagcatgagaatgtacttgaaggtttcccaaaatgtgctagacaagaaagagaaaaggtcccagctgagagaaaaatccacctgtctcccatctggggctctttggcctcactgatagaaaaggaaaaggggcccaagctaagcttactttgagggttcatgatgttcagagatgctcaggggacttctccgctgcaggaggtggggtgaggacattggattcatttcctcaaaatatggagagaaaggagaaaaatcagaattctatttgtacctctgcttcctgtgctgtttatctttgcttgtctttatctttttccacctcaggggtttcatcaggggtatttgggagagtctaggggtggggatgaagaattgactgggagctgaggaggggggatttttatgctgaagacctggcaggaggcaactcctgacacccccacagggttagactgtaaaacctcttccatgacttgctgactctataggataatagcaacaggaaaagaactgagggacgtgcagatgaggatgaatagggccccaacaccagtgcctgaggctgaggttagaactgactacaaagacacaggaaaccaagggcccagtctcccctccacgctgaaatacgcaccctcttgtctgggtcatgtctactatgtgaatacttgaccatggaggtctggggctctggtggcttccatagctggctagtctcttgatggagagaaatcagggcttctctcatccatgctggaatttcatttagatgtcaacttccaagtttccctttttccagatgggattatagtcctgcttctggaacagggtagctgtgtgtggtccaggatagttcaattatctggccctttgttcacttcttacaatcattgatacagtcaacaaaaattggttaaaaacaatatatgccagacatatatccctgagttctgggacaataaccaaaattgaataaggcaatatcctactctcaagcaatagagggtaggaatagaataataataatataatacaatagctctatagcagtatgtaaactataaaagcattattttacgtgtttctattgaactgtcataactaaataagatggttagtactataattatcccaaggattcattcactcatagaacatttgttgagcaattactacctgccagtcacttccaagtggtaagtgagatagaaatggttctttgtggcgctcacaatttattggagaatggaaacacaattacaaaaaaaaagtgtgataagttctgggagaagggtggtacaggatcctgtggggtagtggtggctccatataggagggacattgggatactgatcaggaaggagtgggggacagggctagaagctgcattagtataaagttatgtcagactgccaaaacaaaacaaacacaaaaaatcagtagtctgtggtaaagaattgctataggaacagccagtaggggcagttaagctggtcttggtgaatcaggggaagcgtcctagaggaacagatgtccatgctgaggccaaatgctggacaggagttagccagacagggaaattgcattctgggcagaggagacagcaaaggtcaagaaacatgacaactttggaagactgtaacttgttcagaggcagagggtgcaaaggagaaatgaggaaaggtgaagctggagaggtgggcttggtccagctcttgctgggccttttcagccgtgttaaagatttagactgtatccagagggatgttgaactttaagcctaagactgaaaaggtgagaattgtgccttagatcactatggttgcagtgtggagactggtttggaaaggggagaaatcagaggcttttacagccatcccagggagagagaatgaacaccagaattagggtaatggaagatggaaagaagagaaatcgttttatgggttgctcaggagatagaattgacatgtcttgggattgttttgctgtgtaggggagagagacaagtcaagagtatacatcctgtttctgacttggcaactgggtgggtcatgggtctgtttcctgagacagttgtctacagccataccaccgtaagcgccctaaatctcatcagagacagtttatgcaaatggagcttggggaaagagaggtcgtggctggagacagagatttgggcatcatcaacatataggtgtggggagcagagaaggctgaggaagaaagcaggaaacatataaaaaggagagcagggaaaggagccagtgagacaggaaaaacctagtaacgtggtgtgatgaagctaggggaggaaggaaggaaggaagggcggcgtggaacgctgctgatgggtggtggcggggaaaatgaacgagtatccaccagcaacgagaggggcctccatggtcttggtgggagcatttctttggagaggtggaatcagaagccccagatgtcagagggttaaggaataatttggaggaaaagcgtaaaggcagtggaggtgaggagagaattttcaaaatgtttggcagtgattgcaatgaaagaaaaaaatggagggagcagagtatatgcagttgaggaacttttttagtttggagtgtgttaacacgatgttaggaagaaggatcaagtgaaggagaaaggtgaaaatgctggaaggtggggcttagtgatgaaacaaaccttggggacaggtgggcgtggtactgagagtcccagtgaggggagtgccctcaggcaggcgccggtggcttctgtcacaggagggaacagcgctgacattcagctggttcgcactgatacggctcaaccagtttgttaaaacatgtctgttccagtgtcagtaatatacgagtaactgcaatatgcagtaaaaattataaattctaatacaaactcagttcaagctaattaagagatcgcaacagccgttggtaaatggacttcccgctgcatttgagaagctttgcagcgccatctgccggtgtcgtagcatcactgcaggctgagaggctgctttgcgccttcatcttgaagcactctgaaattgcctgtttaaattaccttggaatcatggagttgctactgcttctgaatagtttagcttctactttgattttattgttagtgcattgtcgttcttgtgtcagtagcaagtttcagtgttttaatatttacaaatacaaaaatttttaataaaatattaaagccaaacttgaatgaagagacaacaaa

SEQ ID NO: 13064 - DNA, 5919 bp, Homo sapiens
  source 1..5919: mol_type = unassigned DNA
gttgtgaatttcccgccagcactttatgagtatgtgactggagaacttggactggccctggtgctggttttgaacaaggtggatctggccccgccagctcttgtggttgcctggaagcattatttccatcaacactatccccagctccacgtcgtccttttcacctcttttcctcgggacccccgcaccccacaggatcctagtagtgtcttgaagaagagtcggaggcgggggagaggatggactcgggccctggggccagagcagttgctgagagcctgtgaagccatcactgtggggaaagtggacttgagcagctggcgggagaagattgctcgggatgtggctggggccacctggggtaatggctctggggaggaggaggaagaggaggatggcccagcagtcctggtggagcagcagactgattcagcaatggagccaactggcccaacccaagagcgctacaaggatggggtggtgaccatcggctgtgtgggtttccctaatgtgggaaagtcctcgctgatcaatgggctggtggggcggaaagtcgtgagtgtctccagaaccccgggccatacccgatactttcagacctactttcttaccccctctgtgaagctctgtgactgcccaggcctcatcttcccatctcttctgcctaggcagttgcaggttctggcagggatctaccctatcgcccagatccaggagccctacactgctgtgggctacctggcctcccgaattcccgtgcaggccctgctccacctgcgccacccagaggctgaggacccctcagcggaacacccctggtgtgcctgggacatctgtgaagcctgggcagagaaacgtggttacaagacagccaaggcggctcggaatgatgtgtacagagcagccaacagtctcttgcggctggcagtggacggccgcctcagcctgtgttttcatcccccaggctacagtgaacagaaaggcacctgggagtcccatccagagaccacggagctggtggttttgcagggcagggtggggccagcaggtgacgaggaggaggaggaagaggaagagctgagcagctcctgtgaggaggagggagaggaggaccgggatgcggatgaggagggagaaggggatgaggagaccccaacctcggctccagggtccagcctggctggccgaaacccttatgccctgctgggtgaggatgagtgctgagttcctcgcccagcgccatcttccctcccagtatctttgcttttggactgacctgggggtatctcccctctgccaccccaattgtgaataaagattgtttgctttgtagccccttccccagatgaactgaggtgagagcggctgttccaggctaacagctgtgggaggcttctctcctcttctcccttcttttttcatgcattctctttgcaagggaaagttctcttaggagtttagtaggttctcagtctctgaaacctgcttcctctacccattctcccactctgcaccttaggaatcccgttatctacatggggaggggaggtctaaatccagctcccttttggagtttgtgccattctccgatttgagcagcagccctgtgtgccccctgccgccagacctgctcattccaggagcttctgggagaaggaacagtaagagaggaactgtgtcccaagctgatgtctcttaatgagatttttacaggaattgttcaaattcagcaaatatttattgagggtctattgtgtgtcttgacctgtgctgagcaccaagcatataaggatgtaccaccagagcctgacctaaatttgaagcctggccatgatcaaaaccccaccttcaggcacccaagtttttggattaagaagggtgaatgatgttctccaaatcctgggggctcatgcagtataattctaggacttcatgttgatacaaatttttagttaaggcaaaacgcttgtgaaaatgttgattaaatgtgtacgagtagttttaattactggtgaacaactagcgtgcacatttatgatttgagcagaacagccctttaagtacagtgttaagtttcattgtttaaaagcttggcagctacgagtatttgaggtacataggggcgggcacagaaccagcctcctgaattccatttactctggtttgggggtggaacaaagatgatccagtgcagggtctgagctagaacctagcaggtggccagaaccattttagggtttcacctcagcatttcggcagaaatcagctctctcgtgagtcagggcaccttaggctttgctgtatatccctttgttaagccagcagctagactcctagattgaattcttttagaaatgggagaatgagcttttttattgactgccagtgttgtctgtattggatgatagcaaaaagtgtagttggacaggttgcccactagatggagtgagaagtaccagactccttttttctctaaagcagatcctttcaggatctgagtcactgggcagtttctctaatgcgagcagacagaccctgttaaccaaggagcaaaggaaagtatatttaaagaggctaaggtgtttggccacatattgctttaggttcatctccattggtctcagtgtggacataactcctggaattcactccagtgcaaagtttaaataataccagcatgagaatgtacttgaaggtttcccaaaatgtgctagacaagaaagagaaaaggtcccagctgagagaaaaatccacctgtctcccatctggggctctttggcctcactgatagaaaaggaaaaggggcccaagctaagcttactttgagggttcatgatgttcagagatgctcaggggacttctccgctgcaggaggtggggtgaggacattggattcatttcctcaaaatgtggagagaaaggagaaaaatcagaattctatttgtacctctgcttcctgtgctgtttatctttgcttgtctttatctttttccacctcaggggtttcatcaggggtatttgggagagtctaggggtggggatgaagaattgactgggagctgaggaggggggatttttatgctgaagacctggcaggaggcaactcctgacacccccacagggttagactgtaaaacctcttccatgacttgctgactctataggataatagcaacaggaaaagaactgagggacgtgcagatgaggatgaatagggccccaacaccagtgcctgaggctgaggttagaactgactacaaagacacaggaaaccaagggcccagtctcccctccacgctgaaatacgcaccctcttgtctgggtcatgtctactatgtgaatacttgaccatggaggtctggggctctggtggcttccatagctggctagtctcttgatggagagaaatcagggcttctctcatccatgctggaatttcatttagatgtcaacttccaagtttccctttttccagatgggattatagtcctgcttctggaacagggtagctgtgtgtggtccaggatagttcaattatctggccctttgttcacttcttacaatcattgatacagtcaacaaaaattggttaaaaacaatatatgccagacatatatccctgagttctgggacaataaccaaaattgaataaggcaatatcctactctcaagcaatagagggtaggaatagaataataataatataatacaatagctctatagcagtatgtaaactataaaagcattattttacgtgtttctattgaactgtcataactaaataagatggttagtactataattatcccaaggattcattcactcatagaacatttgttgagcaattactacctgccagtcacttccaagtggtaagtgagatagaaatggttctttgtggcactcacaatttattggagaatggaaacacaattacaaaaaaaaagtgtgataagttctgggagaagggtggtacaggatcctgtggggtagtggtggctccatataggagggacattgggatactgatcaggaaggagtgggggacagggctagaagctgcattagtataaagttatgtcagactgccaaaacaaaacaaacacaaaaaatcagtagtctgtggtaaagaattgctataggaacagccagtaggggcagttaagctggtcttggtgaatcaggggaagcgtcctagaggaacagatgtccatgctgaggccaaatgctggacaggagttagccagacagggaaattgcattctgggcagaggagacagcaaaggtcaagaaacatgacaactttggaagactgtaacttgttcagaggcagagggtgcaaaggagaaatgaggaaaggtgaagctggagaggtgggcttggtccagctcttgctgggccttttcagccgtgttaaagatttagactgtatccagagggatgttgaactttaagcctaagactgaaaaggtgagaattgtgccttagatcactatggttgcagtgtggagactggtttggaaaggggagaaatcagaggcttttacagccatcccagggagagagaatgaacaccagaattagggtaatggaagatggaaagaagagaaatcgttttatgggttgctcaggagatagaattgacatgtcttgggattgttttgctgtgtaggggagagagacaagtcaagagtatacatcctgtttctgacttggcaactgggtgggtcatgggtctgtttcctgagacagttgtctacagccataccaccgtaagcgccctaaatctcatcagagacagtttatgcaaatggagcttggggaaagagaggtcgtggctggagacagagatttgggcatcatcaacatataggtgtggggagcagagaaggctgaggaagaaagcaggaaacatataaaaaggagagcagggaaaggagccagtgagacaggaaaaacctagtaacgtggtgtgatgaagctaggggaggaaggaaggaaggaagggcggcgtggaacgctgctgatgggtggtggcggggaaaatgaacgagtatccaccagcaacgagaggggcctccatggtcttggtgggagcatttctttggagaggtggaatcagaagccccagatgtcagagggttaaggaataatttggaggaaaagcgtaaaggcagtggaggtgaggagagaattttcaaaatgtttggcagtgattgcaatgaaagaaaaaaatggagggagcagagtatatgcagttgaggaacttttttagtttggagtgtgttaacacgatgttaggaagaaggatcaagtgaaggagaaaggtgaaaatgctggaaggtggggcttagtgatgaaacaaaccttggggacaggtgggcgtggtactgagagtcccagtgaggggagtgccctcaggcaggcgccggtggcttctgtcacaggagggaacagcgctgacattcagctggttcgcactgatacggctcaaccagtttgttaaaacatgtctgttccagtgtcagtaatatacgagtaactgcaatatgcagtaaaaattataaattctaatacaaactcagttcaagctaattaagagatcgcaacagccgttggtaaatggacttcccgctgcatttgagaagctttgcagcgccatctgccggtgtcgtagcatcactgcaggctgagaggctgctttgcgccttcatcttgaagcactctgaaattgcctgtttaaattaccttggaatcatggagttgctactgcttctgaatagtttagcttctactttgattttattgttagtgcattgtcgttcttgtgtcagtagcaagtttcagtgttttaatatttacaaatacaaaaatttttaataaaatattaaagccaaacttgaatgaagagacaacaaa

SEQ ID NO: 13065 - DNA, 7490 bp, Homo sapiens
  source 1..7490: mol_type = unassigned DNA
tgcctccctccgtctctgccaggcatggcggcaacctcacaccttccctttgctgcgtttctataaatgctttgaaaaaattactcttttcttccctcgctggaaaacaccacaaccagctcctcagagtgtgtcacagagtcaacaggctctcgggccagagggcctgagaagaggactgtcgcaccgtaagatcgccacatccggtcctcggttactatggtaacagctgcaggcacaacttcgtgccctttgacctccccccaaaagtccttgtcccgcttgggtttcccttctcgcccgcttttgcacttatgatctgtaaacctgctccttatcatcgttcccacaaggaatttgggtcccaacaggtcggcacccaggactctcagaccgccgccctcccctaaagacctctgaccgtgcccccggtgtagtccagcaacctggacgcagtctcggctttccactaaggtcaagcccggggctttgtagtatagcctcagcgtgtccacgccccctctcccctaggtagtaggccccgccctccgctccgccgccccctccaggtgagtggtaggttctcccgggagcgcaaggtagtgatgacacgcgccccccctcctccgaacgcgagttggtagcgtccgtgacggagttagcctggtcctcccacgcgcgcctccttcctcgccgccggggcgccctctcggtgccactggctctcacgtgccagtagcccaccccgcatcatcctctcgcctcgctcctggagggaagtgactatatctcccccgtccgccttccatcgccgccgcggcggtaattctgtcgggcccgcccgctgacgtcacctgctagccccgcctcctctagggtcccgggcccctgcggcgggggctgccccggggggcagtcagttgaggcggcgggagctcggcggagggcgggccaggtgactggtccgggccatgccgaggaagaagccattcagcgtgaagcagaagaagaagcagttgcaggacaaacgggagcggaagagagggcttcaagatgggctgcgctccagttccaacagccgcagcgggagccgggagcggcgagaggaacagaccgacacctcggacggggagtctgtgacccatcatatccgcaggcttaaccagcagccttctcaggggctgggtccacgaggctacgacccaaatcgataccgactgcattttgagagagacagcagggaggaggtagagaggagaaagagagcagcccgggagcaagttctacagccggtcagtgctgagttgttggagctggacatccgggaggtgtatcagcctggctcagttctggactttcctcgacgtcctccttggagctatgagatgtccaaggagcaactaatgagccaagaggaacggagcttccaagactatcttgggaagattcatggggcttactcctctgagaaactcagctactttgagcacaatctggagacatggaggcagctgtggcgggtgttagagatgtctgacatcgtcctgcttatcactgatatccgacatccagttgtgaatttcccgccagcactttatgagtatgtgactggagaacttggactggccctggtgctggttttgaacaaggtggatctggccccgccagctcttgtggttgcctggaagcattatttccatcaacactatccccagctccacgtcgtccttttcacctcttttcctcgggacccccgcaccccacaggatcctagtagtgtcttgaagaagagtcggaggcgggggagaggatggactcgggccctggggccagagcagttgctgagagcctgtgaagccatcactgtggggaaagtggacttgagcagctggcgggagaagattgctcgggatgtggctggggccacctggggtaatggctctggggaggaggaggaagaggaggatggcccagcagtcctggtggagcagcagactgattcagcaatggagccaactggcccaacccaagagcgctacaaggatggggtggtgaccatcggctgtgtgggtttccctaatgtgggaaagtcctcgctgatcaatgggctggtggggcggaaagtcgtgagtgtctccagaaccccgggccatacccgatactttcagacctactttcttaccccctctgtgaagctctgtgactgcccaggcctcatcttcccatctcttctgcctaggcagttgcaggttctggcagggatctaccctatcgcccagatccaggagccctacactgctgtgggctacctggcctcccgaattcccgtgcaggccctgctccacctgcgccacccagaggctgaggacccctcagcggaacacccctggtgtgcctgggacatctgtgaagcctgggcagagaaacgtggttacaagacagccaaggcggctcggaatgatgtgtacagagcagccaacagtctcttgcggctggcagtggacggccgcctcagcctgtgttttcatcccccaggctacagtgaacagaaaggcacctgggagtcccatccagagaccacggagctggtggttttgcagggcagggtggggccagcaggtgacgaggaggaggaggaagaggaagagctgagcagctcctgtgaggaggagggagaggaggaccgggatgcggatgaggagggagaaggggatgaggagaccccaacctcggctccagggtccagcctggctggccgaaacccttatgccctgctgggtgaggatgagtgctgagttcctcgcccagcgccatcttccctcccagtatctttgcttttggactgacctgggggtatctcccctctgccaccccaattgtgaataaagattgtttgctttgtagccccttccccagatgaactgaggtgagagcggctgttccaggctaacagctgtgggaggcttctctcctcttctcccttcttttttcatgcattctctttgcaagggaaagttctcttaggagtttagtaggttctcagtctctgaaacctgcttcctctacccattctcccactctgcaccttaggaatcccgttatctacatggggaggggaggtctaaatccagctcccttttggagtttgtgccattctccgatttgagcagcagccctgtgtgccccctgccgccagacctgctcattccaggagcttctgggagaaggaacagtaagagaggaactgtgtcccaagctgatgtctcttaatgagatttttacaggaattgttcaaattcagcaaatatttattgagggtctattgtgtgtcttgacctgtgctgagcaccaagcatataaggatgtaccaccagagcctgacctaaatttgaagcctggccatgatcaaaaccccaccttcaggcacccaagtttttggattaagaagggtgaatgatgttctccaaatcctgggggctcatgcagtataattctaggacttcatgttgatacaaatttttagttaaggcaaaacgcttgtgaaaatgttgattaaatgtgtacgagtagttttaattactggtgaacaactagcgtgcacatttatgatttgagcagaacagccctttaagtacagtgttaagtttcattgtttaaaagcttggcagctacgagtatttgaggtacataggggcgggcacagaaccagcctcctgaattccatttactctggtttgggggtggaacaaagatgatccagtgcagggtctgagctagaacctagcaggtggccagaaccattttagggtttcacctcagcatttcggcagaaatcagctctctcgtgagtcagggcaccttaggctttgctgtatatccctttgttaagccagcagctagactcctagattgaattcttttagaaatgggagaatgagcttttttattgactgccagtgttgtctgtattggatgatagcaaaaagtgtagttggacaggttgcccactagatggagtgagaagtaccagactccttttttctctaaagcagatcctttcaggatctgagtcactgggcagtttctctaatgcgagcagacagaccctgttaaccaaggagcaaaggaaagtatatttaaagaggctaaggtgtttggccacatattgctttaggttcatctccattggtctcagtgtggacataactcctggaattcactccagtgcaaagtttaaataataccagcatgagaatgtacttgaaggtttcccaaaatgtgctagacaagaaagagaaaaggtcccagctgagagaaaaatccacctgtctcccatctggggctctttggcctcactgatagaaaaggaaaaggggcccaagctaagcttactttgagggttcatgatgttcagagatgctcaggggacttctccgctgcaggaggtggggtgaggacattggattcatttcctcaaaatgtggagagaaaggagaaaaatcagaattctatttgtacctctgcttcctgtgctgtttatctttgcttgtctttatctttttccacctcaggggtttcatcaggggtatttgggagagtctaggggtggggatgaagaattgactgggagctgaggaggggggatttttatgctgaagacctggcaggaggcaactcctgacacccccacagggttagactgtaaaacctcttccatgacttgctgactctataggataatagcaacaggaaaagaactgagggacgtgcagatgaggatgaatagggccccaacaccagtgcctgaggctgaggttagaactgactacaaagacacaggaaaccaagggcccagtctcccctccacgctgaaatacgcaccctcttgtctgggtcatgtctactatgtgaatacttgaccatggaggtctggggctctggtggcttccatagctggctagtctcttgatggagagaaatcagggcttctctcatccatgctggaatttcatttagatgtcaacttccaagtttccctttttccagatgggattatagtcctgcttctggaacagggtagctgtgtgtggtccaggatagttcaattatctggccctttgttcacttcttacaatcattgatacagtcaacaaaaattggttaaaaacaatatatgccagacatatatccctgagttctgggacaataaccaaaattgaataaggcaatatcctactctcaagcaatagagggtaggaatagaataataataatataatacaatagctctatagcagtatgtaaactataaaagcattattttacgtgtttctattgaactgtcataactaaataagatggttagtactataattatcccaaggattcattcactcatagaacatttgttgagcaattactacctgccagtcacttccaagtggtaagtgagatagaaatggttctttgtggcactcacaatttattggagaatggaaacacaattacaaaaaaaaagtgtgataagttctgggagaagggtggtacaggatcctgtggggtagtggtggctccatataggagggacattgggatactgatcaggaaggagtgggggacagggctagaagctgcattagtataaagttatgtcagactgccaaaacaaaacaaacacaaaaaatcagtagtctgtggtaaagaattgctataggaacagccagtaggggcagttaagctggtcttggtgaatcaggggaagcgtcctagaggaacagatgtccatgctgaggccaaatgctggacaggagttagccagacagggaaattgcattctgggcagaggagacagcaaaggtcaagaaacatgacaactttggaagactgtaacttgttcagaggcagagggtgcaaaggagaaatgaggaaaggtgaagctggagaggtgggcttggtccagctcttgctgggccttttcagccgtgttaaagatttagactgtatccagagggatgttgaactttaagcctaagactgaaaaggtgagaattgtgccttagatcactatggttgcagtgtggagactggtttggaaaggggagaaatcagaggcttttacagccatcccagggagagagaatgaacaccagaattagggtaatggaagatggaaagaagagaaatcgttttatgggttgctcaggagatagaattgacatgtcttgggattgttttgctgtgtaggggagagagacaagtcaagagtatacatcctgtttctgacttggcaactgggtgggtcatgggtctgtttcctgagacagttgtctacagccataccaccgtaagcgccctaaatctcatcagagacagtttatgcaaatggagcttggggaaagagaggtcgtggctggagacagagatttgggcatcatcaacatataggtgtggggagcagagaaggctgaggaagaaagcaggaaacatataaaaaggagagcagggaaaggagccagtgagacaggaaaaacctagtaacgtggtgtgatgaagctaggggaggaaggaaggaaggaagggcggcgtggaacgctgctgatgggtggtggcggggaaaatgaacgagtatccaccagcaacgagaggggcctccatggtcttggtgggagcatttctttggagaggtggaatcagaagccccagatgtcagagggttaaggaataatttggaggaaaagcgtaaaggcagtggaggtgaggagagaattttcaaaatgtttggcagtgattgcaatgaaagaaaaaaatggagggagcagagtatatgcagttgaggaacttttttagtttggagtgtgttaacacgatgttaggaagaaggatcaagtgaaggagaaaggtgaaaatgctggaaggtggggcttagtgatgaaacaaaccttggggacaggtgggcgtggtactgagagtcccagtgaggggagtgccctcaggcaggcgccggtggcttctgtcacaggagggaacagcgctgacattcagctggttcgcactgatacggctcaaccagtttgttaaaacatgtctgttccagtgtcagtaatatacgagtaactgcaatatgcagtaaaaattataaattctaatacaaactcagttcaagctaattaagagatcgcaacagccgttggtaaatggacttcccgctgcatttgagaagctttgcagcgccatctgccggtgtcgtagcatcactgcaggctgagaggctgctttgcgccttcatcttgaagcactctgaaattgcctgtttaaattaccttggaatcatggagttgctactgcttctgaatagtttagcttctactttgattttattgttagtgcattgtcgttcttgtgtcagtagcaagtttcagtgttttaatatttacaaatacaaaaatttttaataaaatattaaagccaaacttgaatgaagagacaacaaa

SEQ ID NO: 13066 - DNA, 1093 bp, Homo sapiens
  source 1..1093: mol_type = unassigned DNA
gcacatctggaaggaggggtgtgcccgctgcacctctggggatcgtgggagggggtcgtgggaccgcgtcaaccctcgcggcctatcgcggaggggatcccccaccccccctacatctggaaggggtggggaaggatggagagttgggggaggggaatccctccagctagcacggggcgccgtccccactgctccctgaaggagtgactccccccacgcacatccgggagggtcccaaatagggtgtctgggaggactgaacatcggaagaagttgagtgggatgaaagggagtcaggccgatgggggagagggtcttatggcccctgagagctggccagcactggcgtcaccggcccctccccgcagggcttcaagatgggctgcgctccagttccaacagccgcagcgggagccgggagcggcgagaggaacagaccgacacctcggacggggagtctgtgacccatcatatccgcaggcttaaccagcagccttctcaggggctgggtccacgaggctacgacccaaatcgataccgactgcattttgagagagacagcagggaggaggtagagaggagaaagagagcagcccgggagcaagttctacagccggtcagtgctgagttgttggagctggacatccgggaggtgtatcagcctggctcagttctggactttcctcgacgtcctccttggagctatgagatgtccaaggagcaactaatgagccaagaggaacggagcttccaagactatcttgggaagattcatggggcttactcctctgagaaactcagctactttgagcacaatctggagacatggaggcagctgtggcgggtgttagagatgtctgacatcgtcctgcttatcactgatatccgacatccagttgtgaatttcccgccagcactttatgagtatgtgactggagaacttggactggccctggtgctggttttgaacaaggtggatctggccccgccagctcttgtggttgcctggaagcattatttccatcaacactatccccagctccacgtcgtccttttcacctcttttcctcgggacccccgcaccccacaggac

SEQ ID NO: 13067 - DNA, 7490 bp, Homo sapiens
  source 1..7490: mol_type = unassigned DNA
tgcctccctccgtctctgccaggcatggcggcaacctcacaccttccctttgctgcgtttctataaatgctttgaaaaaattactcttttcttccctcgctggaaaacaccacaaccagctcctcagagtgtgtcacagagtcaacaggctctcgggccagagggcctgagaagaggactgtcgcaccgtaagatcgccacatccggtcctcggttactatggtaacagctgcaggcacaacttcgtgccctttgacctccccccaaaagtccttgtcccgcttgggtttcccttctcgcccgcttttgcacttatgatctgtaaacctgctccttatcatcgttcccacaaggaatttgggtcccaacaggtcggcacccaggactctcagaccgccgccctcccctaaagacctctgaccgtgcccccggtgtagtccagcaacctggacgcagtctcggctttccactaaggtcaagcccggggctttgtagtatagcctcagcgtgtccacgccccctctcccctaggtagtaggccccgccctccgctccgccgccccctccaggtgagtggtaggttctcccgggagcgcaaggtagtgatgacacgcgccccccctcctccgaacgcgagttggtagcgtccgtgacggagttagcctggtcctcccacgcgcgcctccttcctcgccgccggggcgccctctcggtgccactggctctcacgtgccagtagcccaccccgcatcatcctctcgcctcgctcctggagggaagtgactatatctcccccgtccgccttccatcgccgccgcggcggtaattctgtcgggcccgcccgctgacgtcacctgctagccccgcctcctctagggtcccgggcccctgcggcgggggctgccccggggggcagtcagttgaggcggcgggagctcggcggagggcgggccaggtgactggtccgggccatgccgaggaagaagccattcagcgtgaagcagaagaagaagcagttgcaggacaaacgggagcggaagagagggcttcaagatgggctgcgctccagttccaacagccgcagcgggagccgggagcggcgagaggaacagaccgacacctcggacggggagtctgtgacccatcatatccgcaggcttaaccagcagccttctcaggggctgggtccacgaggctacgacccaaatcgataccgactgcattttgagagagacagcagggaggaggtagagaggagaaagagagcagcccgggagcaagttctacagccggtcagtgctgagttgttggagctggacatccgggaggtgtatcagcctggctcagttctggactttcctcgacgtcctccttggagctatgagatgtccaaggagcaactaatgagccaagaggaacggagcttccaagactatcttgggaagattcatggggcttactcctctgagaaactcagctactttgagcacaatctggagacatggaggcagctgtggcgggtgttagagatgtctgacatcgtcctgcttatcactgatatccgacatccagttgtgaatttcccgccagcactttatgagtatgtgactggagaacttggactggccctggtgctggttttgaacaaggtggatctggccccgccagctcttgtggttgcctggaagcattatttccatcaacactatccccagctccacgtcgtccttttcacctcttttcctcgggacccccgcaccccacaggatcctagtagtgtcttgaagaagagtcggaggcgggggagaggatggactcgggccctggggccagagcagttgctgagagcctgtgaagccatcactgtggggaaagtggacttgagcagctggcgggagaagattgctcgggatgtggctggggccacctggggtaatggctctggggaggaggaggaagaggaggatggcccagcagtcctggtggagcagcagactgattcagcaatggagccaactggcccaacccaagagcgctacaaggatggggtggtgaccatcggctgtgtgggtttccctaatgtgggaaagtcctcgctgatcaatgggctggtggggcggaaagtcgtgagtgtctccagaaccccgggccatacccgatactttcagacctactttcttaccccctctgtgaagctctgtgactgcccaggcctcatcttcccatctcttctgcctaggcagttgcaggttctggcagggatctaccctatcgcccagatccaggagccctacactgctgtgggctacctggcctcccgaattcccgtgcaggccctgctccacctgcgccacccagaggctgaggacccctcagcggaacacccctggtgtgcctgggacatctgtgaagcctgggcagagaaacgtggttacaagacagccaaggcggctcggaatgatgtgtacagagcagccaacagtctcttgcggctggcagtggacggccgcctcagcctgtgttttcatcccccaggctacagtgaacagaaaggcacctgggagtcccatccagagaccacggagctggtggttttgcagggcagggtggggccagcaggtgacgaggaggaggaggaagaggaagagctgagcagctcctgtgaggaggagggagaggaggaccgggatgcggatgaggagggagaaggggatgaggagaccccaacctcggctccagggtccagcctggctggccgaaacccttatgccctgctgggtgaggatgagtgctgagttcctcgcccagcgccatcttccctcccagtatctttgcttttggactgacctgggggtatctcccctctgccaccccaattgtgaataaagattgtttgctttgtagccccttccccagatgaactgaggtgagagcggctgttccaggctaacagctgtgggaggcttctctcctcttctcccttcttttttcatgcattctctttgcaagggaaagttctcttaggagtttagtaggttctcagtctctgaaacctgcttcctctacccattctcccactctgcaccttaggaatcccgttatctacatggggaggggaggtctaaatccagctcccttttggagtttgtgccattctccgatttgagcagcagccctgtgtgccccctgccgccagacctgctcattccaggagcttctgggagaaggaacagtaagagaggaactgtgtcccaagctgatgtctcttaatgagatttttacaggaattgttcaaattcagcaaatatttattgagggtctattgtgtgtcttgacctgtgctgagcaccaagcatataaggatgtaccaccagagcctgacctaaatttgaagcctggccatgatcaaaaccccaccttcaggcacccaagtttttggattaagaagggtgaatgatgttctccaaatcctgggggctcatgcagtataattctaggacttcatgttgatacaaatttttagttaaggcaaaacgcttgtgaaaatgttgattaaatgtgtacgagtagttttaattactggtgaacaactagcgtgcacatttatgatttgagcagaacagccctttaagtacagtgttaagtttcattgtttaaaagcttggcagctacgagtatttgaggtacataggggcgggcacagaaccagcctcctgaattccatttactctggtttgggggtggaacaaagatgatccagtgcagggtctgagctagaacctagcaggtggccagaaccattttagggtttcacctcagcatttcggcagaaatcagctctctcgtgagtcagggcaccttaggctttgctgtatatccctttgttaagccagcagctagactcctagattgaattcttttagaaatgggagaatgagcttttttattgactgccagtgttgtctgtattggatgatagcaaaaagtgtagttggacaggttgcccactagatggagtgagaagtaccagactccttttttctctaaagcagatcctttcaggatctgagtcactgggcagtttctctaatgcgagcagacagaccctgttaaccaaggagcaaaggaaagtatatttaaagaggctaaggtgtttggccacatattgctttaggttcatctccattggtctcagtgtggacataactcctggaattcactccagtgcaaagtttaaataataccagcatgagaatgtacttgaaggtttcccaaaatgtgctagacaagaaagagaaaaggtcccagctgagagaaaaatccacctgtctcccatctggggctctttggcctcactgatagaaaaggaaaaggggcccaagctaagcttactttgagggttcatgatgttcagagatgctcaggggacttctccgctgcaggaggtggggtgaggacattggattcatttcctcaaaatgtggagagaaaggagaaaaatcagaattctatttgtacctctgcttcctgtgctgtttatctttgcttgtctttatctttttccacctcaggggtttcatcaggggtatttgggagagtctaggggtggggatgaagaattgactgggagctgaggaggggggatttttatgctgaagacctggcaggaggcaactcctgacacccccacagggttagactgtaaaacctcttccatgacttgctgactctataggataatagcaacaggaaaagaactgagggacgtgcagatgaggatgaatagggccccaacaccagtgcctgaggctgaggttagaactgactacaaagacacaggaaaccaagggcccagtctcccctccacgctgaaatacgcaccctcttgtctgggtcatgtctactatgtgaatacttgaccatggaggtctggggctctggtggcttccatagctggctagtctcttgatggagagaaatcagggcttctctcatccatgctggaatttcatttagatgtcaacttccaagtttccctttttccagatgggattatagtcctgcttctggaacagggtagctgtgtgtggtccaggatagttcaattatctggccctttgttcacttcttacaatcattgatacagtcaacaaaaattggttaaaaacaatatatgccagacatatatccctgagttctgggacaataaccaaaattgaataaggcaatatcctactctcaagcaatagagggtaggaatagaataataataatataatacaatagctctatagcagtatgtaaactataaaagcattattttacgtgtttctattgaactgtcataactaaataagatggttagtactataattatcccaaggattcattcactcatagaacatttgttgagcaattactacctgccagtcacttccaagtggtaagtgagatagaaatggttctttgtggcgctcacaatttattggagaatggaaacacaattacaaaaaaaaagtgtgataagttctgggagaagggtggtacaggatcctgtggggtagtggtggctccatataggagggacattgggatactgatcaggaaggagtgggggacagggctagaagctgcattagtataaagttatgtcagactgccaaaacaaaacaaacacaaaaaatcagtagtctgtggtaaagaattgctataggaacagccagtaggggcagttaagctggtcttggtgaatcaggggaagcgtcctagaggaacagatgtccatgctgaggccaaatgctggacaggagttagccagacagggaaattgcattctgggcagaggagacagcaaaggtcaagaaacatgacaactttggaagactgtaacttgttcagaggcagagggtgcaaaggagaaatgaggaaaggtgaagctggagaggtgggcttggtccagctcttgctgggccttttcagccgtgttaaagatttagactgtatccagagggatgttgaactttaagcctaagactgaaaaggtgagaattgtgccttagatcactatggttgcagtgtggagactggtttggaaaggggagaaatcagaggcttttacagccatcccagggagagagaatgaacaccagaattagggtaatggaagatggaaagaagagaaatcgttttatgggttgctcaggagatagaattgacatgtcttgggattgttttgctgtgtaggggagagagacaagtcaagagtatacatcctgtttctgacttggcaactgggtgggtcatgggtctgtttcctgagacagttgtctacagccataccaccgtaagcgccctaaatctcatcagagacagtttatgcaaatggagcttggggaaagagaggtcgtggctggagacagagatttgggcatcatcaacatataggtgtggggagcagagaaggctgaggaagaaagcaggaaacatataaaaaggagagcagggaaaggagccagtgagacaggaaaaacctagtaacgtggtgtgatgaagctaggggaggaaggaaggaaggaagggcggcgtggaacgctgctgatgggtggtggcggggaaaatgaacgagtatccaccagcaacgagaggggcctccatggtcttggtgggagcatttctttggagaggtggaatcagaagccccagatgtcagagggttaaggaataatttggaggaaaagcgtaaaggcagtggaggtgaggagagaattttcaaaatgtttggcagtgattgcaatgaaagaaaaaaatggagggagcagagtatatgcagttgaggaacttttttagtttggagtgtgttaacacgatgttaggaagaaggatcaagtgaaggagaaaggtgaaaatgctggaaggtggggcttagtgatgaaacaaaccttggggacaggtgggcgtggtactgagagtcccagtgaggggagtgccctcaggcaggcgccggtggcttctgtcacaggagggaacagcgctgacattcagctggttcgcactgatacggctcaaccagtttgttaaaacatgtctgttccagtgtcagtaatatacgagtaactgcaatatgcagtaaaaattataaattctaatacaaactcagttcaagctaattaagagatcgcaacagccgttggtaaatggacttcccgctgcatttgagaagctttgcagcgccatctgccggtgtcgtagcatcactgcaggctgagaggctgctttgcgccttcatcttgaagcactctgaaattgcctgtttaaattaccttggaatcatggagttgctactgcttctgaatagtttagcttctactttgattttattgttagtgcattgtcgttcttgtgtcagtagcaagtttcagtgttttaatatttacaaatacaaaaatttttaataaaatattaaagccaaacttgaatgaagagacaacaaa

SEQ ID NO: 13068 - DNA, 5977 bp, Homo sapiens
  source 1..5977: mol_type = unassigned DNA
atggaggcagctgtggtgttagagatgtctgacatcgtcctgcttatcactgatatccgacatccagttgtgaatttcccgccagcactttatgagtatgtgactggagaacttggactggccctggtgctggttttgaacaaggtggatctggccccgccagctcttgtggttgcctggaagcattatttccatcaacactatccccagctccacgtcgtccttttcacctcttttcctcgggacccccgcaccccacaggaccctagtagtgtcttgaagaagagtcggaggcgggggagaggatggactcgggccctggggccagagcagttgctgagagcctgtgaagccatcactgtggggaaagtggacttgagcagctggcgggagaagattgctcgggatgtggctggggccacctggggtaatggctctggggaggaggaggaagaggaggatggcccagcagtcctggtggagcagcagactgattcagcaatggagccaactggcccaacccaagagcgctacaaggatggggtggtgaccatcggctgtgtgggtttccctaatgtgggaaagtcctcgctgatcaatgggctggtggggcggaaagtcgtgagtgtctccagaaccccgggccatacccgatactttcagacctactttcttaccccctctgtgaagctctgtgactgcccaggcctcatcttcccatctcttctgcctaggcagttgcaggttctggcagggatctaccctatcgcccagatccaggagccctacactgctgtgggctacctggcctcccgaattcccgtgcaggccctgctccacctgcgccacccagaggctgaggacccctcagcggaacacccctggtgtgcctgggacatctgtgaagcctgggcagagaaacgtggttacaagacagccaaggcggctcggaatgatgtgtacagagcagccaacagtctcttgcggctggcagtggacggccgcctcagcctgtgttttcatcccccaggctacagtgaacagaaaggcacctgggagtcccatccagagaccacggagctggtggttttgcagggcagggtggggccagcaggtgacgaggaggaggaggaagaggaagagctgagcagctcctgtgaggaggagggagaggaggaccgggatgcggatgaggagggagaaggggatgaggagaccccaacctcggctccagggtccagcctggctggccgaaacccttatgccctgctgggtgaggatgagtgctgagttcctcgcccagcgccatcttccctcccagtatctttgcttttggactgacctgggggtatctcccctctgccaccccaattgtgaataaagattgtttgctttgtagccccttccccagatgaactgaggtgagagcggctgttccaggctaacagctgtgggaggcttctctcctcttctcccttcttttttcatgcattctctttgcaagggaaagttctcttaggagtttagtaggttctcagtctctgaaacctgcttcctctacccattctcccactctgcaccttaggaatcccgttatctacatggggaggggaggtctaaatccagctcccttttggagtttgtgccattctccgatttgagcagcagccctgtgtgccccctgccgccagacctgctcattccaggagcttctgggagaaggaacagtaagagaggaactgtgtcccaagctgatgtctcttaatgagatttttacaggaattgttcaaattcagcaaatatttattgagggtctattgtgtgtcttgacctgtgctgagcaccaagcatataaggatgtaccaccagagcctgacctaaatttgaagcctggccatgatcaaaaccccaccttcaggcacccaagtttttggattaagaagggtgaatgatgttctccaaatcctgggggctcatgcagtataattctaggacttcatgttgatacaaatttttagttaaggcaaaacgcttgtgaaaatgttgattaaatgtgtacgagtagttttaattactggtgaacaactagcgtgcacatttatgatttgagcagaacagccctttaagtacagtgttaagtttcattgtttaaaagcttggcagctacgagtatttgaggtacataggggcgggcacagaaccagcctcctgaattccatttactctggtttgggggtggaacaaagatgatccagtgcagggtctgagctagaacctagcaggtggccagaaccattttagggtttcacctcagcatttcggcagaaatcagctctctcgtgagtcagggcaccttaggctttgctgtatatccctttgttaagccagcagctagactcctagattgaattcttttagaaatgggagaatgagcttttttattgactgccagtgttgtctgtattggatgatagcaaaaagtgtagttggacaggttgcccactagatggagtgagaagtaccagactccttttttctctaaagcagatcctttcaggatctgagtcactgggcagtttctctaatgcgagcagacagaccctgttaaccaaggagcaaaggaaagtatatttaaagaggctaaggtgtttggccacatattgctttaggttcatctccattggtctcagtgtggacataactcctggaattcactccagtgcaaagtttaaataataccagcatgagaatgtacttgaaggtttcccaaaatgtgctagacaagaaagagaaaaggtcccagctgagagaaaaatccacctgtctcccatctggggctctttggcctcactgatagaaaaggaaaaggggcccaagctaagcttactttgagggttcatgatgttcagagatgctcaggggacttctccgctgcaggaggtggggtgaggacattggattcatttcctcaaaatatggagagaaaggagaaaaatcagaattctatttgtacctctgcttcctgtgctgtttatctttgcttgtctttatctttttccacctcaggggtttcatcaggggtatttgggagagtctaggggtggggatgaagaattgactgggagctgaggaggggggatttttatgctgaagacctggcaggaggcaactcctgacacccccacagggttagactgtaaaacctcttccatgacttgctgactctataggataatagcaacaggaaaagaactgagggacgtgcagatgaggatgaatagggccccaacaccagtgcctgaggctgaggttagaactgactacaaagacacaggaaaccaagggcccagtctcccctccacgctgaaatacgcaccctcttgtctgggtcatgtctactatgtgaatacttgaccatggaggtctggggctctggtggcttccatagctggctagtctcttgatggagagaaatcagggcttctctcatccatgctggaatttcatttagatgtcaacttccaagtttccctttttccagatgggattatagtcctgcttctggaacagggtagctgtgtgtggtccaggatagttcaattatctggccctttgttcacttcttacaatcattgatacagtcaacaaaaattggttaaaaacaatatatgccagacatatatccctgagttctgggacaataaccaaaattgaataaggcaatatcctactctcaagcaatagagggtaggaatagaataataataatataatacaatagctctatagcagtatgtaaactataaaagcattattttacgtgtttctattgaactgtcataactaaataagatggttagtactataattatcccaaggattcattcactcatagaacatttgttgagcaattactacctgccagtcacttccaagtggtaagtgagatagaaatggttctttgtggcgctcacaatttattggagaatggaaacacaattacaaaaaaaaagtgtgataagttctgggagaagggtggtacaggatcctgtggggtagtggtggctccatataggagggacattgggatactgatcaggaaggagtgggggacagggctagaagctgcattagtataaagttatgtcagactgccaaaacaaaacaaacacaaaaaatcagtagtctgtggtaaagaattgctataggaacagccagtaggggcagttaagctggtcttggtgaatcaggggaagcgtcctagaggaacagatgtccatgctgaggccaaatgctggacaggagttagccagacagggaaattgcattctgggcagaggagacagcaaaggtcaagaaacatgacaactttggaagactgtaacttgttcagaggcagagggtgcaaaggagaaatgaggaaaggtgaagctggagaggtgggcttggtccagctcttgctgggccttttcagccgtgttaaagatttagactgtatccagagggatgttgaactttaagcctaagactgaaaaggtgagaattgtgccttagatcactatggttgcagtgtggagactggtttggaaaggggagaaatcagaggcttttacagccatcccagggagagagaatgaacaccagaattagggtaatggaagatggaaagaagagaaatcgttttatgggttgctcaggagatagaattgacatgtcttgggattgttttgctgtgtaggggagagagacaagtcaagagtatacatcctgtttctgacttggcaactgggtgggtcatgggtctgtttcctgagacagttgtctacagccataccaccgtaagcgccctaaatctcatcagagacagtttatgcaaatggagcttggggaaagagaggtcgtggctggagacagagatttgggcatcatcaacatataggtgtggggagcagagaaggctgaggaagaaagcaggaaacatataaaaaggagagcagggaaaggagccagtgagacaggaaaaacctagtaacgtggtgtgatgaagctaggggaggaaggaaggaaggaagggcggcgtggaacgctgctgatgggtggtggcggggaaaatgaacgagtatccaccagcaacgagaggggcctccatggtcttggtgggagcatttctttggagaggtggaatcagaagccccagatgtcagagggttaaggaataatttggaggaaaagcgtaaaggcagtggaggtgaggagagaattttcaaaatgtttggcagtgattgcaatgaaagaaaaaaatggagggagcagagtatatgcagttgaggaacttttttagtttggagtgtgttaacacgatgttaggaagaaggatcaagtgaaggagaaaggtgaaaatgctggaaggtggggcttagtgatgaaacaaaccttggggacaggtgggcgtggtactgagagtcccagtgaggggagtgccctcaggcaggcgccggtggcttctgtcacaggagggaacagcgctgacattcagctggttcgcactgatacggctcaaccagtttgttaaaacatgtctgttccagtgtcagtaatatacgagtaactgcaatatgcagtaaaaattataaattctaatacaaactcagttcaagctaattaagagatcgcaacagccgttggtaaatggacttcccgctgcatttgagaagctttgcagcgccatctgccggtgtcgtagcatcactgcaggctgagaggctgctttgcgccttcatcttgaagcactctgaaattgcctgtttaaattaccttggaatcatggagttgctactgcttctgaatagtttagcttctactttgattttattgttagtgcattgtcgttcttgtgtcagtagcaagtttcagtgttttaatatttacaaatacaaaaatttttaataaaatattaaagccaaacttgaatgaagag

SEQ ID NO: 13069 - DNA, 7490 bp, Homo sapiens; identical to SEQ ID NO: 13065
  source 1..7490: mol_type = unassigned DNA

SEQ ID NO: 13070 - DNA, 1717 bp, Homo sapiens
  source 1..1717: mol_type = unassigned DNA
attccacttccggaaggttgcggagaacatctgcggcggccgcattccggagccaactgcctccctccgtctctgccaggcatggcggcaacctcacaccttccctttgctgcgtttctataaatgctttgaaaaaattactcttttcttccctcgctggaaaacaccacaaccagcagccttctcaggggctgggtccacgaggctacgacccaaatcgataccgactgcattttgagagagacagcagggaggaggtagagaggagaaagagagcagcccgggagcaagttctacagccggtcagtgctgagttgttggagctggacatccgggaggtgtatcagcctggctcagttctggactttcctcgacgtcctccttggagctatgagatgtccaaggagcaactaatgagccaagaggaacggagcttccaagactatcttgggaagattcatggggcttactcctctgagaaactcagctactttgagcacaatctggagacatggaggcagctgtggcgggtgttagagatgtctgacatcgtcctgcttatcactgatatccgacatccagttgtgaatttcccgccagcactttatgagtatgtgactggagaacttggactggccctggtgctggttttgaacaaggtggatctggccccgccagctcttgtggttgcctggaagcattatttccatcaacactatccccagctccacgtcgtccttttcacctcttttcctcgggacccccgcaccccacaggaccctagtagtgtcttgaagaagagtcggaggcgggggagaggatggactcgggccctggggccagagcagttgctgagagcctgtgaagccatcactgtggggaaaggtttccctaatgtgggaaagtcctcgctgatcaatgggctggtggggcggaaagtcgtgagtgtctccagaaccccgggccatacccgatactttcagacctactttcttaccccctctgtgaagctctgtgactgcccaggcctcatcttcccatctcttctgcctaggcagttgcaggttctggcagggatctaccctatcgcccagatccaggagccctacactgctgtgggctacctggcctcccgaattcccgtgcaggccctgctccacctgcgccacccagaggctgaggacccctcagcggaacacccctggtgtgcctgggacatctgtgaagcctgggcagagaaacgtggttacaagacagccaaggcggctcggaatgatgtgtacagagcagccaacagtctcttgcggctggcagtggacggccgcctcagcctgtgttttcatcccccaggctacagtgaacagaaaggcacctgggagtcccatccagagaccacggagctggtggttttgcagggcagggtggggccagcaggtgacgaggaggaggaggaagaggaagagctgagcagctcctgtgaggaggagggagaggaggaccgggatgcggatgaggagggagaaggggatgaggagaccccaacctcggctccagggtccagcctggctggccgaaacccttatgccctgctgggtgaggatgagtgctgagttcctcgcccagcgccatcttccctcccagtatctttgcttttggactgacctgggggtatctcccctctgccaccccaattgtgaataaagattgtttgctttgt

SEQ ID NO: 13071 - DNA, 1093 bp, Homo sapiens
  source 1..1093: mol_type = unassigned DNA
gcacatctggaaggaggggtgtgcccgctgcacctctggggatcgtgggagggggtcgtgggaccgcgtcaaccctcgcggcctatcgcggaggggatcccccaccccccctacatctggaaggggtggggaaggatggagagttgggggaggggaatccctccagctagcacggggcgccgtccccactgctccctgaaggagtgactccccccacgcacatccgggagggtcccaaatagggtgtctgggaggactgaacatcggaagaagttgagtgggatgaaagggagtcaggccgatgggggagagggtcttatggcccctgagagctggccagcactggcgtcaccggcccctccccgcagggcttcaagatgggctgcgctccagttccaacagccgcagcgggagccgggagcggcgagaggaacagaccgacacctcggacggggagtctgtgacccatcatatccgcaggcttaaccagcagccttctcaggggctgggtccacgaggctacgacccaaatcgataccgactgcattttgagagagacagcagggaggaggtagagaggagaaagagagcagcccgggagcaagttctacagccggtcagtgctgagttgttggagctggacatccgggaggtgtatcagcctggctcagttctggactttcctcgacgtcctccttggagctatgagatgtccaaggagcaactaatgagccaagaggaacggagcttccaagactatcttgggaagattcatggggcttactcctctgagaaactcagctactttgagcacaatctggagacatggaggcagctgtggcgggtgttagagatgtctgacatcgtcctgcttatcactgatatccgacatccagttgtgaatttcccgccagcactttatgagtatgtgactggagaacttggactggccctggtgctggttttgaacaaggtggatctggccccgccagctcttgtggttgcctggaagcattatttccatcaacactatccccagctccacgtcgtccttttcacctcttttcctcgggacccccgcaccccacaggat

SEQ ID NO: 13072 - DNA, 1093 bp, Homo sapiens; identical to SEQ ID NO: 13066
  source 1..1093: mol_type = unassigned DNA

SEQ ID NO: 13073 - DNA, 1093 bp, Homo sapiens; identical to SEQ ID NO: 13071
  source 1..1093: mol_type = unassigned DNA

SEQ ID NO: 13074 - DNA, 7490 bp, Homo sapiens; identical to SEQ ID NO: 13063
  source 1..7490: mol_type = unassigned DNA

SEQ ID NO: 13075 - DNA, 7490 bp, Homo sapiens
  source 1..7490: mol_type = unassigned DNA
tgcctccctccgtctctgccaggcatggcggcaacctcacaccttccctttgctgcgtttctataaatgctttgaaaaaattactcttttcttccctcgctggaaaacaccacaaccagctcctcagagtgtgtcacagagtcaacaggctctcgggccagagggcctgagaagaggactgtcgcaccgtaagatcgccacatccggtcctcggttactatggtaacagctgcaggcacaacttcgtgccctttgacctccccccaaaagtccttgtcccgcttgggtttcccttctcgcccgcttttgcacttatgatctgtaaacctgctccttatcatcgttcccacaaggaatttgggtcccaacaggtcggcacccaggactctcagaccgccgccctcccctaaagacctctgaccgtgcccccggtgtagtccagcaacctggacgcagtctcggctttccactaaggtcaagcccggggctttgtagtatagcctcagcgtgtccacgccccctctcccctaggtagtaggccccgccctccgctccgccgccccctccaggtgagtggtaggttctcccgggagcgcaaggtagtgatgacacgcgccccccctcctccgaacgcgagttggtagcgtccgtgacggagttagcctggtcctcccacgcgcgcctccttcctcgccgccggggcgccctctcggtgccactggctctcacgtgccagtagcccaccccgcatcatcctctcgcctcgctcctggagggaagtgactatatctcccccgtccgccttccatcgccgccgcggcggtaattctgtcgggcccgcccgctgacgtcacctgctagccccgcctcctctagggtcccgggcccctgcggcgggggctgccccggggggcagtcagttgaggcggcgggagctcggcggagggcgggccaggtgactggtccgggccatgccgaggaagaagccattcagcgtgaagcagaagaagaagcagttgcaggacaaacgggagcggaagagagggcttcaagatgggctgcgctccagttccaacagccgcagcgggagccgggagcggcgagaggaacagaccgacacctcggacggggagtctgtgacccatcatatccgcaggcttaaccagcagccttctcaggggctgggtccacgaggctacgacccaaatcgataccgactgcattttgagagagacagcagggaggaggtagagaggagaaagagagcagcccgggagcaagttctacagccggtcagtgctgagttgttggagctggacatccgggaggtgtatcagcctggctcagttctggactttcctcgacgtcctccttggagctatgagatgtccaaggagcaactaatgagccaagaggaacggagcttccaagactatcttgggaagattcatggggcttactcctctgagaaactcagctactttgagcacaatctggagacatggaggcagctgtggcgggtgttagagatgtctgacatcgtcctgcttatcactgatatccgacatccagttgtgaatttcccgccagcactttatgagtatgtgactggagaacttggactggccctggtgctggttttgaacaaggtggatctggccccgccagctcttgtggttgcctggaagcattatttccatcaacactatccccagctccacgtcgtccttttcacctcttttcctcgggacccccgcaccccacaggatcctagtagtgtcttgaagaagagtcggaggcgggggagaggatggactcgggccctggggccagagcagttgctgagagcctgtgaagccatcactgtggggaaagtggacttgagcagctggcgggagaagattgctcgggatgtggctggggccacctggggtaatggctctggggaggaggaggaagaggaggatggcccagcagtcctggtggagcagcagactgattcagcaatggagccaactggcccaacccaagagcgctacaaggatggggtggtgaccatcggctgtgtgggtttccctaatgtgggaaagtcctcgctgatcaatgggctggtggggcggaaagtcgtgagtgtctccagaaccccgggccatacccgatactttcagacctactttcttaccccctctgtgaagctctgtgactgcccaggcctcatcttcccatctcttctgcctaggcagttgcaggttctggcggggatctaccctatcgcccagatccaggagccctacactgctgtgggctacctggcctcccgaattcccgtgcaggccctgctccacctgcgccacccagaggctgaggacccctcagcggaacacccctggtgtgcctgggacatctgtgaagcctgggcagagaaacgtggttacaagacagccaaggcggctcggaatgatgtgtacagagcagccaacagtctcttgcggctggcagtggacggccgcctcagcctgtgttttcatcccccaggctacagtgaacagaaaggcacctgggagtcccatccagagaccacggagctggtggttttgcagggcagggtggggccagcaggtgacgaggaggaggaggaagaggaagagctgagcagctcctgtgaggaggagggagaggaggaccgggatgcggatgaggagggagaaggggatgaggagaccccaacctcggctccagggtccagcctggctggccgaaacccttatgccctgctgggtgaggatgagtgctgagttcctcgcccagcgccatcttccctcccagtatctttgcttttggactgacctgggggtatctcccctctgccaccccaattgtgaataaagattgtttgctttgtagccccttccccagatgaactgaggtgagagcggctgttccaggctaacagctgtgggaggcttctctcctcttctcccttcttttttcatgcattctctttgcaagggaaagttctcttaggagtttagtaggttctcagtctctgaaacctgcttcctctacccattctcccactctgcaccttaggaatcccgttatctacatggggaggggaggtctaaatccagctcccttttggagtttgtgccattctccgatttgagcagcagccctgtgtgccccctgccgccagacctgctcattccaggagcttctgggagaaggaacagtaagagaggaactgtgtcccaagctgatgtctcttaatgagatttttacaggaattgttcaaattcagcaaatatttattgagggtctattgtgtgtcttgacctgtgctgagcaccaagcatataaggatgtaccaccagagcctgacctaaatttgaagcctggccatgatcaaaaccccaccttcaggcacccaagtttttggattaagaagggtgaatgatgttctccaaatcctgggggctcatgcagtataattctaggacttcatgttgatacaaatttttagttaaggcaaaacgcttgtgaaaatgttgattaaatgtgtacgagtagttttaattactggtgaacaactagcgtgcacatttatgatttgagcagaacagccctttaagtacagtgttaagtttcattgtttaaaagcttggcagctacgagtatttgaggtacataggggcgggcacagaaccagcctcctgaattccatttactctggtttgggggtggaacaaagatgatccagtgcagggtctgagctagaacctagcaggtggccagaaccattttagggtttcacctcagcatttcggcagaaatcagctctctcgtgagtcagggcaccttaggctttgctgtatatccctttgttaagccagcagctagactcctagattgaattcttttagaaatgggagaatgagcttttttattgactgccagtgttgtctgtattggatgatagcaaaaagtgtagttggacaggttgcccactagatggagtgagaagtaccagactccttttttctctaaagcagatcctttcaggatctgagtcactgggcagtttctctaatgcgagcagacagaccctgttaaccaaggagcaaaggaaagtatatttaaagaggctaaggtgtttggccacatattgctttaggttcatctccattggtctcagtgtggacataactcctggaattcactccagtgcaaagtttaaataataccagcatgagaatgtacttgaaggtttcccaaaatgtgctagacaagaaagagaaaaggtcccagctgagagaaaaatccacctgtctcccatctggggctctttggcctcactgatagaaaaggaaaaggggcccaagctaagcttactttgagggttcatgatgttcagagatgctcaggggacttctccgctgcaggaggtggggtgaggacattggattcatttcctcaaaatgtggagagaaaggagaaaaatcagaattctatttgtacctctgcttcctgtgctgtttatctttgcttgtctttatctttttccacctcaggggtttcatcaggggtatttgggagagtctaggggtggggatgaagaattgactgggagctgaggaggggggatttttatgctgaagacctggcaggaggcaactcctgacacccccacagggttagactgtaaaacctcttccatgacttgctgactctataggataatagcaacaggaaaagaactgagggacgtgcagatgaggatgaatagggccccaacaccagtgcctgaggctgaggttagaactgactacaaagacacaggaaaccaagggcccagtctcccctccacgctgaaatacgcaccctcttgtctgggtcatgtctactatgtgaatacttgaccatggaggtctggggctctggtggcttccatagctggctagtctcttgatggagagaaatcagggcttctctcatccatgctggaatttcatttagatgtcaacttccaagtttccctttttccagatgggattatagtcctgcttctggaacagggtagctgtgtgtggtccaggatagttcaattatctggccctttgttcacttcttacaatcattgatacagtcaacaaaaattggttaaaaacaatatatgccagacatatatccctgagttctgggacaataaccaaaattgaataaggcaatatcctactctcaagcaatagagggtaggaatagaataataataatataatacaatagctctatagcagtatgtaaactataaaagcattattttacgtgtttctattgaactgtcataactaaataagatggttagtactataattatcccaaggattcattcactcatagaacatttgttgagcaattactacctgccagtcacttccaagtggtaagtgagatagaaatggttctttgtggcgctcacaatttattggagaatggaaacacaattacaaaaaaaaagtgtgataagttctgggagaagggtggtacaggatcctgtggggtagtggtggctccatataggagggacattgggatactgatcaggaaggagtgggggacagggctagaagctgcattagtataaagttatgtcagactgccaaaacaaaacaaacacaaaaaatcagtagtctgtggtaaagaattgctataggaacagccagtaggggcagttaagctggtcttggtgaatcaggggaagcgtcctagaggaacagatgtccatgctgaggccaaatgctggacaggagttagccagacagggaaattgcattctgggcagaggagacagcaaaggtcaagaaacatgacaactttggaagactgtaacttgttcagaggcagagggtgcaaaggagaaatgaggaaaggtgaagctggagaggtgggcttggtccagctcttgctgggccttttcagccgtgttaaagatttagactgtatccagagggatgttgaactttaagcctaagactgaaaaggtgagaattgtgccttagatcactatggttgcagtgtggagactggtttggaaaggggagaaatcagaggcttttacagccatcccagggagagagaatgaacaccagaattagggtaatggaagatggaaagaagagaaatcgttttatgggttgctcaggagatagaattgacatgtcttgggattgttttgctgtgtaggggagagagacaagtcaagagtatacatcctgtttctgacttggcaactgggtgggtcatgggtctgtttcctgagacagttgtctacagccataccaccgtaagcgccctaaatctcatcagagacagtttatgcaaatggagcttggggaaagagaggtcgtggctggagacagagatttgggcatcatcaacatataggtgtggggagcagagaaggctgaggaagaaagcaggaaacatataaaaaggagagcagggaaaggagccagtgagacaggaaaaacctagtaacgtggtgtgatgaagctaggggaggaaggaaggaaggaagggcggcgtggaacgctgctgatgggtggtggcggggaaaatgaacgagtatccaccagcaacgagaggggcctccatggtcttggtgggagcatttctttggagaggtggaatcagaagccccagatgtcagagggttaaggaataatttggaggaaaagcgtaaaggcagtggaggtgaggagagaattttcaaaatgtttggcagtgattgcaatgaaagaaaaaaatggagggagcagagtatatgcagttgaggaacttttttagtttggagtgtgttaacacgatgttaggaagaaggatcaagtgaaggagaaaggtgaaaatgctggaaggtggggcttagtgatgaaacaaaccttggggacaggtgggcgtggtactgagagtcccagtgaggggagtgccctcaggcaggcgccggtggcttctgtcacaggagggaacagcgctgacattcagctggttcgcactgatacggctcaaccagtttgttaaaacatgtctgttccagtgtcagtaatatacgagtaactgcaatatgcagtaaaaattataaattctaatacaaactcagttcaagctaattaagagatcgcaacagccgttggtaaatggacttcccgctgcatttgagaagctttgcagcgccatctgccggtgtcgtagcatcactgcaggctgagaggctgctttgcgccttcatcttgaagcactctgaaattgcctgtttaaattaccttggaatcatggagttgctactgcttctgaatagtttagcttctactttgattttattgttagtgcattgtcgttcttgtgtcagtagcaagtttcagtgttttaatatttacaaatacaaaaatttttaataaaatattaaagccaaacttgaatgaagagacaacaaa

SEQ ID NO: 13076 - DNA, 1093 bp, Homo sapiens; identical to SEQ ID NO: 13066
  source 1..1093: mol_type = unassigned DNA

SEQ ID NO: 13077 - DNA, 1093 bp, Homo sapiens; identical to SEQ ID NO: 13071
  source 1..1093: mol_type = unassigned DNA

SEQ ID NO: 13078 - DNA, 7490 bp, Homo sapiens; identical to SEQ ID NO: 13063
  source 1..7490: mol_type = unassigned DNA

SEQ ID NO: 13079 - DNA, 198 bp, Homo sapiens
  source 1..198: mol_type = unassigned DNA
gttgtgaatttcccgccagcactttatgagtatgtgactggagaacttggactggccctggtgctggttttgaacaaggtggatctggccccgccagctcttgtggttgcctggaagcattatttccatcaacactatccccagctccacgtcgtccttttcacctcttttcctcgggacccccgcaccccacaggat

SEQ ID NO: 13080 - DNA, 1094 bp, Homo sapiens
  source 1..1094: mol_type = unassigned DNA
gcacatctggaaggaggggtgtgcccgctgcacctctggggatcgtgggagggggtcgtgggaccgcgtcaaccctcgcggcctatcgcggaggggatcccccaccccccctacatctggaaggggtggggaaggatggagagttgggggaggggaatccctccagctagcacggggcgccgtccccactgctccctgaaggagtgactccccccacgcacatccgggagggtcccaaatagggtgtctgggaggactgaacatcggaagaagttgagtgggatgaaagggagtcaggccgatgggggagagggtcttatggcccctgagagctggccagcactggcgtcaccggcccctccccgcagggcttcaagatgggctgcgctccagttccaacagccgcagcgggagccgggagcggcgagaggaacagaccgacacctcggacggggagtctgtgacccatcatatccgcaggcttaaccagcagccttctcaggggctgggtccacgaggctacgacccaaatcgataccgactgcattttgagagagacagcagggaggaggtagagaggagaaagagagcagcccgggagcaagttctacagccggtcagtgctgagttgttggagctggacatccgggaggtgtatcagcctggctcagttctggactttcctcgacgtcctccttggagctatgagatgtccaaggagcaactaatgagccaagaggaacggagcttccaagactatcttgggaagattcatggggcttactcctctgagaaactcagctactttgagcacaatctggagacatggaggcagctgtggcgggtgttagagatgtctgacatcgtcctgcttatcactgatatccgacatccagttgtgaatttcccgccagcactttatgagtatgtgactggagaacttggactggccctggtgctggttttgaacaaggtggatctggccccgccagctcttgtggttgcctggaagcattatttccatcaacactatccccagctccacgtcgtccttttcacctcttttcctcgggacccccgcaccccacaggatc

SEQ ID NO: 13081 - DNA, 1717 bp, Homo sapiens
  source 1..1717: mol_type = unassigned DNA
attccacttccggaaggttgcggagaacatctgcggcggccgcattccggagccaactgcctccctccgtctctgccaggcatggcggcaacctcacaccttccctttgctgcgtttctataaatgctttgaaaaaattactcttttcttccctcgctggaaaacaccacaaccagcagccttctcaggggctgggtccacgaggctacgacccaaatcgataccgactgcattttgagagagacagcagggaggaggtagagaggagaaagagagcagcccgggagcaagttctacagccggtcagtgctgagttgttggagctggacatccgggaggtgtatcagcctggctcagttctggactttcctcgacgtcctccttggagctatgagatgtccaaggagcaactaatgagccaagaggaacggagcttccaagactatcttgggaagattcatggggcttactcctctgagaaactcagctactttgagcacaatctggagacatggaggcagctgtggcgggtgttagagatgtctgacatcgtcctgcttatcactgatatccgacatccagttgtgaatttcccgccagcactttatgagtatgtgactggagaacttggactggccctggtgctggttttgaacaaggtggatctggccccgccagctcttgtggttgcctggaagcattatttccatcaacactatccccagctccacgtcgtccttttcacctcttttcctcgggacccccgcaccccacaggatcctagtagtgtcttgaagaagagtcggaggcgggggagaggatggactcgggccctggggccagagcagttgctgagagcctgtgaagccatcactgtggggaaaggtttccctaatgtgggaaagtcctcgctgatcaatgggctggtggggcggaaagtcgtgagtgtctccagaaccccgggccatacccgatactttcagacctactttcttaccccctctgtgaagctctgtgactgcccaggcctcatcttcccatctcttctgcctaggcagttgcaggttctggcagggatctaccctatcgcccagatccaggagccctacactgctgtgggctacctggcctcccgaattcccgtgcaggccctgctccacctgcgccacccagaggctgaggacccctcagcggaacacccctggtgtgcctgggacatctgtgaagcctgggcagagaaacgtggttacaagacagccaaggcggctcggaatgatgtgtacagagcagccaacagtctcttgcggctggcagtggacggccgcctcagcctgtgttttcatcccccaggctacagtgaacagaaaggcacctgggagtcccatccagagaccacggagctggtggttttgcagggcagggtggggccagcaggtgacgaggaggaggaggaagaggaagagctgagcagctcctgtgaggaggagggagaggaggaccgggatgcggatgaggagggagaaggggatgaggagaccccaacctcggctccagggtccagcctggctggccgaaacccttatgccctgctgggtgaggatgagtgctgagttcctcgcccagcgccatcttccctcccagtatctttgcttttggactgacctgggggtatctcccctctgccaccccaattgtgaataaagattgtttgctttgt

SEQ ID NO: 13082 - DNA, 1486 bp, Homo sapiens
  source 1..1486: mol_type = unassigned DNA
gtgacggagttagcctggtcctcccacgcgcgcctccttcctcgccgccggggcgccctctcggtgccactggctctcacgtgccagtagcccaccccgcatcatcctctcgcctcgctcctggagggaagtgactatatctcccccgtccgccttccatcgccgccgcggcggtaattctgtcgggcccgcccgctgacgtcacctgctagccccgcctcctctagggtcccgggcccctgcggcgggggctgccccggggggcagtcagttgaggcggcgggagctcggcggagggcgggccaggtgactggtccgggccatgccgaggaagaagccattcagcgtcctggtggagcagcagactgattcagcaatggagccaactggcccaacccaagagcgctacaaggatggggtggtgaccatcggctgtgtgggtttccctaatgtgggaaagtcctcgctgatcaatgggctggtggggcggaaagtcgtgagtgtctccagaaccccgggccatacccgatactttcagacctactttcttaccccctctgtgaagctctgtgactgcccaggcctcatcttcccatctcttctgcctaggcagttgcaggttctggcagggatctaccctatcgcccagatccaggagccctacactgctgtgggctacctggcctcccgaattcccgtgcaggccctgctccacctgcgccacccagaggctgaggacccctcagcggaacacccctggtgtgcctgggacatctgtgaagcctgggcagagaaacgtggttacaagacagccaaggcggctcggaatgatgtgtacagagcagccaacagtctcttgcggctggcagtggacggccgcctcagcctgtgttttcatcccccaggctacagtgaacagaaaggcacctgggagtcccatccagagaccacggagctggtggttttgcagggcagggtggggccagcaggtgacgaggaggaggaggaagaggaagagctgagcagctcctgtgaggaggagggagaggaggaccgggatgcggatgaggagggagaaggggatgaggagaccccaacctcggctccagggtccagcctggctggccgaaacccttatgccctgctgggtgaggatgagtgctgagttcctcgcccagcgccatcttccctcccagtatctttgcttttggactgacctgggggtatctcccctctgccaccccaattgtgaataaagattgtttgctttgtagccccttccccagatgaactgaggtgagagcggctgttccaggctaacagctgtgggaggcttctctcctcttctcccttcttttttcatgcattctctttgcaagggaaagttctcttaggagtttagtaggttctcagtctctgaaacctgcttcctctacccattctcccactctgcaccttaggaatcccgttatctacatggggaggg

SEQ ID NO: 13083 - DNA, 1486 bp, Homo sapiens
  source 1..1486: mol_type = unassigned DNA
gtgacggagttagcctggtcctcccacgcgcgcctccttcctcgccgccggggcgccctctcggtgccactggctctcacgtgccagtagcccaccccgcatcatcctctcgcctcgctcctggagggaagtgactatatctcccccgtccgccttccatcgccgccgcggcggtaattctgtcgggcccgcccgctgacgtcacctgctagccccgcctcctctagggtcccgggcccctgcggcgggggctgccccggggggcagtcagttgaggcggcgggagctcggcggagggcgggccaggtgactggtccgggccatgccgaggaagaagccattcagcgtcctggtggagcagcagactgattcagcaatggagccaactggcccaacccaagagcgctacaaggatggggtggtgaccatcggctgtgtgggtttccctaatgtgggaaagtcctcgctgatcaatgggctggtggggcggaaagtcgtgagtgtctccagaaccccgggccatacccgatactttcagacctactttcttaccccctctgtgaagctctgtgactgcccaggcctcatcttcccatctcttctgcctaggcagttgcaggttctggcggggatctaccctatcgcccagatccaggagccctacactgctgtgggctacctggcctcccgaattcccgtgcaggccctgctccacctgcgccacccagaggctgaggacccctcagcggaacacccctggtgtgcctgggacatctgtgaagcctgggcagagaaacgtggttacaagacagccaaggcggctcggaatgatgtgtacagagcagccaacagtctcttgcggctggcagtggacggccgcctcagcctgtgttttcatcccccaggctacagtgaacagaaaggcacctgggagtcccatccagagaccacggagctggtggttttgcagggcagggtggggccagcaggtgacgaggaggaggaggaagaggaagagctgagcagctcctgtgaggaggagggagaggaggaccgggatgcggatgaggagggagaaggggatgaggagaccccaacctcggctccagggtccagcctggctggccgaaacccttatgccctgctgggtgaggatgagtgctgagttcctcgcccagcgccatcttccctcccagtatctttgcttttggactgacctgggggtatctcccctctgccaccccaattgtgaataaagattgtttgctttgtagccccttccccagatgaactgaggtgagagcggctgttccaggctaacagctgtgggaggcttctctcctcttctcccttcttttttcatgcattctctttgcaagggaaagttctcttaggagtttagtaggttctcagtctctgaaacctgcttcctctacccattctcccactctgcaccttaggaatcccgttatctacatggggaggg

SEQ ID NO: 13084 - DNA, 5977 bp, Homo sapiens; identical to SEQ ID NO: 13068
  source 1..5977: mol_type = unassigned DNA

SEQ ID NO: 13085 - DNA, 1717 bp, Homo sapiens; identical to SEQ ID NO: 13070
  source 1..1717: mol_type = unassigned DNA

SEQ ID NO: 13086 - DNA, 1717 bp, Homo sapiens; identical to SEQ ID NO: 13081
  source 1..1717: mol_type = unassigned DNA

SEQ ID NO: 13087 - DNA, 1486 bp, Homo sapiens; identical to SEQ ID NO: 13082
  source 1..1486: mol_type = unassigned DNA

SEQ ID NO: 13088 - DNA, 5977 bp, Homo sapiens
  source 1..5977: mol_type = unassigned DNA
atggaggcagctgtggtgttagagatgtctgacatcgtcctgcttatcactgatatccgacatccagttgtgaatttcccgccagcactttatgagtatgtgactggagaacttggactggccctggtgctggttttgaacaaggtggatctggccccgccagctcttgtggttgcctggaagcattatttccatcaacactatccccagctccacgtcgtccttttcacctcttttcctcgggacccccgcaccccacaggatcctagtagtgtcttgaagaagagtcggaggcgggggagaggatggactcgggccctggggccagagcagttgctgagagcctgtgaagccatcactgtggggaaagtggacttgagcagctggcgggagaagattgctcgggatgtggctggggccacctggggtaatggctctggggaggaggaggaagaggaggatggcccagcagtcctggtggagcagcagactgattcagcaatggagccaactggcccaacccaagagcgctacaaggatggggtggtgaccatcggctgtgtgggtttccctaatgtgggaaagtcctcgctgatcaatgggctggtggggcggaaagtcgtgagtgtctccagaaccccgggccatacccgatactttcagacctactttcttaccccctctgtgaagctctgtgactgcccaggcctcatcttcccatctcttctgcctaggcagttgcaggttctggcggggatctaccctatcgcccagatccaggagccctacactgctgtgggctacctggcctcccgaattcccgtgcaggccctgctccacctgcgccacccagaggctgaggacccctcagcggaacacccctggtgtgcctgggacatctgtgaagcctgggcagagaaacgtggttacaagacagccaaggcggctcggaatgatgtgtacagagcagccaacagtctcttgcggctggcagtggacggccgcctcagcctgtgttttcatcccccaggctacagtgaacagaaaggcacctgggagtcccatccagagaccacggagctggtggttttgcagggcagggtggggccagcaggtgacgaggaggaggaggaagaggaagagctgagcagctcctgtgaggaggagggagaggaggaccgggatgcggatgaggagggagaaggggatgaggagaccccaacctcggctccagggtccagcctggctggccgaaacccttatgccctgctgggtgaggatgagtgctgagttcctcgcccagcgccatcttccctcccagtatctttgcttttggactgacctgggggtatctcccctctgccaccccaattgtgaataaagattgtttgctttgtagccccttccccagatgaactgaggtgagagcggctgttccaggctaacagctgtgggaggcttctctcctcttctcccttcttttttcatgcattctctttgcaagggaaagttctcttaggagtttagtaggttctcagtctctgaaacctgcttcctctacccattctcccactctgcaccttaggaatcccgttatctacatggggaggggaggtctaaatccagctcccttttggagtttgtgccattctccgatttgagcagcagccctgtgtgccccctgccgccagacctgctcattccaggagcttctgggagaaggaacagtaagagaggaactgtgtcccaagctgatgtctcttaatgagatttttacaggaattgttcaaattcagcaaatatttattgagggtctattgtgtgtcttgacctgtgctgagcaccaagcatataaggatgtaccaccagagcctgacctaaatttgaagcctggccatgatcaaaaccccaccttcaggcacccaagtttttggattaagaagggtgaatgatgttctccaaatcctgggggctcatgcagtataattctaggacttcatgttgatacaaatttttagttaaggcaaaacgcttgtgaaaatgttgattaaatgtgtacgagtagttttaattactggtgaacaactagcgtgcacatttatgatttgagcagaacagccctttaagtacagtgttaagtttcattgtttaaaagcttggcagctacgagtatttgaggtacataggggcgggcacagaaccagcctcctgaattccatttactctggtttgggggtggaacaaagatgatccagtgcagggtctgagctagaacctagcaggtggccagaaccattttagggtttcacctcagcatttcggcagaaatcagctctctcgtgagtcagggcaccttaggctttgctgtatatccctttgttaagccagcagctagactcctagattgaattcttttagaaatgggagaatgagcttttttattgactgccagtgttgtctgtattggatgatagcaaaaagtgtagttggacaggttgcccactagatggagtgagaagtaccagactccttttttctctaaagcagatcctttcaggatctgagtcactgggcagtttctctaatgcgagcagacagaccctgttaaccaaggagcaaaggaaagtatatttaaagaggctaaggtgtttggccacatattgctttaggttcatctccattggtctcagtgtggacataactcctggaattcactccagtgcaaagtttaaataataccagcatgagaatgtacttgaaggtttcccaaaatgtgctagacaagaaagagaaaaggtcccagctgagagaaaaatccacctgtctcccatctggggctctttggcctcactgatagaaaaggaaaaggggcccaagctaagcttactttgagggttcatgatgttcagagatgctcaggggacttctccgctgcaggaggtggggtgaggacattggattcatttcctcaaaatgtggagagaaaggagaaaaatcagaattctatttgtacctctgcttcctgtgctgtttatctttgcttgtctttatctttttccacctcaggggtttcatcaggggtatttgggagagtctaggggtggggatgaagaattgactgggagctgaggaggggggatttttatgctgaagacctggcaggaggcaactcctgacacccccacagggttagactgtaaaacctcttccatgacttgctgactctataggataatagcaacaggaaaagaactgagggacgtgcagatgaggatgaatagggccccaacaccagtgcctgaggctgaggttagaactgactacaaagacacaggaaaccaagggcccagtctcccctccacgctgaaatacgcaccctcttgtctgggtcatgtctactatgtgaatacttgaccatggaggtctggggctctggtggcttccatagctggctagtctcttgatggagagaaatcagggcttctctcatccatgctggaatttcatttagatgtcaacttccaagtttccctttttccagatgggattatagtcctgcttctggaacagggtagctgtgtgtggtccaggatagttcaattatctggccctttgttcacttcttacaatcattgatacagtcaacaaaaattggttaaaaacaatatatgccagacatatatccctgagttctgggacaataaccaaaattgaataaggcaatatcctactctcaagcaatagagggtaggaatagaataataataatataatacaatagctctatagcagtatgtaaactataaaagcattattttacgtgtttctattgaactgtcataactaaataagatggttagtactataattatcccaaggattcattcactcatagaacatttgttgagcaattactacctgccagtcacttccaagtggtaagtgagatagaaatggttctttgtggcgctcacaatttattggagaatggaaacacaattacaaaaaaaaagtgtgataagttctgggagaagggtggtacaggatcctgtggggtagtggtggctccatataggagggacattgggatactgatcaggaaggagtgggggacagggctagaagctgcattagtataaagttatgtcagactgccaaaacaaaacaaacacaaaaaatcagtagtctgtggtaaagaattgctataggaacagccagtaggggcagttaagctggtcttggtgaatcaggggaagcgtcctagaggaacagatgtccatgctgaggccaaatgctggacaggagttagccagacagggaaattgcattctgggcagaggagacagcaaaggtcaagaaacatgacaactttggaagactgtaacttgttcagaggcagagggtgcaaaggagaaatgaggaaaggtgaagctggagaggtgggcttggtccagctcttgctgggccttttcagccgtgttaaagatttagactgtatccagagggatgttgaactttaagcctaagactgaaaaggtgagaattgtgccttagatcactatggttgcagtgtggagactggtttggaaaggggagaaatcagaggcttttacagccatcccagggagagagaatgaacaccagaattagggtaatggaagatggaaagaagagaaatcgttttatgggttgctcaggagatagaattgacatgtcttgggattgttttgctgtgtaggggagagagacaagtcaagagtatacatcctgtttctgacttggcaactgggtgggtcatgggtctgtttcctgagacagttgtctacagccataccaccgtaagcgccctaaatctcatcagagacagtttatgcaaatggagcttggggaaagagaggtcgtggctggagacagagatttgggcatcatcaacatataggtgtggggagcagagaaggctgaggaagaaagcaggaaacatataaaaaggagagcagggaaaggagccagtgagacaggaaaaacctagtaacgtggtgtgatgaagctaggggaggaaggaaggaaggaagggcggcgtggaacgctgctgatgggtggtggcggggaaaatgaacgagtatccaccagcaacgagaggggcctccatggtcttggtgggagcatttctttggagaggtggaatcagaagccccagatgtcagagggttaaggaataatttggaggaaaagcgtaaaggcagtggaggtgaggagagaattttcaaaatgtttggcagtgattgcaatgaaagaaaaaaatggagggagcagagtatatgcagttgaggaacttttttagtttggagtgtgttaacacgatgttaggaagaaggatcaagtgaaggagaaaggtgaaaatgctggaaggtggggcttagtgatgaaacaaaccttggggacaggtgggcgtggtactgagagtcccagtgaggggagtgccctcaggcaggcgccggtggcttctgtcacaggagggaacagcgctgacattcagctggttcgcactgatacggctcaaccagtttgttaaaacatgtctgttccagtgtcagtaatatacgagtaactgcaatatgcagtaaaaattataaattctaatacaaactcagttcaagctaattaagagatcgcaacagccgttggtaaatggacttcccgctgcatttgagaagctttgcagcgccatctgccggtgtcgtagcatcactgcaggctgagaggctgctttgcgccttcatcttgaagcactctgaaattgcctgtttaaattaccttggaatcatggagttgctactgcttctgaatagtttagcttctactttgattttattgttagtgcattgtcgttcttgtgtcagtagcaagtttcagtgttttaatatttacaaatacaaaaatttttaataaaatattaaagccaaacttgaatgaagag

SEQ ID NO: 13089 - DNA, 5977 bp, Homo sapiens
  source 1..5977: mol_type = unassigned DNA
atggaggcagctgtggtgttagagatgtctgacatcgtcctgcttatcactgatatccgacatccagttgtgaatttcccgccagcactttatgagtatgtgactggagaacttggactggccctggtgctggttttgaacaaggtggatctggccccgccagctcttgtggttgcctggaagcattatttccatcaacactatccccagctccacgtcgtccttttcacctcttttcctcgggacccccgcaccccacaggatcctagtagtgtcttgaagaagagtcggaggcgggggagaggatggactcgggccctggggccagagcagttgctgagagcctgtgaagccatcactgtggggaaagtggacttgagcagctggcgggagaagattgctcgggatgtggctggggccacctggggtaatggctctggggaggaggaggaagaggaggatggcccagcagtcctggtggagcagcagactgattcagcaatggagccaactggcccaacccaagagcgctacaaggatggggtggtgaccatcggctgtgtgggtttccctaatgtgggaaagtcctcgctgatcaatgggctggtggggcggaaagtcgtgagtgtctccagaaccccgggccatacccgatactttcagacctactttcttaccccctctgtgaagctctgtgactgcccaggcctcatcttcccatctcttctgcctaggcagttgcaggttctggcagggatctaccctatcgcccagatccaggagccctacactgctgtgggctacctggcctcccgaattcccgtgcaggccctgctccacctgcgccacccagaggctgaggacccctcagcggaacacccctggtgtgcctgggacatctgtgaagcctgggcagagaaacgtggttacaagacagccaaggcggctcggaatgatgtgtacagagcagccaacagtctcttgcggctggcagtggacggccgcctcagcctgtgttttcatcccccaggctacagtgaacagaaaggcacctgggagtcccatccagagaccacggagctggtggttttgcagggcagggtggggccagcaggtgacgaggaggaggaggaagaggaagagctgagcagctcctgtgaggaggagggagaggaggaccgggatgcggatgaggagggagaaggggatgaggagaccccaacctcggctccagggtccagcctggctggccgaaacccttatgccctgctgggtgaggatgagtgctgagttcctcgcccagcgccatcttccctcccagtatctttgcttttggactgacctgggggtatctcccctctgccaccccaattgtgaataaagattgtttgctttgtagccccttccccagatgaactgaggtgagagcggctgttccaggctaacagctgtgggaggcttctctcctcttctcccttcttttttcatgcattctctttgcaagggaaagttctcttaggagtttagtaggttctcagtctctgaaacctgcttcctctacccattctcccactctgcaccttaggaatcccgttatctacatggggaggggaggtctaaatccagctcccttttggagtttgtgccattctccgatttgagcagcagccctgtgtgccccctgccgccagacctgctcattccaggagcttctgggagaaggaacagtaagagaggaactgtgtcccaagctgatgtctcttaatgagatttttacaggaattgttcaaattcagcaaatatttattgagggtctattgtgtgtcttgacctgtgctgagcaccaagcatataaggatgtaccaccagagcctgacctaaatttgaagcctggccatgatcaaaaccccaccttcaggcacccaagtttttggattaagaagggtgaatgatgttctccaaatcctgggggctcatgcagtataattctaggacttcatgttgatacaaatttttagttaaggcaaaacgcttgtgaaaatgttgattaaatgtgtacgagtagttttaattactggtgaacaactagcgtgcacatttatgatttgagcagaacagccctttaagtacagtgttaagtttcattgtttaaaagcttggcagctacgagtatttgaggtacataggggcgggcacagaaccagcctcctgaattccatttactctggtttgggggtggaacaaagatgatccagtgcagggtctgagctagaacctagcaggtggccagaaccattttagggtttcacctcagcatttcggcagaaatcagctctctcgtgagtcagggcaccttaggctttgctgtatatccctttgttaagccagcagctagactcctagattgaattcttttagaaatgggagaatgagcttttttattgactgccagtgttgtctgtattggatgatagcaaaaagtgtagttggacaggttgcccactagatggagtgagaagtaccagactccttttttctctaaagcagatcctttcaggatctgagtcactgggcagtttctctaatgcgagcagacagaccctgttaaccaaggagcaaaggaaagtatatttaaagaggctaaggtgtttggccacatattgctttaggttcatctccattggtctcagtgtggacataactcctggaattcactccagtgcaaagtttaaataataccagcatgagaatgtacttgaaggtttcccaaaatgtgctagacaagaaagagaaaaggtcccagctgagagaaaaatccacctgtctcccatctggggctctttggcctcactgatagaaaaggaaaaggggcccaagctaagcttactttgagggttcatgatgttcagagatgctcaggggacttctccgctgcaggaggtggggtgaggacattggattcatttcctcaaaatgtggagagaaaggagaaaaatcagaattctatttgtacctctgcttcctgtgctgtttatctttgcttgtctttatctttttccacctcaggggtttcatcaggggtatttgggagagtctaggggtggggatgaagaattgactgggagctgaggaggggggatttttatgctgaagacctggcaggaggcaactcctgacacccccacagggttagactgtaaaacctcttccatgacttgctgactctataggataatagcaacaggaaaagaactgagggacgtgcagatgaggatgaatagggccccaacaccagtgcctgaggctgaggttagaactgactacaaagacacaggaaaccaagggcccagtctcccctccacgctgaaatacgcaccctcttgtctgggtcatgtctactatgtgaatacttgaccatggaggtctggggctctggtggcttccatagctggctagtctcttgatggagagaaatcagggcttctctcatccatgctggaatttcatttagatgtcaacttccaagtttccctttttccagatgggattatagtcctgcttctggaacagggtagctgtgtgtggtccaggatagttcaattatctggccctttgttcacttcttacaatcattgatacagtcaacaaaaattggttaaaaacaatatatgccagacatatatccctgagttctgggacaataaccaaaattgaataaggcaatatcctactctcaagcaatagagggtaggaatagaataataataatataatacaatagctctatagcagtatgtaaactataaaagcattattttacgtgtttctattgaactgtcataactaaataagatggttagtactataattatcccaaggattcattcactcatagaacatttgttgagcaattactacctgccagtcacttccaagtggtaagtgagatagaaatggttctttgtggcactcacaatttattggagaatggaaacacaattacaaaaaaaaagtgtgataagttctgggagaagggtggtacaggatcctgtggggtagtggtggctccatataggagggacattgggatactgatcaggaaggagtgggggacagggctagaagctgcattagtataaagttatgtcagactgccaaaacaaaacaaacacaaaaaatcagtagtctgtggtaaagaattgctataggaacagccagtaggggcagttaagctggtcttggtgaatcaggggaagcgtcctagaggaacagatgtccatgctgaggccaaatgctggacaggagttagccagacagggaaattgcattctgggcagaggagacagcaaaggtcaagaaacatgacaactttggaagactgtaacttgttcagaggcagagggtgcaaaggagaaatgaggaaaggtgaagctggagaggtgggcttggtccagctcttgctgggccttttcagccgtgttaaagatttagactgtatccagagggatgttgaactttaagcctaagactgaaaaggtgagaattgtgccttagatcactatggttgcagtgtggagactggtttggaaaggggagaaatcagaggcttttacagccatcccagggagagagaatgaacaccagaattagggtaatggaagatggaaagaagagaaatcgttttatgggttgctcaggagatagaattgacatgtcttgggattgttttgctgtgtaggggagagagacaagtcaagagtatacatcctgtttctgacttggcaactgggtgggtcatgggtctgtttcctgagacagttgtctacagccataccaccgtaagcgccctaaatctcatcagagacagtttatgcaaatggagcttggggaaagagaggtcgtggctggagacagagatttgggcatcatcaacatataggtgtggggagcagagaaggctgaggaagaaagcaggaaacatataaaaaggagagcagggaaaggagccagtgagacaggaaaaacctagtaacgtggtgtgatgaagctaggggaggaaggaaggaaggaagggcggcgtggaacgctgctgatgggtggtggcggggaaaatgaacgagtatccaccagcaacgagaggggcctccatggtcttggtgggagcatttctttggagaggtggaatcagaagccccagatgtcagagggttaaggaataatttggaggaaaagcgtaaaggcagtggaggtgaggagagaattttcaaaatgtttggcagtgattgcaatgaaagaaaaaaatggagggagcagagtatatgcagttgaggaacttttttagtttggagtgtgttaacacgatgttaggaagaaggatcaagtgaaggagaaaggtgaaaatgctggaaggtggggcttagtgatgaaacaaaccttggggacaggtgggcgtggtactgagagtcccagtgaggggagtgccctcaggcaggcgccggtggcttctgtcacaggagggaacagcgctgacattcagctggttcgcactgatacggctcaaccagtttgttaaaacatgtctgttccagtgtcagtaatatacgagtaactgcaatatgcagtaaaaattataaattctaatacaaactcagttcaagctaattaagagatcgcaacagccgttggtaaatggacttcccgctgcatttgagaagctttgcagcgccatctgccggtgtcgtagcatcactgcaggctgagaggctgctttgcgccttcatcttgaagcactctgaaattgcctgtttaaattaccttggaatcatggagttgctactgcttctgaatagtttagcttctactttgattttattgttagtgcattgtcgttcttgtgtcagtagcaagtttcagtgttttaatatttacaaatacaaaaatttttaataaaatattaaagccaaacttgaatgaagag

SEQ ID NO: 13090 - DNA, 1486 bp, Homo sapiens; identical to SEQ ID NO: 13082
  source 1..1486: mol_type = unassigned DNA

SEQ ID NO: 13091 - DNA, 1717 bp, Homo sapiens; identical to SEQ ID NO: 13081
  source 1..1717: mol_type = unassigned DNA

SEQ ID NO: 13092 - DNA, 5977 bp, Homo sapiens; identical to SEQ ID NO: 13089
  source 1..5977: mol_type = unassigned DNA

SEQ ID NO: 13093 - DNA, 5977 bp, Homo sapiens
  source 1..5977: mol_type = unassigned DNA
atggaggcagctgtggtgttagagatgtctgacatcgtcctgcttatcactgatatccgacatccagttgtgaatttcccgccagcactttatgagtatgtgactggagaacttggactggccctggtgctggttttgaacaaggtggatctggccccgccagctcttgtggttgcctggaagcattatttccatcaacactatccccagctccacgtcgtccttttcacctcttttcctcgggacccccgcaccccacaggatcctagtagtgtcttgaagaagagtcggaggcgggggagaggatggactcgggccctggggccagagcagttgctgagagcctgtgaagccatcactgtggggaaagtggacttgagcagctggcgggagaagattgctcgggatgtggctggggccacctggggtaatggctctggggaggaggaggaagaggaggatggcccagcagtcctggtggagcagcagactgattcagcaatggagccaactggcccaacccaagagcgctacaaggatggggtggtgaccatcggctgtgtgggtttccctaatgtgggaaagtcctcgctgatcaatgggctggtggggcggaaagtcgtgagtgtctccagaaccccgggccatacccgatactttcagacctactttcttaccccctctgtgaagctctgtgactgcccaggcctcatcttcccatctcttctgcctaggcagttgcaggttctggcagggatctaccctatcgcccagatccaggagccctacactgctgtgggctacctggcctcccgaattcccgtgcaggccctgctccacctgcgccacccagaggctgaggacccctcagcggaacacccctggtgtgcctgggacatctgtgaagcctgggcagagaaacgtggttacaagacagccaaggcggctcggaatgatgtgtacagagcagccaacagtctcttgcggctggcagtggacggccgcctcagcctgtgttttcatcccccaggctacagtgaacagaaaggcacctgggagtcccatccagagaccacggagctggtggttttgcagggcagggtggggccagcaggtgacgaggaggaggaggaagaggaagagctgagcagctcctgtgaggaggagggagaggaggaccgggatgcggatgaggagggagaaggggatgaggagaccccaacctcggctccagggtccagcctggctggccgaaacccttatgccctgctgggtgaggatgagtgctgagttcctcgcccagcgccatcttccctcccagtatctttgcttttggactgacctgggggtatctcccctctgccaccccaattgtgaataaagattgtttgctttgtagccccttccccagatgaactgaggtgagagcggctgttccaggctaacagctgtgggaggcttctctcctcttctcccttcttttttcatgcattctctttgcaagggaaagttctcttaggagtttagtaggttctcagtctctgaaacctgcttcctctacccattctcccactctgcaccttaggaatcccgttatctacatggggaggggaggtctaaatccagctcccttttggagtttgtgccattctccgatttgagcagcagccctgtgtgccccctgccgccagacctgctcattccaggagcttctgggagaaggaacagtaagagaggaactgtgtcccaagctgatgtctcttaatgagatttttacaggaattgttcaaattcagcaaatatttattgagggtctattgtgtgtcttgacctgtgctgagcaccaagcatataaggatgtaccaccagagcctgacctaaatttgaagcctggccatgatcaaaaccccaccttcaggcacccaagtttttggattaagaagggtgaatgatgttctccaaatcctgggggctcatgcagtataattctaggacttcatgttgatacaaatttttagttaaggcaaaacgcttgtgaaaatgttgattaaatgtgtacgagtagttttaattactggtgaacaactagcgtgcacatttatgatttgagcagaacagccctttaagtacagtgttaagtttcattgtttaaaagcttggcagctacgagtatttgaggtacataggggcgggcacagaaccagcctcctgaattccatttactctggtttgggggtggaacaaagatgatccagtgcagggtctgagctagaacctagcaggtggccagaaccattttagggtttcacctcagcatttcggcagaaatcagctctctcgtgagtcagggcaccttaggctttgctgtatatccctttgttaagccagcagctagactcctagattgaattcttttagaaatgggagaatgagcttttttattgactgccagtgttgtctgtattggatgatagcaaaaagtgtagttggacaggttgcccactagatggagtgagaagtaccagactccttttttctctaaagcagatcctttcaggatctgagtcactgggcagtttctctaatgcgagcagacagaccctgttaaccaaggagcaaaggaaagtatatttaaagaggctaaggtgtttggccacatattgctttaggttcatctccattggtctcagtgtggacataactcctggaattcactccagtgcaaagtttaaataataccagcatgagaatgtacttgaaggtttcccaaaatgtgctagacaagaaagagaaaaggtcccagctgagagaaaaatccacctgtctcccatctggggctctttggcctcactgatagaaaaggaaaaggggcccaagctaagcttactttgagggttcatgatgttcagagatgctcaggggacttctccgctgcaggaggtggggtgaggacattggattcatttcctcaaaatgtggagagaaaggagaaaaatcagaattctatttgtacctctgcttcctgtgctgtttatctttgcttgtctttatctttttccacctcaggggtttcatcaggggtatttgggagagtctaggggtggggatgaagaattgactgggagctgaggaggggggatttttatgctgaagacctggcaggaggcaactcctgacacccccacagggttagactgtaaaacctcttccatgacttgctgactctataggataatagcaacaggaaaagaactgagggacgtgcagatgaggatgaatagggccccaacaccagtgcctgaggctgaggttagaactgactacaaagacacaggaaaccaagggcccagtctcccctccacgctgaaatacgcaccctcttgtctgggtcatgtctactatgtgaatacttgaccatggaggtctggggctctggtggcttccatagctggctagtctcttgatggagagaaatcagggcttctctcatccatgctggaatttcatttagatgtcaacttccaagtttccctttttccagatgggattatagtcctgcttctggaacagggtagctgtgtgtggtccaggatagttcaattatctggccctttgttcacttcttacaatcattgatacagtcaacaaaaattggttaaaaacaatatatgccagacatatatccctgagttctgggacaataaccaaaattgaataaggcaatatcctactctcaagcaatagagggtaggaatagaataataataatataatacaatagctctatagcagtatgtaaactataaaagcattattttacgtgtttctattgaactgtcataactaaataagatggttagtactataattatcccaaggattcattcactcatagaacatttgttgagcaattactacctgccagtcacttccaagtggtaagtgagatagaaatggttctttgtggcgctcacaatttattggagaatggaaacacaattacaaaaaaaaagtgtgataagttctgggagaagggtggtacaggatcctgtggggtagtggtggctccatataggagggacattgggatactgatcaggaaggagtgggggacagggctagaagctgcattagtataaagttatgtcagactgccaaaacaaaacaaacacaaaaaatcagtagtctgtggtaaagaattgctataggaacagccagtaggggcagttaagctggtcttggtgaatcaggggaagcgtcctagaggaacagatgtccatgctgaggccaaatgctggacaggagttagccagacagggaaattgcattctgggcagaggagacagcaaaggtcaagaaacatgacaactttggaagactgtaacttgttcagaggcagagggtgcaaaggagaaatgaggaaaggtgaagctggagaggtgggcttggtccagctcttgctgggccttttcagccgtgttaaagatttagactgtatccagagggatgttgaactttaagcctaagactgaaaaggtgagaattgtgccttagatcactatggttgcagtgtggagactggtttggaaaggggagaaatcagaggcttttacagccatcccagggagagagaatgaacaccagaattagggtaatggaagatggaaagaagagaaatcgttttatgggttgctcaggagatagaattgacatgtcttgggattgttttgctgtgtaggggagagagacaagtcaagagtatacatcctgtttctgacttggcaactgggtgggtcatgggtctgtttcctgagacagttgtctacagccataccaccgtaagcgccctaaatctcatcagagacagtttatgcaaatggagcttggggaaagagaggtcgtggctggagacagagatttgggcatcatcaacatataggtgtggggagcagagaaggctgaggaagaaagcaggaaacatataaaaaggagagcagggaaaggagccagtgagacaggaaaaacctagtaacgtggtgtgatgaagctaggggaggaaggaaggaaggaagggcggcgtggaacgctgctgatgggtggtggcggggaaaatgaacgagtatccaccagcaacgagaggggcctccatggtcttggtgggagcatttctttggagaggtggaatcagaagccccagatgtcagagggttaaggaataatttggaggaaaagcgtaaaggcagtggaggtgaggagagaattttcaaaatgtttggcagtgattgcaatgaaagaaaaaaatggagggagcagagtatatgcagttgaggaacttttttagtttggagtgtgttaacacgatgttaggaagaaggatcaagtgaaggagaaaggtgaaaatgctggaaggtggggcttagtgatgaaacaaaccttggggacaggtgggcgtggtactgagagtcccagtgaggggagtgccctcaggcaggcgccggtggcttctgtcacaggagggaacagcgctgacattcagctggttcgcactgatacggctcaaccagtttgttaaaacatgtctgttccagtgtcagtaatatacgagtaactgcaatatgcagtaaaaattataaattctaatacaaactcagttcaagctaattaagagatcgcaacagccgttggtaaatggacttcccgctgcatttgagaagctttgcagcgccatctgccggtgtcgtagcatcactgcaggctgagaggctgctttgcgccttcatcttgaagcactctgaaattgcctgtttaaattaccttggaatcatggagttgctactgcttctgaatagtttagcttctactttgattttattgttagtgcattgtcgttcttgtgtcagtagcaagtttcagtgttttaatatttacaaatacaaaaatttttaataaaatattaaagccaaacttgaatgaagag

SEQ ID NO: 13094 - DNA, 1486 bp, Homo sapiens; identical to SEQ ID NO: 13082
  source 1..1486: mol_type = unassigned DNA

SEQ ID NO: 13095 - DNA, 5977 bp, Homo sapiens; identical to SEQ ID NO: 13068
  source 1..5977: mol_type = unassigned DNA

SEQ ID NO: 13096 - DNA, 1717 bp, Homo sapiens
  source 1..1717: mol_type = unassigned DNA
attccacttccggaaggttgcggagaacatctgcggcggccgcattccggagccaactgcctccctccgtctctgccaggcatggcggcaacctcacaccttccctttgctgcgtttctataaatgctttgaaaaaattactcttttcttccctcgctggaaaacaccacaaccagcagccttctcaggggctgggtccacgaggctacgacccaaatcgataccgactgcattttgagagagacagcagggaggaggtagagaggagaaagagagcagcccgggagcaagttctacagccggtcagtgctgagttgttggagctggacatccgggaggtgtatcagcctggctcagttctggactttcctcgacgtcctccttggagctatgagatgtccaaggagcaactaatgagccaagaggaacggagcttccaagactatcttgggaagattcatggggcttactcctctgagaaactcagctactttgagcacaatctggagacatggaggcagctgtggcgggtgttagagatgtctgacatcgtcctgcttatcactgatatccgacatccagttgtgaatttcccgccagcactttatgagtatgtgactggagaacttggactggccctggtgctggttttgaacaaggtggatctggccccgccagctcttgtggttgcctggaagcattatttccatcaacactatccccagctccacgtcgtccttttcacctcttttcctcgggacccccgcaccccacaggatcctagtagtgtcttgaagaagagtcggaggcgggggagaggatggactcgggccctggggccagagcagttgctgagagcctgtgaagccatcactgtggggaaaggtttccctaatgtgggaaagtcctcgctgatcaatgggctggtggggcggaaagtcgtgagtgtctccagaaccccgggccatacccgatactttcagacctactttcttaccccctctgtgaagctctgtgactgcccaggcctcatcttcccatctcttctgcctaggcagttgcaggttctggcggggatctaccctatcgcccagatccaggagccctacactgctgtgggctacctggcctcccgaattcccgtgcaggccctgctccacctgcgccacccagaggctgaggacccctcagcggaacacccctggtgtgcctgggacatctgtgaagcctgggcagagaaacgtggttacaagacagccaaggcggctcggaatgatgtgtacagagcagccaacagtctcttgcggctggcagtggacggccgcctcagcctgtgttttcatcccccaggctacagtgaacagaaaggcacctgggagtcccatccagagaccacggagctggtggttttgcagggcagggtggggccagcaggtgacgaggaggaggaggaagaggaagagctgagcagctcctgtgaggaggagggagaggaggaccgggatgcggatgaggagggagaaggggatgaggagaccccaacctcggctccagggtccagcctggctggccgaaacccttatgccctgctgggtgaggatgagtgctgagttcctcgcccagcgccatcttccctcccagtatctttgcttttggactgacctgggggtatctcccctctgccaccccaattgtgaataaagattgtttgctttgt

SEQ ID NO: 13097 - DNA, 1717 bp, Homo sapiens; identical to SEQ ID NO: 13070
  source 1..1717: mol_type = unassigned DNA

SEQ ID NO: 13098 - DNA, 1486 bp, Homo sapiens; identical to SEQ ID NO: 13082
  source 1..1486: mol_type = unassigned DNA

SEQ ID NO: 13099 - DNA, 2334 bp, Homo sapiens
  source 1..2334: mol_type = unassigned DNA
gtggttcaggcgggtgtcttcggccgggcttgggaacataaaagtttgtttcaccacgtaagccggacctcgcactccggtcccggtctcgtcgccaagatggtgaagcccaagtacaaaggacggagcaccatcaacccgtccaaggccagcacaaacccagatcgagtgcagggagcaggaggccaaaacatgagggaccgggccaccatccggcgcctgaatatgtataggcaaaaggagcgcaggaacagtcgtggtaaaataattaaacccctgcaatatcaatcaacggtggcttctggcacagtggcaagagtagagccaaatattaaatggtttggaaacacacgtgtgattaagcagtcatcattacaaaaatttcaagaggaaatggatacagttatgaaggatccatacaaagttgtcatgaagcaaagcaagttaccaatgtctcttctccatgatcgaatccggcctcataacttgaaggtgcacattcttgatactgaaagttttgaaactacatttggccctaagtcacagaggaaacgaccaaacttatttgcaagtgatatgcagtctcttatcgaaaatgctgaaatgtccactgagagctatgaccagggcaaggatcgtgatttggtaactgaagacactggtgtgagaaatgaagctcaagaagagatctataaaaagggacagtccaaaagaatatggggtgagctctacaaggtgatagattcatcagatgttgtagttcaagttcttgatgctagagatccaatgggtactcgttcccctcacattgaaacttacctgaagaaggaaaaaccttggaaacacctcatttttgtacttaacaaatgtgaccttgttccaacctgggcaacaaaacggtgggttgctgtcctctcccaggattatccaacacttgctttccatgcaagccttactaacccgtttggcaagggagcattcattcagcttctgcggcagtttggaaagttgcacactgacaagaaacagatcagtgttgggttcattggctatccaaatgttggcaagagctctgtgataaatacattgcgttctaagaaagtttgcaacgtggctcccattgcaggtgaaacaaaggtctggcagtatattactttgatgcgtcggatattcctgattgactgtccaggtgtggtttacccctctgaggactccgagacagacattgtgctaaaaggagttgttcaagtagaaaaaattaagagtcctgaagaccacattggtgctgtacttgaacgagcaaagccagaatatatcagcaaaacatacaagattgattcttgggagaatgctgaggactttcttgagaagctcgctttccggactgggaagttactaaagggtggagagcccgacttgcagactgtgggtaagatggtcctcaatgactggcagaggggccggattcctttctttgtcaagccacccaatgcagagccacttgtggccccccagcttctaccctcctcatctttggaagttgtcccagaagcagcccagaacaatccaggggaggaagtcacagaaactgcaggtgaagggtcagaatccatcattaaggaagaaacagaagagaacagtcactgtgatgctaacacagagatgcagcagattctcacacgagttcggcagaactttggtaaaatcaacgtggtgcctcagttttctggggatgacctggttcctgtggaggtgtcagatcttgaggaagagcttgagagcttttctgatgaagaggaggaggaacaggagcaacaaagagatgatgcggaagagtcttcctcggagcctgaggaggaaaatgtgggaaacgacaccaaagccgttattaaagcactggatgagaagattgccaaatatcagaagtttctagacaaagccaaagccaaaaagttttcagcagtcagaatatccaagggactgagtgaaaagatatttgcaaaacctgaagaacaaagaaaaacactggaagaagatgtagatgacagagcaccttccaaaaagggaaagaagcggaaggcacaaagggaagaggaacaggaacattcaaataaagctcccagggcgcttacatcaaaagaacggaggcgagcagtacgacagcaacggccgaaaaaagttggtgtgcgctactatgaaacacacaacgtgaaaaataggaacaggaacaaaaagaagaccaatgactcagagggacagaaacacaaacgcaaaaaattcagacaaaagcagtaatgtttaaaaggtttttattaaattatacaaaaacaggca

SEQ ID NO: 13100 - DNA, 1676 bp, Homo sapiens
  source 1..1676: mol_type = unassigned DNA
gtgcacacgtggtccggcgtggttcaggcgggtgtcttcggccgggcttgggaacataaaagtttgtttcaccacgtaagccggacctcgcactccggtcccggtctcgtcgccaagatggtgaagcccaagtacaaaggacggagcaccatcaacccgtccaaggccagcacaaacccagatcgagtgcagggagcaggaggccaaaacatgagggaccgggccaccatccggcgcctgaatatgtataggcaaaaggagcgcaggaacagtcgtggtaaaataattaaacccctgcaatatcaatcaacggtggcttctggcacagtggcaagagtagagccaaatattaaatggtttggaaacacacgtgtgattaagcagtcatcattacaaaaatttcaagaggaaatggatacagttatgaaggatccatacaaagttgtcatgaagcaaaaacttgaaggtgcacattcttgatactgaaagttttgaaactacatttggccctaagtcacagaggaaacgaccaaacttatttgcaagtgatatgcagtctcttatcgaaaatgctgaaatgtccactgagagctatgaccagggcaaggatcgtgatttggtaactgaagacactggtgtgagaaatgaagctcaagaagagatctataaaaagggacagtccaaaagaatatggggtgagctctacaaggtgatagattcatcagatgttgtagttcaagttcttgatgctagagatccaatgggtactcgttcccctcacattgaaacttacctgaagaaggaaaaaccttggaaacacctcatttttgtacttaacaaatgtgaccttgttccaacctgggcaacaaaacggtgggttgctgtcctctcccaggattatccaacacttgctttccatgcaagccttactaacccgtttggcaagggagcattcattcagcttctgcggcagtttggaaagttgcacactgacaagaaacagatcagtgttgggttcattggctatccaaatgttggcaagagctctgtgataaatacattgcgttctaagaaagtttgcaacgtggctcccattgcaggtgaaacaaaggtcagtatattactttgatgcgtcggatattcctgattgactgtccaggtgtggtttacccctctgaggactccgagacagacattgtgctaaaaggagttgttcaagtagaaaaaattaagagtcctgaagaccacattggtgctgtacttgaacgagcaaagccagaatatatcagcaaaacatacaagattgattcttgggagaatgctgaggactttcttgagaagctcgctttccggactgggaagttactaaagggtggagagcccgacttgcagactgtggttctaccctcctcatctttggaagttgtcccagaagcagcccagaacaatccaggggaggaagtcacagaaactgcaggtgaagggtcagaatccatcattaaggaagaaacagaagagaacagtcactgtgatgctaacacagagatgcagcagattctcacacgagttcggcagaactttggtaaaatcaacgtggtgcctcagttttctggggatgacctggttcctgtggaggtgtcagatcttgaggaagagcttgagagcttttctgatga

SEQ ID NO: 13101 - DNA, 2041 bp, Homo sapiens
  source 1..2041: mol_type = unassigned DNA
gctcgtcagtggcttcagttcacacgtggcgccagcggaggcaggttgatgtgtttgtgcttccttctacagccaatatgaaaaggcctagtaagtggggtcgggaggcgggcgtggagggacccacgtctggaagttgctgcagccaccacgacgctcttctacggctacggctttgtctctgctgagttaaagaaagcaagtaaacgcatgacctgccataagcggtataaaatccaaaaaaaggttcgagaacatcatcgaaaattaagaaaggaggctaaaaagcggggtcacaagaagcctaggaaagacccaggagttccaaacagtgctccctttaaggaggctcttcttagggaagctgagctaaggaaacagaggcttgaagaactaaaacagcagcagaaacttgacaggcagaaggaactagaaaagaaaagaaaacttgaaactaatcctgatattaagccatcaaatgtggaacctatggaaaaggagtttgggctttgcaaaactgagaacaaagccaagtcgggcaaacagaattcaaagaagctgtactgccaagaacttaaaaaggtgattgaagcctccgatgttgtcctagaggtgttggatgccagagatcctcttggttgcagatgtcctcaggtagaagaggccattgtccagagtggacagaaaaagctggtacttatattaaataaatcagatctggtaccaaaggagaatttggagagctggctaaattatttgaagaaagaattgccaacagtggtgttcagagcctcaacaaaaccaaaggataaagggaagataaccaagcgtgtgaaggcaaagaagaatgctgctccattcagaagtgaagtctgctttgggaaagagggcctttggaaacttcttggaggttttcaggaaacttgcagcaaagccattcgggttggagtaattggtttcccaaatgtggggaaaagcagcattatcaatagcttaaaacaagaacagatgtgtaatgttggtgtatccatggggcttacaaggagcatgcaagttgtccccttggacaaacagatcacaatcatagatagtccgagcttcatcgtatctccacttaattcctcctctgcgcttgctctgcgaagtccagcaagtattgaagtagtaaaaccgatggaggctgccagtgccatcctttcccaggctgatgctcgacaggtagtactgaaatatactgtcccaggctacaggaattctctggaattttttactgtgcttgctcagagaagaggtatgcaccaaaaaggtggaatcccaaatgttgaaggtgctgccaaactgctgtggtctgagtggacaggtgcctcattagcttactattgccatccccctacatcttggactcctcctccatattttaatgagagtattgtggtagacatgaaaagcggcttcaatctggaagaactggaaaagaacaatgcacagagcataagagccatcaagggccctcatttggccaatagcatccttttccagtcttccggtctgacaaatggaataatagaagaaaaggacatacatgaagaattgccaaaacggaaagaaaggaagcaggaggagagggaggatgacaaagacagtgaccaggaaactgttgatgaagaagttgatgaaaacagctcaggcatgtttgctgcagaagagacaggggaggcactgtctgaggagactacagcaggtgaacagtctacaaggtcttttatcttggataaaatcattgaagaggatgatgcttatgacttcagtacagattatgtgtaacagaacaatggctttttatgattttttttttaacattttaagcagactgctaaactgttctctgtataagttatggtatgcatgagctgtgtaaattttgtgaatatgtattatattaaaaccaggcaacttggaatccctaaattctgtaaaaagacaattcatctcattgtgagtggaagtagttatctggaataaaaaaagaagatacctattg

SEQ ID NO: 13102 - DNA, 2040 bp, Homo sapiens
  source 1..2040: mol_type = unassigned DNA
gcggccgccaagcgatccctgctccgcgcgacactgcgtgcccgcgcacgcagagaggcggtgacgcactttacggcggcagcgtaagtgcgtgacgctcgtcagtggcttcagttcacacgtggcgccagcggaggcaggttgatgtgtttgtgcttccttctacagccaatatgaaaaggcctaagttaaagaaagcaagtaaacgcatgacctgccataagcggtataaaatccaaaaaaaggttcgagaacatcatcgaaaattaagaaaggaggctaaaaagcggggtcacaagaagcctaggaaagacccaggagttccaaacagtgctccctttaaggaggctcttcttagggaagctgagctaaggaaacagaggcttgaagaactaaaacagcagcagaaacttgacaggcagaaggaactagaaaagaaaagaaaacttgaaactaatcctgatattaagccatcaaatgtggaacctatggaaaaggagtttgggctttgcaaaactgagaacaaagccaagtcgggcaaacagaattcaaagaagctgtactgccaagaacttaaaaaggtgattgaagcctccgatgttgtcctagaggtgttggatgccagagatcctcttggttgcagatgtcctcaggtagaagaggccattgtccagagtggacagaaaaagctggtacttatattaaataaatcagatctggtaccaaaggagaatttggagagctggctaaattatttgaagaaagaattgccaacagtggtgttcagagcctcaacaaaaccaaaggataaagggaagataaccaagcgtgtgaaggcaaagaagaatgctgctccattcagaagtgaagtctgctttgggaaagagggcctttggaaacttcttggaggttttcaggaaacttgcagcaaagccattcgggttggagtaattggtttcccaaatgtggggaaaagcagcattatcaatagcttaaaacaagaacagatgtgtaatgttggtgtatccatggggcttacaaggagcatgcaagttgtccccttggacaaacagatcacaatcatagatagtccgagcttcatcgtatctccacttaattcctcctctgcgcttgctctgcgaagtccagcaagtattgaagtagtaaaaccgatggaggctgccagtgccatcctttcccaggctgatgctcgacaggtagtactgaaatatactgtcccaggctacaggaattctctggaattttttactgtgcttgctcagagaagaggtatgcaccaaaaaggtggaatcccaaatgttgaaggtgctgccaaactgctgtggtctgagtggacaggtgcctcattagcttactattgccatccccctacatcttggactcctcctccatattttaatgagagtattgtggtagacatgaaaagcggcttcaatctggaagaactggaaaagaacaatgcacagagcataagagccatcaagggccctcatttggccaatagcatccttttccagtcttccggtctgacaaatggaataatagaagaaaaggacatacatgaagaattgccaaaacggaaagaaaggaagcaggaggagagggaggatgacaaagacagtgaccaggaaactgttgatgaagaagttgatgaaaacagctcaggcatgtttgctgcagaagagacaggggaggcactgtctgaggagactacagcaggtgaacagtctacaaggtcttttatcttggataaaatcattgaagaggatgatgcttatgacttcagtacagattatgtgtaacagaacaatggctttttatgattttttttttaacattttaagcagactgctaaactgttctctgtataagttatggtatgcatgagctgtgtaaattttgtgaatatgtattatattaaaaccaggcaacttggaatccctaaattctgtaaaaagacaattcatctcattgtgagtggaagtagttatctggaataaaaaaagaagatacctattg

SEQ ID NO: 13103 - DNA, 567 bp, Homo sapiens
  source 1..567: mol_type = unassigned DNA
gctcttctacggctacggctttgtctctgctggtatgggggtgggagcctacgcgtaggccttggccctatttcctggtagaaccgagagttggaagtccctacggcgatcatgttaaccgcgcgggctcattctgcggaacgaagccgggcagagggtggggaagactaggctagattttcgtaaggaagcagcgtctgagccaggtttgaggcccaatattttctttccgtggccacgtgcagactggcccagagttaaagaaagcaagtaaacgcatgacctgccataagcggtataaaatccaaaaaaaggttcgagaacatcatcgaaaattaagaaaggaggctaaaaagcggggtcacaagaagcctaggaaagacccaggagttccaaacagtgctccctttaaggaggctcttcttagggaagctgagctaaggaaacagaggcttgaagaactaaaacagcagcagaaacttgacaggcagaaggaactagaaaagaaaagaaaacttgaaactaatcctgatattaagccatcaaatgtggaacctatggaaaagg

SEQ ID NO: 13104 - DNA, 547 bp, Homo sapiens
  source 1..547: mol_type = unassigned DNA
gacaccagcagctgaatgattagaacaggagaacactggttgccagcagtatggaaagaaaggttggggatctccaggaaacagaaagaaggagcaaaagaatcacatttgaaaatcctgagttaaagaaagcaagtaaacgcatgacctgccataagcggtataaaatccaaaaaaaggttcgagaacatcatcgaaaattaagaaaggaggctaaaaagcggggtcacaagaagcctaggaaagacccaggagttccaaacagtgctccctttaaggaggctcttcttagggaagctgagctaaggaaacagaggcttgaagaactaaaacagcagcagaaacttgacaggcagaaggaactagaaaagaaaagaaaacttgaaactaatcctgatattaagccatcaaatgtggaacctatggaaaaggagtttgggctttgcaaaactgagaacaaagccaagtcgggcaaacagaattcaaagaagctgtactgccaagaacttaaaaaggtgattgaagcctccgatgttgtcctagaggt

SEQ ID NO: 13105 - DNA, 729 bp, Homo sapiens
  source 1..729: mol_type = unassigned DNA
agttcacacgtggcgccagcggaggcaggttgatgtgtttgtgcttccttctacagccaatatgaaaaggcctaagttaaagaaagcaagtaaacgcatgacctgccataagcggtataaaatccaaaaaaaggttcgagaacatcatcgaaaattaagaaaggaggctaaaaagcggggtcacaagaagcctaggaaagacccaggagttccaaacagtgctccctttaaggaggctcttcttagggaagctgagctaaggaaacagaggcttgaagaactaaaacagcagcagaaacttgacaggcagaaggaactagaaaagaaaagaaaacttgaaactaatcctgatattaagccatcaaatgtggaacctatggaaaaggagtttgggctttgcaaaactgagaacaaagccaagtcgggcaaacagaattcaaagaagctgtactgccaagaacttaaaaaggtatcttagcctaggtgattgaagcctccgatgttgtcctagaggtgttggatgccagagatcctcttggttgcagatgtcctcaggtagaagaggccattgtccagagtggacagaaaaagctggtacttatattaaataaatcagatctggtaccaaaggagaatttggagagctggctaaattatttgaagaaagaattgccaacagtggtgttcagagcctcaacaaaaccaaaggataaagggaagataaccaag

SEQ ID NO: 13106 - DNA, 1515 bp, Homo sapiens
  source 1..1515: mol_type = unassigned DNA
ccggcccacgccagctcccggccgcggcacagcagccccggcgctccccgcgccgccccgcgcaggcgcccccgccccgccgtcgccgccgccgcagccaggagccgctgcaccatgccccgcatagatgcggacctcaagctcgacttcaaggatgtcctgctccgacctaagcggagcagcctcaagagccgagccgaggtggatcttgaacgcaccttcacgtttcgaaattcaaagcagacctactcagggattcccatcatcgtggccaacatggacactgtgggcacgtttgagatggcagccgtgatgtcacagcactccatgtttacagcaattcataagcattactccctggatgactggaagctctttgccacaaatcacccagaatgcctgcagaatgtagccgtgagttcaggcagtgggcagaatgatctggaaaagatgaccagcatcctggaagctgtgccacaggttaagtttatttgcctggatgtggccaatgggtattcagaacattttgtggaattcgtgaaacttgtccgtgccaaatttcctgaacacaccattatggcagggaacgtggtgacaggagaaatggtagaagagcttattctttccggagcagatatcatcaaagtgggagttggaccaggttctgtgtgcaccacccgcaccaagacgggagtggggtacccccagctgagtgccgtcattgagtgtgccgactctgcccatggcctgaagggccacatcatctctgatggaggctgtacgtgtccaggggatgtcgccaaagcctttggagctggagcagattttgtcatgctgggaggaatgttttcgggtcatacggagtgtgctggagaagtgtttgagaggaacggacggaagctcaagctcttctacgggatgagctctgacaccgccatgaacaagcacgcaggaggagttgctgagtacagagcctctgagggtaagactgtggaagttccttacaaaggagatgtggaaaacactatcctggatattctcgggggactgaggtccacgtgcacctacgtgggggccgccaaactcaaggagctcagcaggagggcaacattcatccgggtgacccagcagcacaacaccgtgttcagctaaccctggggacaaagcagcgtctggctcgagtggaagcgtccaaacctgcttttcccatctccccccaagtctgttccgtcagagcttctggctgctcctgaatggtggaatgctgtgtcctctcttctgtctcctgctgcctggaggcttcggggctctcccgcctgccttctcggggcccagacgcaaggcaccgattgggccaacatcagagccctgctgcccagaactcataacctcattgttcaaaccaacacttgcacctttctctttttctctttctctctccctttctttgtttttctttcttttttaaaagaagatggtttcactttaatataatgctattatcttaagacttaa

SEQ ID NO: 13107 - DNA, 2022 bp, Homo sapiens
  source 1..2022: mol_type = unassigned DNA
atcagcctcttgccccattgctctttgcaggggtagaagaaggaagtgtagcggggtaaggaatgcaccgtcagggtctctcacaaccctttcccagctctcctccccaacaaacagtacctgggatggagccctagggtaatcgcagccacgggatgggtcgaggtgacaggcttcagggaccacacttcggcctttgcccgaccttccacaacttaagcgaagagaggccaccagccgtaacagggcgttaaagcccaggggaagattggtccttatgacttcctgccttccagccctcagattcatcgctaccccgaggctaagcgccatgcctcatattgacaacgatgtgaaactggacttcaaggatgtccttttgaggcccaaacgcagtacccttaagtctcgaagtgaggtggatctcacaagatccttttcatttcggaactcaaagcagacatactctggggttcccatcattgctgccaatatggatactgtgggcacctttgagatggccaaggttctctgtaagttctctctcttcactgctgtccataagcactatagcctcgttcagtggcaagagtttgctggccagaatcctgactgtcttgagcatctggctgccagctcaggcacaggctcttctgactttgagcagctggaacagatcctggaagctattccccaggtgaagtatatatgcctggatgtggcaaatggctactctgaacactttgttgaatttgtaaaagatgtacggaagcgcttcccccagcacaccatcatggcagggaatgtggtaacaggagagatggtagaagagctcatcctttctggggctgacatcatcaaagtgggaattgggccaggctctgtgtgtactactcggaagaaaactggagtggggtatccacagctcagcgcagtgatggagtgtgcagatgctgctcatggcctcaaaggccacatcatttcagatggaggttgcagctgtcctggggatgtggccaaggcttttggggcaggagctgacttcgtgatgctgggtggcatgctggctgggcacagtgagtcaggtggtgagctcatcgagagggatggcaagaagtacaagctcttctatggaatgagttctgaaatggccatgaagaagtatgctgggggcgtggctgagtacaggtatgtgtggaggcccaggagcttagtaatagtatggaggcagaactcatggctgctgagagggggatggtacagttctcagagaagcatggtgaaccggggctcaatgctagggtctgtggaaaagtccctgggcttaaggaatccagaaggagaagataataaagtttttcctactttaagagcctcagagggaaagacagtggaagttccttttaaaggagatgtggaacataccatccgagacatcctaggagggatccgctctacgtgtacctatgtgggagcagctaagctcaaagagttgagcaggagaactaccttcatccgagtcacccagcaggtgaatccaatcttcagtgaggcgtgctagacctgagcagttctaccctcccaaggcaccagtactctaccatggggcatcccaagtggggtcctcacccatcccagctactgcagctctgtattactttgtcatttcctgttgtctcactcctgagggctcctgcagtaactctgtacttctctatctgcacacacaaaatgcccaaggcactcactggggaggaagcaaggaagcaaacagtctgagaaaatgatgcaagaaaatcaaatgggaatctggggacccaacacaacatcctgaagattattaaaaggaaaagatgctgattggtacataaatcttttacatggccttggtctagaggaggcaggcttttagaatcatgttttgttaatccgcttcactaaattggaccttcacatatctaaaaagctctgaagtgtttgtatatttgaaatacctcaataaagagagagctcattgactgt

SEQ ID NO: 13108 - DNA, 1972 bp, Homo sapiens
  source 1..1972: mol_type = unassigned DNA
aaaggctcagggttgctcccgcgtttcggttcagtgacgtcgtaaattggaatgaggcatccagtttagcaacagcagagatgacgactctgcgattctgagagtccctggcgagcccgggctagcgaaaagtgggggcagaacgaactacatctcccatcgtgccaggaggcggtcccgcccgtttccccctgggagttgtagtctaaccccctcggatccaacagcaacctcagtgcgtgaactctgttatccagaaggcctcgccctgccgccgccgaagctggaattcgtcggctagtagttctcgccggcaactagaggaacctgttggcgtggcccagaaggcttagcgggattgcacgaggttagttgctaagcaaggtggtctttggtcaactgccgcctggaccaaggcaacaggaaccctcagattcatcgctaccccgaggctaagcgccatgcctcatattgacaacgatgtgaaactggacttcaaggatgtccttttgaggcccaaacgcagtacccttaagtctcgaagtgaggtggatctcacaagatccttttcatttcggaactcaaagcagacatactctggggttcccatcattgctgccaatatggatactgtgggcacctttgagatggccaaggttctctgtaagttctctctcttcactgctgtccataagcactatagcctcgttcagtggcaagagtttgctggccagaatcctgactgtcttgagcatctggctgccagctcaggcacaggctcttctgactttgagcagctggaacagatcctggaagctattccccaggtgaagtatatatgcctggatgtggcaaatggctactctgaacactttgttgaatttgtaaaagatgtacggaagcgcttcccccagcacaccatcatggcagggaatgtggtaacaggagagatggtagaagagctcatcctttctggggctgacatcatcaaagtgggaattgggccaggctctgtgtgtactactcggaagaaaactggagtggggtatccacagctcagcgcagtgatggagtgtgcagatgctgctcatggcctcaaaggccacatcatttcagatggaggttgcagctgtcctggggatgtggccaaggcttttggggcaggagctgacttcgtgatgctgggtggcatgctggctgggcacagtgagtcaggtggtgagctcatcgagagggatggcaagaagtacaagctcttctatggaatgagttctgaaatggccatgaagaagtatgctgggggcgtggctgagtacagagcctcagagggaaagacagtggaagttccttttaaaggagatgtggaacataccatccgagacatcctaggagggatccgctctacgtgtacctatgtgggagcagctaagctcaaagagttgagcaggagaactaccttcatccgagtcacccagcaggtgaatccaatcttcagtgaggcgtgctagacctgagcagttctaccctcccaaggcaccagtactctaccatggggcatcccaagtggggtcctcacccatcccagctactgcagctctgtattactttgtcatttcctgttgtctcactcctgagggctcctgcagtaactctgtacttctctatctgcacacacaaaatgcccaaggcactcactggggaggaagcaaggaagcaaacagtctgagaaaatgatgcaagaaaatcaaatgggaatctggggacccaacacaacatcctgaagattattaaaaggaaaagatgctgattggtacataaatcttttacatggccttggtctagaggaggcaggcttttagaatcatgttttgttaatccgcttcactaaattggaccttcacatatctaaaaagctctgaagtgtttgtatatttgaaatacctcaataaagagagagctcattgactgtaaa

SEQ ID NO: 13109 - DNA, 1652 bp, Homo sapiens
  source 1..1652: mol_type = unassigned DNA
agttatgaaccctccccgccccccgtcgccaacattccttcgttcccctaaatcagcctcttgccccattgctctttgcaggggtagaagaaggaagtgtagcgggccctcagattcatcgctaccccgaggctaagcgccatgcctcatattgacaacgatgtgaaactggacttcaaggatgtccttttgaggcccaaacgcagtacccttaagtctcgaagtgaggtggatctcacaagatccttttcatttcggaactcaaagcagacatactctggggttcccatcattgctgccaatatggatactgtgggcacctttgagatggccaaggttctctgtaagttctctctcttcactgctgtccataagcactatagcctcgttcagtggcaagagtttgctggccagaatcctgactgtcttgagcatctggctgccagctcaggcacaggctcttctgactttgagcagctggaacagatcctggaagctattccccaggtgaagtatatatgcctggatgtggcaaatggctactctgaacactttgttgaatttgtaaaagatgtacggaagcgcttcccccagcacaccatcatggcagggaatgtggtaacaggagagatggtagaagagctcatcctttctggggctgacatcatcaaagtgggaattgggccaggctctgtgtgtactactcggaagaaaactggagtggggtatccacagctcagcgcagtgatggagtgtgcagatgctgctcatggcctcaaaggccacatcatttcagatggaggttgcagctgtcctggggatgtggccaaggcttttggggcaggagctgacttcgtgatgctgggtggcatgctggctgggcacagtgagtcaggtggtgagctcatcgagagggatggcaagaagtacaagctcttctatggaatgagttctgaaatggccatgaagaagtatgctgggggcgtggctgagtacagagcctcagagggaaagacagtggaagttccttttaaaggagatgtggaacataccatccgagacatcctaggagggatccgctctacgtgtacctatgtgggagcagctaagctcaaagagttgagcaggagaactaccttcatccgagtcacccagcaggtgaatccaatcttcagtgaggcgtgctagacctgagcagttctaccctcccaaggcaccagtactctaccatggggcatcccaagtggggtcctcacccatcccagctactgcagctctgtattactttgtcatttcctgttgtctcactcctgagggctcctgcagtaactctgtacttctctatctgcacacacaaaatgcccaaggcactcactggggaggaagcaaggaagcaaacagtctgagaaaatgatgcaagaaaatcaaatgggaatctggggacccaacacaacatcctgaagattattaaaaggaaaagatgctgattggtacataaatcttttacatggccttggtctagaggaggcaggcttttagaatcatgttttgttaatccgcttcactaaattggaccttcacatatctaaaaagctctgaagtgtttgtatatttgaaatacctcaataaagagagagctcattgactgtaaa

SEQ ID NO: 13110 - DNA, 1864 bp, Homo sapiens
  source 1..1864: mol_type = unassigned DNA
caacattccttcgttcccctaaatcagcctcttgccccattgctctttgcaggggtagaagaaggaagtgtagcggggtaaggaatgcaccgtcagggtctctcacaaccctttcccagctctcctccccaacaaacagtacctgggatggagccctagggtaatcgcagccacgggatgggtcgaggtgacaggcttcagggaccacacttcggcctttgcccgaccttccacaacttaagcgaagagaggccaccagccgtaacagggcgttaaagcccaggggaagattggtccttatgacttcctgccttccagccctcagattcatcgctaccccgaggctaagcgccatgcctcatattgacaacgatgtgaaactggacttcaaggatgtccttttgaggcccaaacgcagtacccttaagtctcgaagtgaggtggatctcacaagatccttttcatttcggaactcaaagcagacatactctggggttcccatcattgctgccaatatggatactgtgggcacctttgagatggccaaggttctctgtaagttctctctcttcactgctgtccataagcactatagcctcgttcagtggcaagagtttgctggccagaatcctgactgtcttgagcatctggctgccagctcaggcacaggctcttctgactttgagcagctggaacagatcctggaagctattccccaggtgaagtatatatgcctggatgtggcaaatggctactctgaacactttgttgaatttgtaaaagatgtacggaagcgcttcccccagcacaccatcatggcagggaatgtggtaacaggagagatggtagaagagctcatcctttctggggctgacatcatcaaagtgggaattgggccaggctctgtgtgtactactcggaagaaaactggagtggggtatccacagctcagcgcagtgatggagtgtgcagatgctgctcatggcctcaaaggccacatcatttcagatggaggttgcagctgtcctggggatgtggccaaggcttttggggcaggagctgacttcgtgatgctgggtggcatgctggctgggcacagtgagtcaggtggtgagctcatcgagagggatggcaagaagtacaagctcttctatggaatgagttctgaaatggccatgaagaagtatgctgggggcgtggctgagtacagagcctcagagggaaagacagtggaagttccttttaaaggagatgtggaacataccatccgagacatcctaggagggatccgctctacgtgtacctatgtgggagcagctaagctcaaagagttgagcaggagaactaccttcatccgagtcacccagcaggtgaatccaatcttcagtgaggcgtgctagacctgagcagttctaccctcccaaggcaccagtactctaccatggggcatcccaagtggggtcctcacccatcccagctactgcagctctgtattactttgtcatttcctgttgtctcactcctgagggctcctgcagtaactctgtacttctctatctgcacacacaaaatgcccaaggcactcactggggaggaagcaaggaagcaaacagtctgagaaaatgatgcaagaaaatcaaatgggaatctggggacccaacacaacatcctgaagattattaaaaggaaaagatgctgattggtacataaatcttttacatggccttggtctagaggaggcaggcttttagaatcatgttttgttaatccgcttcactaaattggaccttcacatatctaaaaagctctgaagtgtttgtatatttgaaatacctcaataaagagagagctcattgactgtaaa

SEQ ID NO: 13111 - DNA, 1855 bp, Homo sapiens
  source 1..1855: mol_type = unassigned DNA
ggcatccagtttagcaacagcagagatgacgactctgcgattctgagagtccctggcgagcccgggctagcgaaaagtgggggcagaacgaactacatctcccatcgtgccaggaggcggtcccgcccgtttccccctgggagttgtagtctaaccccctcggatccaacagcaacctcagtgcgtgaactctgttatccagaaggcctcgccctgccgccgccgaagctggaattcgtcggctagtagttctcgccggcaactagaggaacctgttggcgtggcccagaaggcttagcgggattgcacgagccctcagattcatcgctaccccgaggctaagcgccatgcctcatattgacaacgatgtgaaactggacttcaaggatgtccttttgaggcccaaacgcagtacccttaagtctcgaagtgaggtggatctcacaagatccttttcatttcggaactcaaagcagacatactctggggttcccatcattgctgccaatatggatactgtgggcacctttgagatggccaaggttctctgtaagttctctctcttcactgctgtccataagcactatagcctcgttcagtggcaagagtttgctggccagaatcctgactgtcttgagagcatctggctgccagctcaggcacaggctcttctgactttgagcagctggaacagatcctggaagctattccccaggaagtatatatgcctggatgtggcaaatggctactctgaacactttgttgaatttgtaaaagatgtacggaagcgcttcccccagcacaccatcatggcagggaatgtggtaacaggagagatggtagaagagctcatcctttctggggctgacatcatcaaagtgggaattgggccaggctctgtgtgtactactcggaagaaaactggagtggggtatccacagctcagcgcagtgatggagtgtgcagatgctgctcatggcctcaaaggccacatcatttcagatggaggttgcagctgtcctggggatgtggccaaggcttttggggcaggagctgacttcgtgatgctgggtggcatgctggctgggcacagtgagtcaggtggtgagctcatcgagagggatggcaagaagtacaagctcttctatggaatgagttctgaaatggccatgaagaagtatgctgggggcgtggctgagtacagagcctcagagggaaagacagtggaagttccttttaaaggagatgtggaacataccatccgagacatcctaggagggatccgctctacgtgtacctatgtgggagcagctaagctcaaagagttgagcaggagaactaccttcatccgagtcacccagcaggtgaatccaatcttcagtgaggcgtgctagacctgagcagttctaccctcccaaggcaccagtactctaccatggggcatcccaagtggggtcctcacccatcccagctactgcagctctgtattactttgtcatttcctgttgtctcactcctgagggctcctgcagtaactctgtacttctctatctgcacacacaaaatgcccaaggcactcactggggaggaagcaaggaagcaaacagtctgagaaaatgatgcaagaaaatcaaatgggaatctggggacccaacacaacatcctgaagattattaaaaggaaaagatgctgattggtacataaatcttttacatggccttggtctagaggaggcaggcttttagaatcatgttttgttaatccgcttcactaaattggaccttcacatatctaaaaagctctgaagtgtttgtatatttgaaatacctcaataaagagagagctcattgactgt

SEQ ID NO: 13112 - DNA, 1893 bp, Homo sapiens
  source 1..1893: mol_type = unassigned DNA
gcgtttcggttcagtgacgtcgtaaattggaatgaggcatccagtttagcaacagcagagatgacgactctgcgattctgagagtccctggcgagcccgggctagcgaaaagtgggggcagaacgaactacatctcccatcgtgccaggaggcggtcccgcccgtttccccctgggagttgtagtctaaccccctcggatccaacagcaacctcagtgcgtgaactctgttatccagaaggcctcgccctgccgccgccgaagctggaattcgtcggctagtagttctcgccggcaactagaggaacctgttggcgtggcccagaaggcttagcgggattgcacgagccctcagattcatcgctaccccgaggctaagcgccatgcctcatattgacaacgatgtgaaactggacttcaaggatgtccttttgaggcccaaacgcagtacccttaagtctcgaagtgaggtggatctcacaagatccttttcatttcggaactcaaagcagacatactctggggttcccatcattgctgccaatatggatactgtgggcacctttgagatggccaaggttctctgtaagttctctctcttcactgctgtccataagcactatagcctcgttcagtggcaagagtttgctggccagaatcctgactgtcttgagcatctggctgccagctcaggcacaggctcttctgactttgagcagctggaacagatcctggaagctattccccaggtgaagtatatatgcctggatgtggcaaatggctactctgaacactttgttgaatttgtaaaagatgtacggaagcgcttcccccagcacaccatcatggcagggaatgtggtaacaggagagatggtagaagagctcatcctttctggggctgacatcatcaaagtgggaattgggccaggctctgtgtgtactactcggaagaaaactggagtggggtatccacagctcagcgcagtgatggagtgtgcagatgctgctcatggcctcaaaggccacatcatttcagatggaggttgcagctgtcctggggatgtggccaaggcttttggggcaggagctgacttcgtgatgctgggtggcatgctggctgggcacagtgagtcaggtggtgagctcatcgagagggatggcaagaagtacaagctcttctatggaatgagttctgaaatggccatgaagaagtatgctgggggcgtggctgagtacagagcctcagagggaaagacagtggaagttccttttaaaggagatgtggaacataccatccgagacatcctaggagggatccgctctacgtgtacctatgtgggagcagctaagctcaaagagttgagcaggagaactaccttcatccgagtcacccagcaggtgaatccaatcttcagtgaggcgtgctagacctgagcagttctaccctcccaaggcaccagtactctaccatggggcatcccaagtggggtcctcacccatcccagctactgcagctctgtattactttgtcatttcctgttgtctcactcctgagggctcctgcagtaactctgtacttctctatctgcacacacaaaatgcccaaggcactcactggggaggaagcaaggaagcaaacagtctgagaaaatgatgcaagaaaatcaaatgggaatctggggacccaacacaacatcctgaagattattaaaaggaaaagatgctgattggtacataaatcttttacatggccttggtctagaggaggcaggcttttagaatcatgttttgttaatccgcttcactaaattggaccttcacatatctaaaaagctctgaagtgtttgtatatttgaaatacctcaataaagagagagctcattgactgtaaa

SEQ ID NO: 13113 - DNA, 3035 bp, Homo sapiens
  source 1..3035: mol_type = unassigned DNA
ggagtcagtgatttgaacgaagtactttcagtttcatattactctaaatccattacaaatctgcttagcttctaaatatttcatcaatgaggaaatcccagccctacaacttcggaacagtgaaatattagtccagggatccagtgagagacacagaagtgctagaagccagtgctcgtgaactaaggagaaaaagaacagacaagggaacagcctggacatggcatcagagatccacatgacaggcccaatgtgcctcattgagaacactaatgggcgactgatggcgaatccagaagctctgaagatcctttctgccattacacagcctatggtggtggtggcaattgtgggcctctaccgcacaggcaaatcctacctgatgaacaagctggctggaaagaaaaagggcttctctctgggctccacggtgcagtctcacactaaaggaatctggatgtggtgtgtgccccaccccaagaagccaggccacatcctagttctgctggacaccgagggtctgggagatgtagagaagggtgacaaccagaatgactcctggatcttcgccctggccgtcctcctgagcagcaccttcgtgtacaatagcataggaaccatcaaccagcaggctatggaccaactgtactatgtgacagagctgacacatagaatccgatcaaaatcctcacctgatgagaatgagaatgaggttgaggattcagctgactttgtgagcttcttcccagactttgtgtggacactgagagatttctccctggacttggaagcagatggacaacccctcacaccagatgagtacctgacatactccctgaagctgaagaaaggtaccagtcaaaaagatgaaacttttaacctgcccagactctgtatccggaaattcttcccaaagaaaaaatgctttgtctttgatcggcccgttcaccgcaggaagcttgcccagctcgagaaactacaagatgaagagctggaccccgaatttgtgcaacaagtagcagacttctgttcctacatctttagtaattccaaaactaaaactctttcaggaggcatccaggtcaacgggcctcgtctagagagcctggtgctgacctacgtcaatgccatcagcagtggggatctgccgtgcatggagaacgcagtcctggccttggcccagatagagaactcagctgcagtgcaaaaggctattgcccactatgaacagcagatgggccagaaggtgcagctgcccacagaaaccctccaggagctgctggacctgcacagggacagtgagagagaggccattgaagtcttcatcaggagttccttcaaagatgtggaccatctatttcaaaaggagttagcggcccagctagaaaaaaagcgggatgacttttgtaaacagaatcaggaagcatcatcagatcgttgctcagctttacttcaggtcattttcagtcctctagaagaagaagtgaaggcgggaatttattcgaaaccagggggctatcgtctctttgttcagaagctacaagacctgaagaaaaagtactatgaggaaccgaggaaggggatacaggctgaagagattctgcagacatacttgaaatccaaggagtctatgactgatgcaattctccagacagaccagactctcacagaaaaagaaaaggagattgaagtggaacgtgtgaaagctgagtctgcacaggcttcagcaaaaatgttgcaggaaatgcaaagaaagaatgagcagatgatggaacagaaggagaggagttatcaggaacacttgaaacaactgactgagaagatggagaacgacagggtccagttgctgaaagagcaagagaggaccctcgctcttaaacttcaggaacaggagcaactactaaaagagggatttcaaaaagaaagcagaataatgaaaaatgagatacaggatctccagacgaaaatgagacgacgaaaggcatgtaccataagctaaagaccagagccttcctgtcacccctaaccaaggcataattgaaacaattttagaatttggaacaagcgtcactacatttgataataattagatcttgcatcataacaccaaaagtttataaaggcatgtggtacaatgatcaaaatcatgttttttcttaaaaaaaaaaaaagactgtaaattgtgcaacaaagatgcatttacctctgtatcaactcaggaaatctcataagctggtaccactcaggagaagtttattcttccagatgaccagcagtagacaaatggatactgagcagagtcttaggtaaaagtcttgggaaatatttgggcattggtctggccaagtctacaatgtcccaatatcaaggacaaccaccctagcttcttagtgaagacaatgtacagttatccgttagatcaagactacacggtctatgagcaataatgtgatttctggacattgcccatgtataatcctcactgatgatttcaagctaaagcaaaccaccttatacagagatctagaatctctttatgttctccagaggaaggtggaagaaaccatgggcaggagtaggaattgagtgataaacaattgggctaatgaagaaaacttctcttattgttcagttcatccagattataacttcaatgggacactttagaccattagacaattgacactggattaaacaaattcacataatgccaaatacacaatgtatttatagcaacgtataatttgcaaagatggactttaaaagatgctgtgtaactaaactgaaataattcaattacttattatttagaatgttaaagcttatgatagtcttttctaactcttaacactcatacttgaaaactttctgagtttccccagaagagaatatgggattttttttgacatttttgactcatttaataatgctcttgtgtttacctagtatatgtagactttgtcttatgtgtgaaaagtcctaggaaagtggttgatgtttcttatagcaattaaaaattatttttgaactgaaaa

SEQ ID NO: 13114 - DNA, 1845 bp, Homo sapiens
  source 1..1845: mol_type = unassigned DNA
atcaatgaggaaatcccagccctacaacttcggaacagtgaaatattagtccagggatccagtgagagacacagaagtgctagaagccagtgctcgtgaactaaggagaaaaagaacagacaagggaacagcctatggtggtggtggcaattgtgggcctctaccgcacaggcaaatcctacctgatgaacaagctggctggaaagaaaaagggcttctctctgggctccacggtgcagtctcacactaaaggaatctggatgtggtgtgtgccccaccccaagaagccaggccacatcctagttctgctggacaccgagggtctgggagatgtagagaagggtgacaaccagaatgactcctggatcttcgccctggccgtcctcctgagcagcaccttcgtgtacaatagcataggaaccatcaaccagcaggctatggaccaactgtactatgtgacagagctgacacatagaatccgatcaaaatcctcacctgatgagaatgagaatgaggttgaggattcagctgactttgtgagcttcttcccagactttgtgtggacactgagagatttctccctggacttggaagcagatggacaacccctcacaccagatgagtacctgacatactccctgaagctgaagaaaggtaccagtcaaaaagatgaaacttttaacctgcccagactctgtatccggaaattcttcccaaagaaaaaatgctttgtctttgatcggcccgttcaccgcaggaagcttgcccagctcgagaaactacaagatgaagagctggaccccgaatttgtgcaacaagtagcagacttctgttcctacatctttagtaattccaaaactaaaactctttcaggaggcatccaggtcaacgggcctcgtctagagagcctggtgctgacctacgtcaatgccatcagcagtggggatctgccgtgcatggagaacgcagtcctggccttggcccagatagagaactcagctgcagtgcaaaaggctattgcccactatgaacagcagatgggccagaaggtgcagctgcccacagaaaccctccaggagctgctggacctgcacagggacagtgagagagaggccattgaagtcttcatcaggagttccttcaaagatgtggaccatctatttcaaaaggagttagcggcccagctagaaaaaaagcgggatgacttttgtaaacagaatcaggaagcatcatcagatcgttgctcagctttacttcaggtcattttcagtcctctagaagaagaagtgaaggcgggaatttattcgaaaccagggggctatcgtctctttgttcagaagctacaagacctgaagaaaaagtactatgaggaaccgaggaaggggatacaggctgaagagattctgcagacatacttgaaatccaaggagtctatgactgatgcaattctccagacagaccagactctcacagaaaaagaaaaggagattgaagtggaacgtgtgaaagctgagtctgcacaggcttcagcaaaaatgttgcaggaaatgcaaagaaagaatgagcagatgatggaacagaaggagaggagttatcaggaacacttgaaacaactgactgagaagatggagaacgacagggtccagttgctgaaagagcaagagaggaccctcgctcttaaacttcaggaacaggagcaactactaaaagagggatttcaaaaagaaagcagaataatgaaaaatgagatacaggatctccagacgaaaatgagacgacgaaaggcatgtaccataagctaaagaccagagccttcctgtcacccctaaccaaggcataattgaa

SEQ ID NO: 13115 - DNA, 2220 bp, Homo sapiens
  source 1..2220: mol_type = unassigned DNA
atattagtgcatttctttgcagaggttacctctttttcttgtctctcgtcaggtctctgacattgacagagcctggacgttggaggaagccccaggacgttggaggggtaaagtaaaagtccacagttaccgtgagagaaaaaagagggagaaagcagtgcagccaaactcggaagaaaagagaggaggaaaaggactcgactttcacattggaacaaccttctttccagtgctaaaggatctctgatctggggaacaacaccctggacatggctccagagatcaacttgccgggcccaatgagcctcattgataacactaaagggcagctggtggtgaatccagaagctctgaagatcctatctgcaattacgcagcctgtggtggtggtggcgattgtgggcctctatcgcacaggcaaatcctacctgatgaacaagctggctgggaagaaaaacggcttctctctaggctccacagtgaagtctcacaccaagggaatctggatgtggtgtgtgcctcatcccaagaagccagaacacaccctagttctgctcgacactgagggcctgggagatatagagaagggtgacaatgagaatgactcctggatctttgccttggccatcctcctgagcagcaccttcgtgtacaatagcatgggaaccatcaaccagcaggccatggaccaacttcactatgtgacagagctgacagatcgaatcaaggcaaactcctcacctggtaacaattctgtagacgactcagctgactttgtgagcttttttccagcatttgtgtggactctcagagatttcaccctggaactggaagtagatggagaacccatcactgctgatgactacttggagctttcgctaaagctaagaaaaggtactgataagaaaagtaaaagctttaatgatcctcggttgtgcatccgaaagttcttccccaagaggaagtgcttcgtcttcgattggcccgctcctaagaagtaccttgctcacctagagcagctaaaggaggaagagctgaaccctgatttcatagaacaagttgcagaattttgttcctacatcctcagccattccaatgtcaagactctttcaggtggcattccagtcaatgggcctcgtctagagagcctggtgctgacctacgtcaatgccatcagcagtggggatctaccctgcatggagaacgcagtcctggccttggcccagatagagaactcagccgcagtggaaaaggctattgcccactatgaacagcagatgggccagaaggtgcagctgcccacggaaaccctccaggagctgctggacctgcacagggacagtgagagagaggccattgaagtcttcatgaagaactctttcaaggatgtggaccaaatgttccagaggaaattaggggcccagttggaagcaaggcgagatgacttttgtaagcagaattccaaagcatcatcagattgttgcatggctttacttcaggatatatttggccctttagaagaagatgtcaagcagggaacattttctaaaccaggaggttaccgtctctttactcagaagctgcaggagctgaagaataagtactaccaggtgccaaggaaggggatacaggccaaagaggtgctgaaaaaatatttggagtccaaggaggatgtggctgatgcacttctacagactgatcagtcactctcagaaaaggaaaaagcgattgaagtggaacgtataaaggctgaatctgcagaagctgcaaagaaaatgttggaggaaatacaaaagaagaatgaggagatgatggaacagaaagagaagagttatcaggaacatgtgaaacaattgactgagaagatggagagggacagggcccagttaatggcagagcaagagaagaccctcgctcttaaacttcaggaacaggaacgccttctcaaggagggattcgagaatgagagcaagagacttcaaaaagacatatgggatatccagatgagaagcaaatcattggagccaatatgtaacatactctaaaagtccaaggagcaaaatttgcctgtccagctccctctccccaagaaacaacatgaatgagcaacttcagagtgtcaaacaactgccattaaacttaactcaaaatcatgatgcatgcatttttgttgaaccataaagtttgcaaagtaaaggttaagtatgaggtcaatgtttt

SEQ ID NO: 13116 - DNA, 3687 bp, Homo sapiens
  source 1..3687: mol_type = unassigned DNA
gttgaagaagtacgagaagaccaactggatagtaatttccagatgcaatcagaaaatttctgttcttatatcttcacccatgcaaagaccaagaccctgagagagggaatccttgtcactggaaaccggctggggatgctggtggagacctacctggatgccatcaacagtggagcgactccttgtctggagaatgcaatggcagttctggcccagtgtgagaactcagcagccgtgcagagggcagccaaccactacagccagcagatggcccagcaagtgagattccccacagacacactccaggagctgctggacgtgcatgcagtttgtgagagggaagccattgcagtcttcatggagtactccttcaaagataaaagccaggaatttcagaagaagcttgtggacaccatggagaaaaagaaggaagactttgtgctgcagaatgaagaggcatctgccaaatattgtcaggctgagcttaagcggctttcagagctcttgacagaaagtatttcaagaggaactttctttgttccgggggggcacaatatctacttagaagcaaaaaagaagattgaacaggactatacactagtgcccagaaaaggagttaaggtctctgacattgacagagcctggacgttggaggaagccccaggacgttggaggggtaaagtaaaagtccacagttaccgtgagagaaaaaagagggagaaagcagtgcagccaaactcggaagaaaagagaggaggaaaaggactcgactttcacattggaacaaccttctttccagtgctaaaggatctctgatctggggaacaacaccctggacatggctccagagatcaacttgccgggcccaatgagcctcattgataacactaaagggcagctggtggtgaatccagaagctctgaagatcctatctgcaattacgcagcctgtggtggtggtggcgattgtgggcctctatcgcacaggcaaatcctacctgatgaacaagctggctgggaagaaaaacggcttctctctaggctccacagtgaagtctcacaccaagggaatctggatgtggtgtgtgcctcatcccaagaagccagaacacaccctagttctgctcgacactgagggcctgggagatatagagaagggtgacaatgagaatgactcctggatctttgccttggccatcctcctgagcagcaccttcgtgtacaatagcatgggaaccatcaaccagcaggccatggaccaacttcactatgtgacagagctgacagatcgaatcaaggcaaactcctcacctggtaacaattctgtagacgactcagctgactttgtgagcttttttccagcatttgtgtggactctcagagatttcaccctggaactggaagtagatggagaacccatcactgctgatgactacttggagctttcgctaaagctaagaaaaggtactgataagaaaagtaaaagctttaatgatcctcggttgtgcatccgaaagttcttccccaagaggaagtgcttcgtcttcgattggcccgctcctaagaagtaccttgctcacctagagcagctaaaggaggaagagctgaaccctgatttcatagaacaagttgcagaattttgttcctacatcctcagccattccaatgtcaagactctttcaggtggcattccagtcaatgggcctcgtctagagagcctggtgctgacctacgtcaatgccatcagcagtggggatctaccctgcatggagaacgcagtcctggccttggcccagatagagaactcagccgcagtggaaaaggctattgcccactatgaacagcagatgggccagaaggtgcagctgcccacggaaaccctccaggagctgctggacctgcacagggacagtgagagagaggccattgaagtcttcatgaagaactctttcaaggatgtggaccaaatgttccagaggaaattaggggcccagttggaagcaaggcgagatgacttttgtaagcagaattccaaagcatcatcagattgttgcatggctttacttcaggatatatttggccctttagaagaagatgtcaagcagggaacattttctaaaccaggaggttaccgtctctttactcagaagctgcaggagctgaagaataagtactaccaggtgccaaggaaggggatacaggccaaagaggtgctgaaaaaatatttggagtccaaggaggatgtggctgatgcacttctacagactgatcagtcactctcagaaaaggaaaaagcgattgaagtggaacgtataaaggctgaatctgcagaagctgcaaagaaaatgttggaggaaatacaaaagaagaatgaggagatgatggaacagaaagagaagagttatcaggaacatgtgaaacaattgactgagaagatggagagggacagggcccagttaatggcagagcaagagaagaccctcgctcttaaacttcaggaacaggaacgccttctcaaggagggattcgagaatgagagcaagagacttcaaaaagacatatgggatatccagatgagaagcaaatcattggagccaatatgtaacatactctaaaagtccaaggagcaaaatttgcctgtccagctccctctccccaagaaacaacatgaatgagcaacttcagagtgtcaaacaactgccattaaacttaactcaaaatcatgatgcatgcatttttgttgaaccataaagtttgcaaagtaaaggttgcacaccgatgctccagaattgtgagggagccatactctacagctattccaccgaggataatactaccattgtaaaggcatctcacgggaaaacaacacagctaccatgaaccagcaccatgatctctggatgaaatgctggaagcttctgcagtgtcagctatgagtaaatggatgccaccaccttcacattttcagtaaacaaatactcccctaccccatgaaaagttgcatctttgagctgctcacatctccagctaagcctcacaaaagtcaatctgcagggaagaatctaaatcatatgcctacccatgggaaagtctgagaattagagtatttttgtcttctacttttggaggaagaaactaataacgtgggaaattttcctgtatgtttagtcaaccagtttttccatgcagatgtatggagataaatcttatagtaggaataacctaagacttgagttagtatttttgtgtacatcagatacaacactcttctcatcttttttgtcattatttttcaatgttgttttaatctttccactgttgtttcatgtcatgcactttgttaatattctttaagttattcttagtttttaacaatgatacttaagaaagacttaataggactatagaataggtactccctattccccaaccctgggaacacaatttaacatattagttcatttgtatttaagatctatcttgtttatgcctcagtttagttattgctcttacctttcaaacagttagtattttgtatctagttctgtgaaagcaaaaagcaactttattctttcttacaattccccttttacttaatcggaacatttctttcctgtttgttcattagtcactctcagataaatgaatagtctctttttctaaaaaaaaaaataacatttgacctaaa

SEQ ID NO: 13117 - DNA, 1498 bp, Homo sapiens
  source 1..1498: mol_type = unassigned DNA
attacaaaggttgcttaacttctaattatttgatcactgaggaaaatccagaaagctacacaacactgaaggggtgaaataaaagtccagcgatccagcgaaagaaaagagaagtgacagaaacaactttacctggactgaagataaaagcacagacaagagaacaatgccctggacatggctccagagatccacatgacaggcccaatgtgcctcattgagaacactaatggggaactggtggcgaatccagaagctctgaaaatcctgtctgccattacacagcctgtggtggtggtggcaattgtgggcctctaccgcacaggaaaatcctacctgatgaacaagctagctgggaagaataagggcttctctctgggctccacagtgaaatctcacaccaaaggaatctggatgtggtgtgtgcctcaccccaaaaagccagaacacaccttagtcctgcttgacactgagggcctgggagatgtaaagaagggtgacaaccagaatgactcctggatcttcaccctggccgtcctcctgagcagcactctcgtgtacaatagcatgggaaccatcaaccagcaggctatggaccaactgtactatgtgacagagctgacacatcgaatccgatcaaaatcctcacctgatgagaatgagaatgaggattcagctgactttgtgagcttcttcccagattttgtgtggacactgagagatttctccctggacttggaagcagatggacaacccctcacaccagatgagtacctggagtattccctgaagctaacgcaaggtaccagtcaaaaagataaaaattttaatctgccccgactctgtatccggaagttcttcccaaagaaaaaatgttttgtcttcgatctgcccattcaccgcaggaagcttgcccagcttgagaaactacaagatgaagagctggaccctgaatttgtgcaacaagtagcagacttctgttcctacatctttagcaattccaaaactaaaactctttcaggaggcatcaaggtcaatgggcctcgtctagagagcctagtgctgacctatatcaatgctatcagcagaggggatctgccctgcatggagaacgcagtcctggccttggcccagatagagaactcagccgcagtgcaaaaggctattgcccactatgaccagcagatgggccagaaggtgcagctgcccgcagaaaccctccaggagctgctggacctgcacagggttagtgagagggaggccactgaagtctatatgaagaactctttcaaggatgtggaccatctgtttcaaaagaaattagcggcccagctagacaaaaagcgggatgacttttgtaaacagaatcaagaagcatcatcagatcgttgctcagctttacttcaggtcattttcagtcctctagaagaagaagtgaaggcgggaatttattcgaaaccagggggctattgtctctttattcagaagctacaagacc

SEQ ID NO: 13118 - DNA, 3037 bp, Homo sapiens
  source 1..3037: mol_type = unassigned DNA
actttcagtttcattaggctctgaagccattacaaaggttgcttaacttctaattatttgatcactgaggaaaatccagaaagctacacaacactgaaggggtgaaataaaagtccagcgatccagcgaaagaaaagagaagtgacagaaacaactttacctggactgaagataaaagcacagacaagagaacaatgccctggacatggctccagagatccacatgacaggcccaatgtgcctcattgagaacactaatggggaactggtggcgaatccagaagctctgaaaatcctgtctgccattacacagcctgtggtggtggtggcaattgtgggcctctaccgcacaggaaaatcctacctgatgaacaagctagctgggaagaataagggcttctctctgggctccacagtgaaatctcacaccaaaggaatctggatgtggtgtgtgcctcaccccaaaaagccagaacacaccttagtcctgcttgacactgagggcctgggagatgtaaagaagggtgacaaccagaatgactcctggatcttcaccctggccgtcctcctgagcagcactctcgtgtacaatagcatgggaaccatcaaccagcaggctatggaccaactgtactatgtgacagagctgacacatcgaatccgatcaaaatcctcacctgatgagaatgagaatgaggattcagctgactttgtgagcttcttcccagattttgtgtggacactgagagatttctccctggacttggaagcagatggacaacccctcacaccagatgagtacctggagtattccctgaagctaacgcaaggtaccagtcaaaaagataaaaattttaatctgccccgactctgtatccggaagttcttcccaaagaaaaaatgttttgtcttcgatctgcccattcaccgcaggaagcttgcccagcttgagaaactacaagatgaagagctggaccctgaatttgtgcaacaagtagcagacttctgttcctacatctttagcaattccaaaactaaaactctttcaggaggcatcaaggtcaatgggcctcgtctagagagcctagtgctgacctatatcaatgctatcagcagaggggatctgccctgcatggagaacgcagtcctggccttggcccagatagagaactcagccgcagtgcaaaaggctattgcccactatgaccagcagatgggccagaaggtgcagctgcccgcagaaaccctccaggagctgctggacctgcacagggttagtgagagggaggccactgaagtctatatgaagaactctttcaaggatgtggaccatctgtttcaaaagaaattagcggcccagctagacaaaaagcgggatgacttttgtaaacagaatcaagaagcatcatcagatcgttgctcagctttacttcaggtcattttcagtcctctagaagaagaagtgaaggcgggaatttattcgaaaccagggggctattgtctctttattcagaagctacaagacctggagaaaaagtactatgaggaaccaaggaaggggatacaggctgaagagattctgcagacatacttgaaatccaaggagtctgtgaccgatgcaattctacagacagaccagattctcacagaaaaggaaaaggagattgaagtggaatgtgtaaaagctgaatctgcacaggcttcagcaaaaatggtggaggaaatgcaaataaagtatcagcagatgatggaagagaaagagaagagttatcaagaacatgtgaaacaattgactgagaagatggagagggagagggcccagttgctggaagagcaagagaagaccctcactagtaaacttcaggaacaggcccgagtactaaaggagagatgccaaggtgaaagtacccaacttcaaaatgagatacaaaagctacagaagaccctgaaaaaaaaaaccaagagatatatgtcgcataagctaaagatctaaacaacagagcttttctgtcatcctaacccaaggcataactgaaacaattttagaatttggaacaagtgtcactatatttgataataattagatcttgcatcataacactaaaagtttacaagaacatgcagttcaatgatcaaaatcatgttttttccttaaaaagattgtaaattgtgcaacaaagatgcatttacctctgtaccaacagaggagggatcatgagttgccaccactcagaagtttattcttccagacgaccagtggatactgaggaaagtcttaggtaaaaatcttgggacatatttgggcactggtttggccaagtgtacaatgggtcccaatatcagaaacaaccatcctagcttcctagggaagacagtgtacagttctccattatatcaaggctacaaggtctatgagcaataatgtgatttctggacattgcccatggataattctcactgatggatctcaagctaaagcaaaccatcttatacagagatctagaatcttatattttccataggaaggtaaagaaatcattagcaagagtaggaattgaatcataaacaaattggctaatgaagaaatcttttctttcttgttcaattcatctagattataaccttaatgtgacacctgagacctttagacagttgaccctgaattaaatagtcacatggtaacaattatgcactgtgtaattttagtaatgtataacatgcaatgatgcactttaactgaagatagagactatgttagaaaattgaactaatttaattatttgattgttttaatcctaaagcataagttagtcttttcctgattcttaaaggtcatacttgaaatcctgccaattttccccaaagggaatatggaatttttttgactttcttttgagcaataaaataattgtcttgccattacttagtatatgtagacttcatcccaattgtcaaacatcctaggtaagtggttgacatttcttacagcaattacagattatttttgaactagaaataaactaaactagaaataaaa

SEQ ID NO: 13119 - DNA, 2939 bp, Homo sapiens
  source 1..2939: mol_type = unassigned DNA
cagtttcattaggctctgaagccattacaaaggttgcttaacttctaattatttgatcactgaggaaaatccagaaagctacacaacactgaaggggtgaaataaaagtccagcgatccagcgaaagaaaagagaagtgacagaaacaactttacctggactgaagataaaagcacagacaagagaacaatgccctggacatggctccagagatccacatgacaggcccaatgtgcctcattgagaacactaatggggaactggtggcgaatccagaagctctgaaaatcctgtctgccattacacagcctgtggtggtggtggcaattgtgggcctctaccgcacaggaaaatcctacctgatgaacaagctagctgggaagaataagggcttctctctgggctccacagtgaaatctcacaccaaaggaatctggatgtggtgtgtgcctcaccccaaaaagccagaacacaccttagtcctgcttgacactgagggcctgggagatgtaaagaagggtgacaaccagaatgactcctggatcttcaccctggccgtcctcctgagcagcactctcgtgtacaatagcatgggaaccatcaaccagcaggctatggaccaactgtactatgtgacagagctgacacatcgaatccgatcaaaatcctcacctgatgagaatgagaatgaggattcagctgactttgtgagcttcttcccagattttgtgtggacactgagagatttctccctggacttggaagcagatggacaacccctcacaccagatgagtacctggagtattccctgaagctaacgcaaggtaacaggaagcttgcccagcttgagaaactacaagatgaagagctggaccctgaatttgtgcaacaagtagcagacttctgttcctacatctttagcaattccaaaactaaaactctttcaggaggcatcaaggtcaatgggcctcgtctagagagcctagtgctgacctatatcaatgctatcagcagaggggatctgccctgcatggagaacgcagtcctggccttggcccagatagagaactcagccgcagtgcaaaaggctattgcccactatgaccagcagatgggccagaaggtgcagctgcccgcagaaaccctccaggagctgctggacctgcacagggttagtgagagggaggccactgaagtctatatgaagaactctttcaaggatgtggaccatctgtttcaaaagaaattagcggcccagctagacaaaaagcgggatgacttttgtaaacagaatcaagaagcatcatcagatcgttgctcagctttacttcaggtcattttcagtcctctagaagaagaagtgaaggcgggaatttattcgaaaccagggggctattgtctctttattcagaagctacaagacctggagaaaaagtactatgaggaaccaaggaaggggatacaggctgaagagattctgcagacatacttgaaatccaaggagtctgtgaccgatgcaattctacagacagaccagattctcacagaaaaggaaaaggagattgaagtggaatgtgtaaaagctgaatctgcacaggcttcagcaaaaatggtggaggaaatgcaaataaagtatcagcagatgatggaagagaaagagaagagttatcaagaacatgtgaaacaattgactgagaagatggagagggagagggcccagttgctggaagagcaagagaagaccctcactagtaaacttcaggaacaggcccgagtactaaaggagagatgccaaggtgaaagtacccaacttcaaaatgagatacaaaagctacagaagaccctgaaaaaaaaaaccaagagatatatgtcgcataagctaaagatctaaacaacagagcttttctgtcatcctaacccaaggcataactgaaacaattttagaatttggaacaagtgtcactatatttgataataattagatcttgcatcataacactaaaagtttacaagaacatgcagttcaatgatcaaaatcatgttttttccttaaaaagattgtaaattgtgcaacaaagatgcatttacctctgtaccaacagaggagggatcatgagttgccaccactcagaagtttattcttccagacgaccagtggatactgaggaaagtcttaggtaaaaatcttgggacatatttgggcactggtttggccaagtgtacaatgggtcccaatatcagaaacaaccatcctagcttcctagggaagacagtgtacagttctccattatatcaaggctacaaggtctatgagcaataatgtgatttctggacattgcccatggataattctcactgatggatctcaagctaaagcaaaccatcttatacagagatctagaatcttatattttccataggaaggtaaagaaatcattagcaagagtaggaattgaatcataaacaaattggctaatgaagaaatcttttctttcttgttcaattcatctagattataaccttaatgtgacacctgagacctttagacagttgaccctgaattaaatagtcacatggtaacaattatgcactgtgtaattttagtaatgtataacatgcaatgatgcactttaactgaagatagagactatgttagaaaattgaactaatttaattatttgattgttttaatcctaaagcataagttagtcttttcctgattcttaaaggtcatacttgaaatcctgccaattttccccaaagggaatatggaatttttttgactttcttttgagcaataaaataattgtcttgccattacttagtatatgtagacttcatcccaattgtcaaacatcctaggtaagtggttgacatttcttacagcaattacagattatttttgaactagaaataaactaaactagaaataaaataa

SEQ ID NO: 13120 - DNA, 411 bp, Homo sapiens
  source 1..411: mol_type = unassigned DNA
caagatgaagagctggaccctgaatttgtgcaacaagtagcagacttctgttcctacatctttagcaattccaaaactaaaactctttcaggaggcatcaaggctgaagagattctgcagacatacttgaaatccaaggagtctgtgaccgatgcaattctacagacagaccagattctcacagaaaaggaaaaggagattgaagtggaatgtgtaaaagctgaatctgcacaggcttcagcaaaaatggtggaggaaatgcaaataaagtatcagcagatgatggaagagaaagagaagagttatcaagaacatgtgaaacaattgactgagaagatggagagggagagggcccagttgctggaagagcaagagaagaccctcactagtaaacttcaggtatccaaatgc

SEQ ID NO: 13121 - DNA, 6127 bp, Homo sapiens
  source 1..6127: mol_type = unassigned DNA
ctcacagactcttacttggatgtctgtaaatccggctggactttcagcttctaagaacagtccgtttctcgaggatccaggcgcaggaggacagagcaatgggtgagagaactcttcacgctgcagtgcccacaccaggttatccagaatctgaatccatcatgatggcccccatttgtctagtggaaaaccaggaagagcagctgacagtgaattcaaaggcattagagattcttgacaagatttctcagcccgtggtggtggtggccattgtagggctataccgcacaggaaaatcctatctcatgaatcgtcttgcaggaaagcgcaatggcttccctctgggctccacggtgcagtctgaaactaagggcatctggatgtggtgtgtgccccacctctctaagccaaaccacaccctggtccttctggacaccgagggcctgggcgatgtagaaaagagtaaccctaagaatgactcgtggatctttgccctggctgtgcttctaagcagcagctttgtctataacagcgtgagcaccatcaaccaccaggccctggagcagctgcactatgtgactgagctagcagagctaatcagggcaaaatcctgccccagacctgatgaagctgaggactccagcgagtttgcgagtttctttccagactttatttggactgttcgggattttaccctggagctaaagttagatggaaaccccatcacagaagatgagtacctggagaatgccttgaagctgattccaggcaagaatcccaaaattcaaaattcaaacatgcctagagagtgtatcaggcatttcttccgaaaacggaagtgctttgtctttgaccggcctacaaatgacaagcaatatttaaatcatatggacgaagtgccagaagaaaatctggaaaggcatttccttatgcaatcagacaacttctgttcttatatcttcacccatgcaaagaccaagaccctgagagagggaatcattgtcactggaaagcggctggggactctggtggtgacttatgtagatgccatcaacagtggagcagtaccttgtctggagaatgcagtgacagcactggcccagcttgagaacccagcggctgtgcagagggcagccgaccactatagccagcagatggcccagcaactgaggctccccacagacacgctccaggagctgctggacgtgcatgcagcctgtgagagggaagccattgcagtcttcatggagcactccttcaaggatgaaaaccatgaattccagaagaagcttgtggacaccatagagaaaaagaagggagactttgtgctgcagaatgaagaggcatctgccaaatattgccaggctgagcttaagcggctttcagagcacctgacagaaagcattttgagaggaattttctctgttcctggaggacacaatctctacttagaagaaaagaaacaggttgagtgggactataagctagtgcccagaaaaggagttaaggcaaacgaggtcctccagaacttcctgcagtcacaggtggttgtagaggaatccatcctgcagtcagacaaagccctcactgctggagagaaggccatagcagcggagcgggccatgaaggaagcagctgagaaggaacaggagctgctaagagaaaaacagaaggagcagcagcaaatgatggaggctcaagagagaagcttccaggaatacatggcccaaatggagaagaagttggaggaggaaagggaaaaccttctcagagagcatgaaaggctgctaaaacacaagctgaaggtacaagaagaaatgcttaaggaagaatttcaaaagaaatctgagcagttaaataaagagattaatcaactgaaagaaaaaattgaaagcactaaaaatgaacagttaaggctcttaaagatccttgacatggctagcaacataatgattgtcactctacctggggcttccaagctacttggagtagggacaaaatatcttggctcacgtatttaagagcctgaatattccaggtaagaaaatataaaatgaggtttattttattttaataacataacactgttgctcattttgtaagtatatgtgttatagcagtttcattcaagaaaagtttaaaattaaaaagtgattatcaaagaatatcagggcctgacatccacaaaaaacaaacttaattttgattgaactaataatttataaacatgggaaacaagtcagaagtagtgacattattcctagaaaagatttaaggaaagcaaaaagacaactggtaagattaagaagccattaaccatttgcaatttatattatagtcacagaaataatttcagttatgactagctcttgccgattaatgagaagagagcagctccacaatttttaatttttttaacttttattttagattcaggggtatatgtgcaggtttgttacataggtaaactgcatgtcatgggggtttggtgtgcagataattttatcacacaattattaatcataatacccaataggtttttttctgatcttctccctcctcccaacctacaccctcaagtagaccccagtgtctcttgttctcctctgagtatccatgtgttctctttgtttggcccccatttataagtgagaacatgtggtatttgggtttctgttcctgtgttagtttgcttatgataatggcttccagctccatccatattgctacagaggacatgatcttgttgttttttatggctgcatagtattccatggtgtttgtatataccacattttcattatccagcctattattaatgcacatttaggttgattccttatctttgctattgtgaacagtgctgcaatggacatacacgtgcatgtgcctttatggtacaatgatttatatttccttgggatatgcattcctttgggaataatgggattgctgagttgaatggtaattctgagttctttgaggaatcaccaacctgctttccacagtggctaaactaatttacactcccaccaacagtgtatgtgttccattttctccacaaccttgccagcatctgttatttattgactttctagtaacagccattctgactggtgtgagatggtatgcatttctgtagtgattagtgatgatgagtgatttttatatgctttttaaatgcatatatgtcttcttttgaaatgtgttcatgttctttgcccactttctttttaatggggttgcttgtttttcgcttgtaaattttttgaagcttcttatagattctggatattagatctttgttggatgcatagttggcaaatattttctaccattctgtaggttgtctgttactttgttaattgtttcattttgttttgtttttgttttttgaaacagggtctcactttgacacccaggctggagtgcagtagcacaaacatgggtcattgtagcctcaacctcccaggctcaagcagtcctttcacctcaaccccccacatagctgggactacaggtgcttacacccaagaccagttaattttttgtatttgtttgtagagatgtgtttttccatgttgcccaagctggtcttgaactactgagctcaagcaatctgcctgcttcagcctcccaaagtactgggatttaggcatgagccaccacatctggccaatagtttcttttgatgtgcagaagctctttaatttaattagatctcctttgtcagtttttgtttttgctgcaattgcttatgttatcttcatcatgaaattttagccaagtcttatgtccagaatggtatttcttaggttatttttcagagtttttatagtttaatgttttatatttaagtctttaatccttcttaagttgatttttgtatgcagagtaagctgggggcccagtttcaatcttctgcatatggctagccagtaatcccagcaccatttattaaatggggacttctttccccattgcttgtttttgtcagctttgtccaagatcagatgattgtaggtgtacagcattatttctggactctctgttatgttccatttatctgtgtgtctgtttttctactaataccatgctgttttggttactgtagctctgtagtatggtttgaggtttggtaacttgatgcctccccttttgttctttatgtttaggattgccttggctaggctcttttttggttccatatgaattttaaagtagtttctaattctgtgaagaatgtcattggtagtttgatagggatagcattgaactatttgctcaactcaacattttaggaatttatttctgctgtctagtgctcaaaacttgcagctagaattgagggaagagagagaccttcttatattgttttatattgtttgatactcagtacctgttttaagaaaaaacaacaaggaagtaaaaccaaagacaggcagcccagcgccaggcccaaaaccaggcctgggcctgcctggcctaaacccagtagttaaaaatcaactcattgcctgtaatcccagcactttgggaggccgagacgggtggatcacgaggtcaggagatcgagaccatcctggctaacacggtgaaaccccgtctctactaaaaatacaaaaattagccgggcatggtggcacgcgcctgtagtcccagctacacgggaggctgaggcaggagaatggcgtgaacccaggaggcggagcttgcagtgagtcgagatcgcgccactgcactccagcctgggcgacagagcgaaactccgtctcaaaaaaaaaaaaaaaaaatcaactcataacttagaaaccgatgttattcatagattccagacattgtatagaagaacatttggaaactcactgccttgttctgtttctctctgaccaccagtgcatgcagcccctgtcatgtaccgcctgtttgctcaaatcaatcatgaccctttcatgtgaaatctttagtgttgtgagcccttaaaagggacagaaattgtgcattcaaggagcttggattttaaggcagcagcttgctgatgccaccagctgaaaaaagcccttccttctccaactcggtgtctgagaagttttgtctgcagctcatcctgctacagaatgaactccttgtaattctacaagatatgccatgggccttttcacaggggacacaggcttcttaaaacaacccggcttcctcaccctatgtcctttatttacaaagctgtgctcctattcatgagcatggaatgtttttccatttgtttgtgacatctcttatttctttcaggggtatcttgtaattctcattatatatatcttttgcttccttggttagctgtatttttaggtattttagtcttcttgtggcaattgtgaatgggattgcattcctgatttggctcttggcttaatgttattaacgccacattttttaaatagacaaaaatatgagattaaaaatgttgaattttactaacaataaaagttgttcaaaggaaaactataaggttcttgtttcaactctgtcataggaagaacaggacagtgagctggcacagagttagggaaactgactgtgtctcatattggctagtgagagtgatctgttggaattgtatatcaaaattttaatgtacatacattttgtctagcaattctactattgggtatttatatagtacatataaatataaatgtatatgtttagtaaatatatacttatagttagtaaatatattttatatctatttagtaaatatactaaatgtcaggcctctgagcccaagctaagccatcatatcccctgtgacctgcatgtacatacgtccagatggcctgaagcaagtgaagaatcacaaaagaagtgaaaatggcctgttcctgccttaactgatgacattaccttgtgaaattccttctcctggctcatcctggctcaaaagctcccccactaagcaacttgtgacacccacctctgcccgccagagaacaaccccctttgactgtaattttcctttaccaacccaaatcctgtaaaatggtcccaaccctatctcccttcactgactgtcttttcggactcagccagcctgcacccaggtgattaaaaagctttattgctcaca

SEQ ID NO: 13122 - DNA, 4047 bp, Homo sapiens
  source 1..4047: mol_type = unassigned DNA
cactgaggtcaccctccaggctgtggaacctttgttctttcactctttgcaataaatcttgctgctgctcactctttgggtccacactgcctttatgagctgtaacactcactgggaatgtctgcagcttcactcctgaagccagcgagaccacgaacccaccaggaggaacaaacaactccagacgcgcagccttaagagctgtaacactcaccgcgaaggtctgcagcttcactcctgagccagccagaccacgaacccaccagaaggaagaaactccaaacacatccgaacatcagaaggagcaaactcctgacacgccacctttaagaaccgtgacactcaacgctagggtccgcggcttcattcttgaagtcagtgagaccaagaacccaccaattccggacacgctaattgttgtagatcatcacttcaaggtgcccatatctttctagtggaaaaattattctggcctccgctgcatacaaatcaggcaaccagaattctacatatataaggcaaagtaacatcctagacatggctttagagatccacatgtcagaccccatgtgcctcatcgagaactttaatgagcagctgaaggttaatcaggaagctttggagatcctgtctgccattacgcaacctgtagttgtggtagcgattgtgggcctctatcgcactggcaaatcctacctgatgaacaagctggctgggaagaacaagggcttctctgttgcatctacggtgcagtctcacaccaagggaatttggatatggtgtgtgcctcatcccaactggccaaatcacacattagttctgcttgacaccgagggcctgggagatgtagagaaggctgacaacaagaatgatatccagatctttgcactggcactcttactgagcagcacctttgtgtacaatactgtgaacaaaattgatcagggtgctatcgacctactgcacaatgtgacagaactgacagatctgctcaaggcaagaaactcacccgaccttgacagggttgaagatcctgctgactctgcgagcttcttcccagacttagtgtggactctgagagatttctgcttaggcctggaaatagatgggcaacttgtcacaccagatgaatacctggagaattccctaaggccaaagcaaggtagtgatcaaagagttcaaaatttcaatttgccccgtctgtgtatacagaagttctttccaaaaaagaaatgctttatctttgacttacctgctcaccaaaaaaagcttgcccaacttgaaacactgcctgatgatgagctagagcctgaatttgtgcaacaagtgacagaattctgttcctacatctttagccattctatgaccaagactcttccaggtggcatcatggtcaatggatctcgtctaaagaacctggtgctgacctatgtcaatgccatcagcagtggggatctgccttgcatagagaatgcagtcctggccttggctcagagagagaactcagctgcagtgcaaaaggccattgcccactatgaccagcaaatgggccagaaagtgcagctgcccatggaaaccctccaggagctgctggacctgcacaggaccagtgagagggaggccattgaagtcttcatgaaaaactctttcaaggatgtagaccaaagtttccagaaagaattggagactctactagatgcaaaacagaatgacatttgtaaacggaacctggaagcatcctcggattattgctcggctttacttaaggatatttttggtcctctagaagaagcagtgaagcagggaatttattctaagccaggaggccataatctcttcattcagaaaacagaagaactgaaggcaaagtactatcgggagcctcggaaaggaatacaggctgaagaagttctgcagaaatatttaaagtccaaggagtctgtgagtcatgcaatattacagactgaccaggctctcacagagacggaaaaaaagaagaaagaggcacaagtgaaagcagaagctgaaaaggctgaagcgcaaaggttggcggcgattcaaaggcagaacgagcaaatgatgcaggagagggagagactccatcaggaacaagtgagacaaatggagatagccaaacaaaattggctggcagagcaacagaaaatgcaggaacaacagatgcaggaacaggctgcacagctcagcacaacattccaagctcaaaatagaagccttctcagtgagctccagcacgcccagaggactgttaataacgatgatccatgtgttttactctaaagtgctaaatatgggagtttcctttttttactctttgtcactgatgacacaacagaaaagaaactgtagaccttgggacaatcaacatttaaataaactttataattattttttcaaactttcatatagagttataagattatgatgctggtatctggtaaaatgtacatcccagtagtccaatagtttaaatgtttattgcttcctttaagagattataaattgtataagggacattgtatcactgccttcatttatgcgtgatattgggatggtttcatcaggagatgctttccttgcatctcaatgtcatctgtctaatttctcataaggggattatgttacctagagcagggcttcccaaccctcaggccatagactagctctgatctgtggcctcttaggaacccggccacacagcaggaggtgagcagcaggtaagtgagcattacagcctgagctccacctcctgtcagatcagcagtgacattagattctcacaggagtgggaaccctattgtgaactgtgcatgcaaaagatctaggttgtgtgatccttgtggaacaatataaaccagaaaccaataacgccaccccacctccaacccccgccaaccctctgtggaaaaattaccttccacgaaactggtccctgatgccaaataggttgggggaccgctgacctagagggagttatgcacatgggcttataaggttagccaagagaaaggacaagaagacccaaagtcggcaagcaaatttattaacctgctgggctgctctacagaaatctgaggaggcagacaccgggcttacaggctaaggggtataagtaggtctgcaggggttttgtgtgtgtgtgcgggggtgtcgggggggcaaggccatttgtggagacttttcctcccagtatggccacatcctgcagtttgtcagtttttgcccccgcctggctcagggtaccaggatgtggtttagcttaggggtggttatagtggcacctaagttctgggaacttgcggtgggggcgaccttttggacgaaaaataagctgcagggcagctaggggagggggcttgttatattcctctgggggcagggtgtccctaactgggctcagtcggaaggaacttgaccaaagtctgggctcagttgggcatcactcaggctaatggtcgtgtgctggatgccatcagagggaagtaccaatggtaaagtggaaacaatgtgcagctttcaactgggtggaggctgctattctgtggacagtgagatgtttccttggcactgtcaatagacaatctgcgtagagaaattccaagctgaaagccaataatgttataataaaatagagattcttcagaagatgaaaggaattaccagcatggaaattgtgtcataggcttaagggctaaagaagaagccttttcttttctgttcaccctcaccaagagcacaacttaaatagggcattttataacctgaacacaatttatattggacttaattattatgtgtaatatgtttataatcctttagatcttataaatatgtggtataaggaatgccatataatgtgccaaaaatctgagtgcatttaatttaatgcttgcttatagtgctaaagttaaatgatcttaattctttgcaattatatatgaaaaatgactgatttttcttaaaatatgtaacttatataaatatatctgtttgtacagattttaaccataaaaacatttttggaaaacc

SEQ ID NO: 13123 - DNA, 2011 bp, Homo sapiens
  source 1..2011: mol_type = unassigned DNA
gctaattgttgtagatcatcacttcaaggtgcccatatctttctagtggaaaaattattctggcctccgctgcatacaaatcaggcaaccagaattctacatatataaggcaaagtaacatcctagacatggctttagagatccacatgtcagaccccatgtgcctcatcgagaactttaatgagcagctgaaggttaatcaggaagctttggagatcctgtctgccattacgcaacctgtagttgtggtagcgattgtgggcctctatcgcactggcaaatcctacctgatgaacaagctggctgggaagaacaagggcttctctgttgcatctacggtgcagtctcacaccaagggaatttggatatggtgtgtgcctcatcccaactggccaaatcacacattagttctgcttgacaccgagggcctgggagatgtagagaaggctgacaacaagaatgatatccagatctttgcactggcactcttactgagcagcacctttgtgtacaatactgtgaacaaaattgatcagggtgctatcgacctactgcacaatgtgacagaactgacagatctgctcaaggcaagaaactcacccgaccttgacagggttgaagatcctgctgactctgcgagcttcttcccagacttagtgtggactctgagagatttctgcttaggcctggaaatagatgggcaacttgtcacaccagatgaatacctggagaattccctaaggccaaagcaaggtagtgatcaaagagttcaaaatttcaatttgccccgtctgtgtatacagaagttctttccaaaaaagaaatgctttatctttgacttacctgctcaccaaaaaaagcttgcccaacttgaaacactgcctgatgatgagctagagcctgaatttgtgcaacaagtgacagaattctgttcctacatctttagccattctatgaccaagactcttccaggtggcatcatggtcaatggatctcgtctaaagaacctggtgctgacctatgtcaatgccatcagcagtggggatctgccttgcatagagaatgcagtcctggccttggctcagagagagaactcagctgcagtgcaaaaggccattgcccactatgaccagcaaatgggccagaaagtgcagctgcccatggaaaccctccaggagctgctggacctgcacaggaccagtgagagggaggccattgaagtcttcatgaaaaactctttcaaggatgtagaccaaagtttccagaaagaattggagactctactagatgcaaaacagaatgacatttgtaaacggaacctggaagcatcctcggattattgctcggctttacttaaggatatttttggtcctctagaagaagcagtgaagcagggaatttattctaagccaggaggccataatctcttcattcagaaaacagaagaactgaaggcaaagtactatcgggagcctcggaaaggaatacaggctgaagaagttctgcagaaatatttaaagtccaaggagtctgtgagtcatgcaatattacagactgaccaggctctcacagagacggaaaaaaagaagaaagaggcacaagtgaaagcagaagctgaaaaggctgaagcgcaaaggttggcggcgattcaaaggcagaacgagcaaatgatgcaggagagggagagactccatcaggaacaagtgagacaaatggagatagccaaacaaaattggctggcagagcaacagaaaatgcaggaacaacagatgcaggaacaggctgcacagctcagcacaacattccaagctcaaaatagaagccttctcagtgagctccagcacgcccagaggactgttaataacgatgatccatgtgttttactctaaagtgctaaatatgggagtttcctttttttactctttgtcactgatgacacaacagaaaagaaactgtagaccttgggacaatcaacatttaaataaactttataattattttttcaaacttt

SEQ ID NO: 13124 - DNA, 4699 bp, Homo sapiens
  source 1..4699: mol_type = unassigned DNA
cttgctgctgctcactctttgggtccacactgcctttatgagctgtaacactcactgggaatgtctgcagcttcactcctgaagccagcgagaccacgaacccaccaggaggaacaaacaactccagacgcgcagccttaagagctgtaacactcaccgcgaaggtctgcagcttcactcctgagccagccagaccacgaacccaccagaaggaagaaactccaaacacatccgaacatcagaaggagcaaactcctgacacgccacctttaagaaccgtgacactcaacgctagggtccgcggcttcattcttgaagtcagtgagaccaagaacccaccaattccggacacggtaagactggggcaagaggtggaagagatttgcaagattcatttggttttagaaacattctacaaaggataggatgcagcttatcctgatgtggtatatcagacctcagtaaagaataaattgtattcttatcagacaggcagcagaattcatcaagtaccagctgtgtctgcctcttgctgaattagacatcaatgtgtgtggtgactaaactaagagtttgaaatgccttcaaattatttttcttcctttgcaattttatgacttattcaggatcataatttccacttaagttaccttcgtccttcataaaatctgattaaactgactcgaacttcagcatgaaagtttcaaaaactatgatagctattattttcatgagaaagaacaatgaatatgatgcaatgtaagtagcttgcaaacattaaggacaagaaaaaaatgttgcccagagagaagtttcatgaaaacagtgatgtatttttagtcatagtcttgtactttgtttgaaagtagatttcttcctttagcaatagccctgacttaattcatgttggtttcttggcatctactcacttaactaaccccttttgtgttgggttctgcttctactactctattgcctttactattatgaatcacctaatttaacagttgcccaactggatccctcaatactgtctggcaactgttcactcgttgaaattctctcctttgaatttcttaccatgacacatacttcaagcattttgtactagtttgatttccatttatatccttaataagagccttttccttttccttgaaattcaaaccagaaactatgcaaaataagcaaaagcaagcaataacaactacatatacaaatgcaggcgcaaaacccaaactagaatcatatggctgaaaacagatgttttctttcagaaatccttccactaccacttctgagcattttctcttagtatttttttttgggcattttccttctttgcactttttaaaatctcctgcagctcgctcactctctttcataagccagcagttatactgatgttaataaatagttgtttatttacttttgcttttttagaaaacaagctgaaagaattgagtgaaatgccagagagatacagatagccagttgtagggctggggttggaaatcaagtctaatttaaggcaagggcaaaatgtgcattttgtgtgtgtattttgaaccattcttgcattgtttttatttgcaaaggttatagggctcaagcagttagggagaatgcatcccagaacactaagttatgaataacagagcaacagttatgtttgtggcttgaacacattaaatctgcaataatgttttagaaatttggctttactaaaagcattaaagatgctatccagatgacattggggacaacatgtcaaatactattattaatgtagatatacaatgctattgtcattcataagagagtctgaacactcagacacattcattccctcttccttagtgacatcatcccaaatcataagatcttgtaagctctcaatatctgcttatagatttggcttatgtatcttttgtttttctagctaattgttgtagatcatcacttcaaggtgcccatatctttctagtggaaaaattattctggcctccgctgcatacaaatcaggcaaccagaattctacatatataaggtactaatactacattgaaaatagattagaatgagaagagacctgccatttgagtctctaaatttgttgcaaaattgcctctttctgggtcaggcttgcactaggcatttcctgactcccatgtcctagtgctacaccatttgcaaatggatatcctattttctgctgccaagcagtttctgttttaatttatgtcaacataatgatttccagggcattagctatgaggaagcagggagaatgggtcttcataattgtaaaatgacagtttttgaaatttgctagtaaagagatggagaatccaaaccttttcattgtaagattttagtgaaagaactcgtcaagcggatagtgaagttttagcatccttagtaaataaccacctttaaaatggaagaaaactatcctttatgataaggcaaagtagaaaagcatatttttatggcatttgctttttctcatatagctcaaacattttttttaaccagagactctttaggttatagggattgatgctcagaagttagaaaaaaataggttaagtattattaaaggaagttgttttactcattcagtcaatcataaaataatcatgctttgaagttttggtttaataaagcacattagtaactatgtaaaaaatttcaagtatatcactaagaagcaaacagctatgatttgttagataatgctgcataatgacttggtagtatttaatgtaatgcagtttgactggacatagatctaactgaaaaaaatgaagttgacacaaagtaaaaggaacagtgtaatatattaataaagaacatcataaagaattaatataggaacccagggaggtaaaaactaaaaaacataactaagccaaaaaccaatggaataagagttagattcaaactagtaggttagacgcaggaaatggattttcgtatgcctatcaaatatttaagaaccagtagaatggcctatagtagacatataaagggcctaggacttacttttgttttaaaataaagtctctctattttacaggactctttttattttaaaactttttttttccagaaacttaggcagtgctggggagtagtatgtccccaggttcagtaagcaaaatgacttcctttgcttattaaacaaacaccagaaattccagcctatcccatctgttcccttgcaggcaaagtaacatcctagacatggctttagagatccacatgtcagaccccatgtgcctcatcgagaactttaatgagcagctgaaggttaatcaggaagctttggagatcctgtctgccattacgcaacctgtagttgtggtagcgattgtgggcctctatcgcactggcaaatcctacctgatgaacaagctggctgggaagaacaagggcttctctgttgcatctacggtgcagtctcacaccaagggaatttggatatggtgtgtgcctcatcccaactggccaaatcacacattagttctgcttgacaccgagggcctgggagatgtagagaaggctgacaacaagaatgatatccagatctttgcactggcactcttactgagcagcacctttgtgtacaatactgtgaacaaaattgatcagggtgctatcgacctactgcacaatgtgacagaactgacagatctgctcaaggcaagaaactcacccgaccttgacagggttgaagatcctgctgactctgcgagcttcttcccagacttagtgtggactctgagagatttctgcttaggcctggaaatagatgggcaacttgtcacaccagatgaatacctggagaattccctaaggccaaagcaaggtagtgatcaaagagttcaaaatttcaatttgccccgtctgtgtatacagaagttctttccaaaaaagaaatgctttatctttgacttacctgctcaccaaaaaaagcttgcccaacttgaaacactgcctgatgatgagctagagcctgaatttgtgcaacaagtgacagaattctgttcctacatctttagccattctatgaccaagactcttccaggtggcatcatggtcaatggatctcgtctaaagaacctggtgctgacctatgtcaatgccatcagcagtggggatctgccttgcatagagaatgcagtcctggccttggctcagagagagaactcagctgcagtgcaaaaggccattgcccactatgaccagcaaatgggccagaaagtgcagctgcccatggaaaccctccaggagctgctggacctgcacaggaccagtgagagggaggccattgaagtcttcatgaaaaactctttcaaggatgtagaccaaagtttccagaaagaattggagactctactagatgcaaaacagaatgacatttgtaaacggaacctggaagcatcctcggattattgctcggctttacttaaggatatttttggtcctctagaagaagcagtgaagcagggaatttattctaagccaggaggccataatctcttcattcagaaaacagaagaactgaaggcaaagtactatcgggagcctcggaaaggaatacaggctgaagaagttctgcagaaatatttaaagtccaaggagtctgtgagtcatgcaatattacagactgaccaggctctcacagagacgg

SEQ ID NO: 13125 - DNA, 2454 bp, Homo sapiens
  source 1..2454: mol_type = unassigned DNA
aagaaaaaaagtgggagaaatcagtgcagccaaattcagaactaaagagaagagaataaagactcataactttctcattgaagctgccttcttaccaagtccagaggatctctactctggacagaggaacgccctgaacatggcatcagagatccacatgccaggcccagtgtgcctcactgagaacactaaagggcatctggtggtgaattcagaagctctggaaatcctgtctgccattacacagcctgtagtagtggtggcaattgtgggcctctaccgcacaggcaaatcctacctaatgaacaagctggctgggaagaacaaaggcttccctctgggctgcacagtgaagtctgaaaccaaaggcatctggatgtggtgtgtgccccacccctccaagccaaaccacaccctgatccttctggacacggagggcctgggtgatatggaaaagagtgaccctaagagtgactcgtggatctttgccctggctgtgcttctaagcagcagctttgtctacaacagcatgggcaccatcaaccaccaggccctggagcagctgcactacgtgactgagctaacagagctaatcagggcaaaatcgtgccccagacctgatgaagttgaggactccagcgagtttgtgagtttctttccagactttatttggactgttcgagattttaccctggagctgaagttagatggacaccccatcacagaagatgagtacctggagaatgccttgaagctgatttcaggcaagaatccccaaatccaaaattctaacaagcccagggagtggatcaggcatttctttccaaaacagaagtgctttgtctttgaccggccaataaatgacaaaaaactcttactccatgttgaagaagtacgagaagaccaactggatagtaatttccagatgcaatcagaaaatttctgttcttatatcttcacccatgcaaagaccaagaccctgagagagggaatccttgtcactggaaaccggctggggatgctggtggagacctacctggatgccatcaacagtggagcgactccttgtctggagaatgcaatggcagttctggcccagtgtgagaactcagcagccgtgcagagggcagccaaccactacagccagcagatggcccagcaagtgagattccccacagacacactccaggagctgctggacgtgcatgcagtttgtgagagggaagccattgcagtcttcatggagtactccttcaaagataaaagccaggaatttcagaagaagcttgtggacaccatggagaaaaagaaggaagactttgtgctgcagaatgaagaggcatctgccaaatattgtcaggctgagcttaagcggctttcagagctcttgacagaaagtatttcaagaggaactttctttgttccgggggggcacaatatctacttagaagcaaaaaagaagattgaacaggactatacactagtgcccagaaaaggagttaaggcagacgaggtcctccagagcttcctgcagtcacaggtggttatagaggaatccatcctgcagtcagacaaagccctcactgctggagagaaggccatagcagctaagcaggctaagaaggaggcagctgaaaaggaacaggagctgctaagacaaaaacagaaggaacagcagcaaatgatggaggctcaagagagaagtttccaggaaaacatagctcaactcaagaagaagatggagagggaaagggaaaactatatgagagaactgagaaagatgttgagtcacaagatgaaggtcctagaagaactgcttactgaaggatttaaagagatatttgagtcgttaaatgaagagattaatcgactgaaagaacaaattgaagcagctgaaaatgaagagccctcagtgttttcacagattcttgatgtggctggcagtatatttattgcagcactacctggggctgctaagctagttgatttaggaatgaaaattcttagctcattatgtaataggctgagaaatcctggtaagaaaattataagctgaggtttcttttgttaaaatggtataacgctgttgctcattttaaaagtatatgtgttattgcagtttcatttaagaaaagtttaaaattaaaaagcaaatttcaaagaatattatggcctgaagttcataaaaacaaacttaattttgactaaagtaataattaatagaaatggggaacaagttagaagataaaattattcctagaaaagatttaagtaaagcaaaaggacaaatggtaatataaagaaattattttcaattaatgttatagtcacagagataatttaagttataattagctcttgcaaatcagtgagaagagagtaacgccacatattttaaacaggcaaaaatatgataataaaaatgtttaattttactgacaataaaagttgtgc

SEQ ID NO: 13126 - DNA, 2987 bp, Homo sapiens
  source 1..2987: mol_type = unassigned DNA
ggaggaaagaaaacaagaggtgagtgaggcaactgaaaactgttcttggacctgcggtgctatagagcaggctcttctaggttggcagttgccatggaatctggacccaaaatgttggcccccgtttgcctggtggaaaataacaatgagcagctattggtgaaccagcaagctatacagattcttgaaaagatttctcagccagtggtggtggtggccattgtaggactgtaccgtacagggaaatcctacttgatgaaccatctggcaggacagaatcatggcttccctctgggctccacggtgcagtctgaaaccaagggcatctggatgtggtgcgtgccccacccatccaagccaaaccacaccctggtccttctggacaccgaaggtctgggcgatgtggaaaagggtgaccctaagaatgactcctggatctttgccctggctgtgctcctgtgcagcacctttgtctacaacagcatgagcaccatcaaccaccaggccctggagcagctgcattatgtgacggagctcacagaactaattaaggcaaagtcctccccaaggcctgatggagtagaagattccacagagtttgtgagtttcttcccagactttctttggacagtacgggatttcactctggagctgaagttgaacggtcaccctatcacagaagatgaatacctggagaatgccttgaagctgattcaaggcaataatcccagagttcaaacatccaattttcccagggagtgcatcaggcgtttctttccaaaacggaagtgtttcgtctttgaccggccaacaaatgacaaagaccttctagccaatattgagaaggtgtcagaaaagcaactggatcccaaattccaggaacaaacaaacattttctgttcttacatcttcactcatgcaagaaccaagaccctcagggagggaatcacagtcactgggaatcgtctgggaactctggcagtgacttatgtagaggccatcaacagtggagcagtgccttgtctggagaatgcagtgataactctggcccagcgtgagaactcagcggccgtgcagagggcagctgactactacagccagcagatggcccagcgagtgaagctccccacagacacgctccaggagctgctggacatgcatgcggcctgtgagagggaagccattgcaatcttcatggagcactccttcaaggatgaaaatcaggaattccagaagaagttcatggaaaccacaatgaataagaagggggatttcttgctgcagaatgaagagtcatctgttcaatactgccaggctaaactcaatgagctctcaaagggactaatggaaagtatctcagcaggaagtttctctgttcctggagggcacaagctctacatggaaacaaaggaaaggattgaacaggactattggcaagttcccaggaaaggagtaaaggcaaaagaggtcttccagaggttcctggagtcacagatggtgatagaggaatccatcttgcagtcagataaagccctcactgatagagagaaggcagtagcagtggatcgggccaagaaggaggcagctgagaaggaacaggaacttttaaaacagaaattacaggagcagcagcaacagatggaggctcaagataagagtcgcaaggaaaacatagcccaactgaaggagaagctgcagatggagagagaacacctactgagagagcagattatgatgttggagcacacgcagaaggtccaaaatgattggcttcatgaaggatttaagaagaagtatgaggagatgaatgcagagataagtcaatttaaacgtatgattgatactacaaaaaatgatgatactccctggattgcacgaaccttggacaaccttgccgatgagctaactgcaatattgtctgctcctgctaaattaattggtcatggtgtcaaaggtgtgagctcactctttaaaaagcataagctccccttttaaggatattatagattgtacatatatgctttggactatttttgatctgtatgtttttcattttcattcagcaagttttttttttttttcagagtcttactctgttgcccaggctggagtacagtggtgcaatctcagctcactgcaacctctgcctcctgggttcaagagattcacctgcctcagccccctagtagctgggattataggtgtacaccaccacacccagctaatttttgtatttttagtagagatggggtttcactatgttggccaggctggtctcgaactcttgacctcaaatgatccacccgcctcggcctcccaaagtgctgggtttacaggcatgagccaccatgcccagccctcatttagcaaagttttaaacataaaaagtgcttattagaggatatcagtgcctggcccacatgagagaacagatccatacacactttgaaaaactttgttcacttttaggaaatataattttgaaaaatcatttacatacaagaggtccactgaggcattgcttttaatggcaaaatattgcaatgtacttgaatgtccttcacattagattggtaagataaattttagtatgtgcatgtactggaatattatatagccagtaaacaaattgacaatgaagctctatttgtaccagtaaagaatggtcttgaagagacattgtaaaatgaaaaaaaaaaaaaccaagttgtaaagcaatgtagattatcttatcagcatggaaaaaatgcaattattatatggaagcatgcaaatatatctctggaaagattaatcaaaatctattattattggctccttctgggaagaaccaagtgaatgtaggggttgaaggaacacatactcttcactttatactcttgaattttgtaaagaaatcttattttaccgattcagaaataaataagaaaatgtaagagacaatgctaataatgataacaataaaaaaatagtgaaattggctatca

SEQ ID NO: 13127 - DNA, 2070 bp, Homo sapiens
  source 1..2070: mol_type = unassigned DNA
aggaaagaaaacaagaggtgagtgaggcaactgaaaactgttcttggacctgcggtgctatagagcagggtgaccctaagaatgactcctggatctttgccctggctgtgctcctgtgcagcacctttgtctacaacagcatgagcaccatcaaccaccaggccctggagcagctgcattatgtgacggagctcacagaactaattaaggcaaagtcctccccaaggcctgatggagtagaagattccacagagtttgtgagtttcttcccagactttctttggacagtacgggatttcactctggagctgaagttgaacggtcaccctatcacagaagatgaatacctggagaatgccttgaagctgattcaaggcaataatcccagagttcaaacatccaattttcccagggagtgcatcaggcgtttctttccaaaacggaagtgtttcgtctttgaccggccaacaaatgacaaagaccttctagccaatattgagaaggtgtcagaaaagcaactggatcccaaattccaggaacaaacaaacattttctgttcttacatcttcactcatgcaagaaccaagaccctcagggagggaatcacagtcactgggaatcgtctgggaactctggcagtgacttatgtagaggccatcaacagtggagcagtgccttgtctggagaatgcagtgataactctggcccagcgtgagaactcagcggccgtgcagagggcagctgactactacagccagcagatggcccagcgagtgaagctccccacagacacgctccaggagctgctggacatgcatgcggcctgtgagagggaagccattgcaatcttcatggagcactccttcaaggatgaaaatcaggaattccagaagaagttcatggaaaccacaatgaataagaagggggatttcttgctgcagaatgaagagtcatctgttcaatactgccaggctaaactcaatgagctctcaaagggactaatggaaagtatctcagcaggaagtttctctgttcctggagggcacaagctctacatggaaacaaaggaaaggattgaacaggactattggcaagttcccaggaaaggagtaaaggcaaaagaggtcttccagaggttcctggagtcacagatggtgatagaggaatccatcttgcagtcagataaagccctcactgatagagagaaggcagtagcagtggatcgggccaagaaggaggcagctgagaaggaacaggaacttttaaaacagaaattacaggagcagcagcaacagatggaggctcaagataagagtcgcaaggaaaacatagcccaactgaaggagaagctgcagatggagagagaacacctactgagagagcagattatgatgttggagcacacgcagaaggtccaaaatgattggcttcatgaaggatttaagaagaagtatgaggagatgaatgcagagataagtcaatttaaacgtatgattgatactacaaaaaatgatgatactccctggattgcacgaaccttggacaaccttgccgatgagctaactgcaatattgtctgctcctgctaaattaattggtcatggtgtcaaaggtgtgagctcactctttaaaaagcataagctccccttttaaggatattatagattgtacatatatgctttggactatttttgatctgtatgtttttcattttcattcagcaagttttttttttttttcagagtcttactctgttgcccaggctggagtacagtggtgcaatctcagctcactgcaacctctgcctcctgggttcaagagattcacctgcctcagccccctagtagctgggattataggtgtacaccaccacacccagctaatttttgtatttttagtagagatggggtttcactatgttggccaggctggtctcgaactcttgacctcaaatgatccacccgcctcggcctcccaaagtgctgggtttacaggcatgagccaccatgcccagccctcatttagcaaagttttaaacataaaaagtgcttattagaggatatcagtgcct

SEQ ID NO: 13128 - DNA, 2024 bp, Homo sapiens
  source 1..2024: mol_type = unassigned DNA
agaaaagtaaaaggaggaaagaaaacaagaggtgagtgaggcaactgaaaactgttcttggacctgcggtgctatagagcaggctcttctaggttggcagttgccatggaatctggacccaaaatgttggcccccgtttgcctggtggaaaataacaatgagcagctattggtgaaccagcaagctatacagattcttgaaaagatttctcagccagtggtggtggtggccattgtaggactgtaccgtacagggaaatcctacttgatgaaccatctggcaggacagaatcatggcttccctctggacaccgaaggtctgggcgatgtggaaaagggtgaccctaagaatgactcctggatctttgccctggctgtgctcctgtgcagcacctttgtctacaacagcatgagcaccatcaaccaccaggccctggagcagctgcattatgtgacggagctcacagaactaattaaggcaaagtcctccccaaggcctgatggagtagaagattccacagagtttgtgagtttcttcccagactttctttggacagtacgggatttcactctggagctgaagttgaacggtcaccctatcacagaagatgaatacctggagaatgccttgaagctgattcaaggcaataatcccagagttcaaacatccaattttcccagggagtgcatcaggcgtttctttccaaaacggaagtgtttcgtctttgaccggccaacaaatgacaaagaccttctagccaatattgagaaggtgtcagaaaagcaactggatcccaaattccaggaacaaacaaacattttctgttcttacatcttcactcatgcaagaaccaagaccctcagggagggaatcacagtcactgggaatcgtctgggaactctggcagtgacttatgtagaggccatcaacagtggagcagtgccttgtctggagaatgcagtgataactctggcccagcgtgagaactcagcggccgtgcagagggcagctgactactacagccagcagatggcccagcgagtgaagctccccacagacacgctccaggagctgctggacatgcatgcggcctgtgagagggaagccattgcaatcttcatggagcactccttcaaggatgaaaatcaggaattccagaagaagttcatggaaaccacaatgaataagaagggggatttcttgctgcagaatgaagagtcatctgttcaatactgccaggctaaactcaatgagctctcaaagggactaatggaaagtatctcagcaggaagtttctctgttcctggagggcacaagctctacatggaaacaaaggaaaggattgaacaggactattggcaagttcccaggaaaggagtaaaggcaaaagaggtcttccagaggttcctggagtcacagatggtgatagaggaatccatcttgcagtcagataaagccctcactgatagagagaaggcagtagcagtggatcgggccaagaaggaggcagctgagaaggaacaggaacttttaaaacagaaattacaggagcagcagcaacagatggaggctcaagataagagtcgcaaggaaaacatagcccaactgaaggagaagctgcagatggagagagaacacctactgagagagcagattatgatgttggagcacacgcagaaggtccaaaatgattggcttcatgaaggatttaagaagaagtatgaggagatgaatgcagagataagtcaatttaaacgtatgattgatactacaaaaaatgatgatactccctggattgcacgaaccttggacaaccttgccgatgagctaactgcaatattgtctgctcctgctaaattaattggtcatggtgtcaaaggtgtgagctcactctttaaaaagcataagctccccttttaaggatattatagattgtacatatatgctttggactatttttgatctgtatgtttttcattttcattcagcaagttttttttttttttcagagtcttactctgttg

SEQ ID NO: 13129 - DNA, 4286 bp, Homo sapiens
  source 1..4286: mol_type = unassigned DNA
ggactgtctgggagccacgcgggcgatacagtttccgaggcacgccgcgtcccgcctagcctgttgaacaggtagacatgagcgacccaagctgcggatttgcgaggcgcgccctggagctgctagagatccggaagcacagccccgaggtgtgcgaagccaccaagtcaagttcctaacgagtcttcagaggaggcagcaggaagctcagagagctgcaaagcaaccgtgcccatctgtcaagacattcctgagaagaacatacaagaaagtcttcctcaaagaaaaaccagtcggagccgagtctatcttcacactttggcagagagtatttgcaaactgattttcccagagtttgaacggctgaatgttgcacttcagagaacattggcaaagcacaaaataaaagaaagcaggaaatctttggaaagagaagactttgaaaaaacaattgcagagcaagcagttgcagcaggagttccagtggaggttatcaaagaatctcttggtgaagaggtttttaaaatatgttacgaggaagatgaaaacatccttggggtggttggaggcacccttaaagattttttaaacagcttcagtacccttctgaaacagagcagccattgccaagaagcaggaaaaaggggcaggcttgaggacgcctccattctatgcctggataaggaggatgattttctacatgtttactacttcttccctaagagaaccacctccctgattcttcccggcatcataaaggcagctgctcacgtattatatgaaacggaagtggaagtgtcgttaatgcctccctgcttccataatgattgcagcgagtttgtgaatcagccctacttgttgtactccgttcacatgaaaagcaccaagccatccctgtcccccagcaaaccccagtcctcgctggtgattcccacatcgctattctgcaagacatttccattccatttcatgtttgacaaagatatgacaattctgcaatttggcaatggcatcagaaggctgatgaacaggagagactttcaaggaaagcctaattttgaagaatactttgaaattctgactccaaaaatcaaccagacgtttagcgggatcatgactatgttgaatatgcagtttgttgtacgagtgaggagatgggacaactctgtgaaaaaatcttcaagggttatggacctcaaaggccaaatgatctacattgttgaatccagtgcaatcttgtttttggggtcaccctgtgtggacagattagaagattttacaggacgagggctctacctctcagacatcccaattcacaatgcactgagggatgtggtcttaataggggaacaagcccgagctcaagatggcctgaagaagaggctggggaagctgaaggctacccttgagcaagcccaccaagccctggaggaggagaagaaaaagacagtagaccttctgtgctccatatttccctgtgaggttgctcagcagctgtggcaagggcaagttgtgcaagccaagaagttcagtaatgtcaccatgctcttctcagacatcgttgggttcactgccatctgctcccagtgctcaccgctgcaggtcatcaccatgctcaatgcactgtacactcgcttcgaccagcagtgtggagagctggatgtctacaaggtggagaccattggcgatgcctattgtgtagctgggggattacacaaagagagtgatactcatgctgttcagatagcgctgatggccctgaagatgatggagctctctgatgaagttatgtctccccatggagaacctatcaagatgcgaattggactgcactctggatcagtttttgctggcgtcgttggagttaaaatgccccgttactgtctttttggaaacaatgtcactctggctaacaaatttgagtcctgcagtgtaccacgaaaaatcaatgtcagcccaacaacttacagattactcaaagactgtcctggtttcgtgtttacccctcgatcaagggaggaacttccaccaaacttccctagtgaaatccccggaatctgccattttctggatgcttaccaacaaggaacaaactcaaaaccatgcttccaaaagaaagatgtggaagatggcaatgccaattttttaggcaaagcatcaggaatagattagcaacctatatacctatttataagtctttggggtttgactcattgaagatgtgtagagcctctgaaagcactttagggattgtagatggctaacaagcagtattaaaatttcaggagccaagtcacaatctttctcctgtttaacatgacaaaatgtatgtactcacttcagtacttcagctcttcaagaaaaaaaaaaaaaaccttaaaaagctacttttgtgggagtatttctattatataaccagcacttactacctgtactcaaaattcagcaccttgtacatatatcagataattgtagtcaattgtacaaactgatggagtcacctgcaatctcatatcctggtggaatgccatggttattaaagtgtgtttgtgatagtgtcgtcaaaaaaaaggtttttgaatagaaattacattctttgacaccctcagttctttcaaactttcaactctgcattttattgcattttctcatttaactgttagtatatgtttgaatataggctgactttttttctctattgcactttcttctttttttctttttagaaaataagcaattaggggttagatgcaatatgaatataaaatagttctgtaaataccaaatattatttttagttctggaagttaaaaatactctccatagtaacgtgtgttataataataaatatttcttttgtttgacttttttaaaattctacaatggtaaaagctattttaatccatgttagcaatttaattcctattaattcattttactatcataatagcaaagtattcagaataaaagaggtttatatcttctattaaaatgcagtaatactattcaaatctaatttagctggaagcaacatgggagtaaagtaatcatccaggggacccaccataaaggacattggtaaaacatttacacacgtaaacacacgtgcaggcacacttggaacaatatggacccacttcagcagacatcttctattgccatgctgagctgtttaaagttttaagaagaaaatctaagtatggaagtagaaaataagacttgttcttttggtggatatctcatttttcttgagtatttgtgctgaacattttggtgtatgtctatgaactaagaatcaagtttttgtctcattaaatatacatatatgaagtgtttttattctacttgaaatatcttgacttaaaaaaaacgactgttagtattgatgaagcaaatgaggcagtgactacattatggaaatgtctaagtattttttccggaacttcaactttttctttttgttttacataaacatttaagcagctaggaacttttagttttagttaggtcagttgaagttctctggtgaactaaaaaatctacattttggttggggataaagatttgattttaaaaacagcttgaatttaaagcaagaaaaagatgaacgttatagttttaaaatcaatattagcagagccatagataggctgagctcttatttggggttctgagaaataactcagtttaaaacttctttaactgcctcccttagtacccaggctagcccatggtgacatcagggatattcattactgattggcctctagtattccaagggtactactatagatattacaatgatgctgtttactaagtgataaccccgtatcttacaggactgactttgactcaataaaccactcagcctattattggaaagtgccataggccttgagaaagtatagttacatcctcacaaatatatgaagttaagtcactacttacaaggaaaaaaaatgtaaatacatttttctttctggaaccgaactcttattatggggaaataatagaaataaagaaaatgtaaaagcatgaaatggaatgtagtcttgatcaaacatttcagcagacctcaatttgcttacaatctgtactcaaaaagtttataattcaatcagaattcaaaaagtattttgtgtgtttgtgatgtattagcatatacacaaaacaaatgaggggaatgtatataatcttggtgaaaagttgtatgggagttttttgtacgattcctgcaacttttctataaacgtggcattatatctaaataaaaaattaccaaaaaa

SEQ ID NO: 13130 - DNA, 2552 bp, Homo sapiens
  source 1..2552: mol_type = unassigned DNA
acacttttcctgcgctagagcagcgagcagcctggaacagacccaggcggaggacacctgtgggggagggagcgcctggaggagcttagagaccccagccgggcgtgatctcaccatgtgcggatttgcgaggcgcgccctggagctgctagagatccggaagcacagccccgaggtgtgcgaagccaccaaacatcccagttaccagtgtccttgaattgatagtggcttctgtttgtcagtctcatataagaactacagctcatcaggaggagatcgcagcagggtaagagacaccaacaccatgttctgcacgaagctcaaggatctcaagatcacaggagagtgtcctttctccttactggcaccaggtcaagttcctaacgagtcttcagaggaggcagcaggaagctcagagagctgcaaagcaaccgtgcccatctgtcaagacattcctgagaagaacatacaagaaagtcttcctcaaagaaaaaccagtcggagccgagtctatcttcacactttggcagagagtatttgcaaactgattttcccagagtttgaacggctgaatgttgcacttcagagaacattggcaaagcacaaaataaaagaaagcaggaaatctttggaaagagaagactttgaaaaaacaattgcagagcaagcagttgcagcaggagttccagtggaggttatcaaagaatctcttggtgaagaggtttttaaaatatgttacgaggaagatgaaaacatccttggggtggttggaggcacccttaaagattttttaaacagcttcagtacccttctgaaacagagcagccattgccaagaagcaggaaaaaggggcaggcttgaggacgcctccattctatgcctggataaggaggatgattttctacatgtttactacttcttccctaagagaaccacctccctgattcttcccggcatcataaaggcagctgctcacgtattatatgaaacggaagtggaagtgtcgttaatgcctccctgcttccataatgattgcagcgagtttgtgaatcagccctacttgttgtactccgttcacatgaaaagcaccaagccatccctgtcccccagcaaaccccagtcctcgctggtgattcccacatcgctattctgcaagacatttccattccatttcatgtttgacaaagatatgacaattctgcaatttggcaatggcatcagaaggctgatgaacaggagagactttcaaggaaagcctaattttgaagaatactttgaaattctgactccaaaaatcaaccagacgtttagcgggatcatgactatgttgaatatgcagtttgttgtacgagtgaggagatgggacaactctgtgaaaaaatcttcaagggttatggacctcaaaggccaaatgatctacattgttgaatccagtgcaatcttgtttttggggtcaccctgtgtggacagattagaagattttacaggacgagggctctacctctcagacatcccaattcacaatgcactgagggatgtggtcttaataggggaacaagcccgagctcaagatggcctgaagaagaggctggggaagctgaaggctacccttgagcaagcccaccaagccctggaggaggagaagaaaaagacagtagaccttctgtgctccatatttccctgtgaggttgctcagcagctgtggcaagggcaagttgtgcaagccaagaagttcagtaatgtcaccatgctcttctcagacatcgttgggttcactgccatctgctcccagtgctcaccgctgcaggtcatcaccatgctcaatgcactgtacactcgcttcgaccagcagtgtggagagctggatgtctacaaggtggagaccattggcgatgcctattgtgtagctgggggattacacaaagagagtgatactcatgctgttcagatagcgctgatggccctgaagatgatggagctctctgatgaagttatgtctccccatggagaacctatcaagatgcgaattggactgcactctggatcagtttttgctggcgtcgttggagttaaaatgccccgttactgtctttttggaaacaatgtcactctggctaacaaatttgagtcctgcagtgtaccacgaaaaatcaatgtcagcccaacaacttacaggtagtaattatgttaaacacctaaaatctcttgtttttatttatatacaattgccatttgccccactgatttgattcattcttcataacttttttcttccttagtcgtaaggaaaaaagaaacgtgataacttttatcatcctcactttaacttttttacactgcttattagcctcctaagaatgacttgcctgaggtgtttgtggcccagccataaatccatgacagatattacatagtcttccatcattcttcttttagaagcacatattaatactcttagtatgttgataggtgttctgacatcaactagtacactgcagtgcagttctggcagtaaacacccagactcagcacagtcataaccacaagttaca

SEQ ID NO: 13131 - DNA, 3047 bp, Homo sapiens
  source 1..3047: mol_type = unassigned DNA
tgggccgcagccctccccgccccgccgaccgcggtcacacactctcggagcctccccgtgagcgggagcgcggcgcacggcgatgcgccgaggcgggcgctgaggcggcgccgcgcgagcagcagcagaggcggcggcggcccccagcccagcccggcgccgccgccgagcccgggccccaaggtgcggcggcgccccaagttcccgccatgagcagccggctcggggggctccgcggccccggggactcccgccccgccgggcgcgaccgcagcgccccgcggccccgacgcgcttaacgttgtcgcttgccggtcccgccaccgccgcctccgccgccgctcgcgtcctcgccgccaccgcctcggccgctgcagctccgccggcagcatgtctcgaaggaagatttcgtccgagtccttcagctccctgggctccgactacctggagaccagcccggaggaggagggggagtgccccctgtctaggctctgctggaatggcagccggagcccgcccgggccgctggagcccagcccggccgcagctgccgctgccgccgccccggccccgaccccggctgcttctgccgccgccgccgctgccactgccggggccaggagggtgcagcgccggaggcgggtcaacctggactcgctgggcgagagcatcagccgcctgacggcgccctcgcctcagacgatacagcagactctcaagaggacactgcagtattatgaacatcaagttattggttacagggatgcagaaaagaatttccacaatatctctaacagatgctcctatgcagaccactccaacaaagaagaaattgaagatgtctcaggaattcttcagtgtactgctaatatactcggtttgaagtttgaggaaattcaaaaaagatttggtgaagagttctttaatatatgctttcatgagaatgagagagtccttcgagctgtaggtggcactttgcaggacttttttaacggctttgatgctttgttggaacacattagaacttcttttggaaaacaggccactctggagtcaccatctttcctatgcaaagagctccctgaaggtactctcatgctccactacttccaccctcaccatattgtggggtttgcaatgctggggatgattaaggctgcaggaaagaagatctatcggctggatgtggaagtggaacaggttgcaaatgagaagctatgctctgatgtttcaaacccaggcaattgtagctgtcttactttccttatcaaagaatgtgaaaatactaatatcatgaagaaccttccacagggaacctcccaagttcctgcggacctcagaattagcatcaacaccttctgtagagccttccctttccacttgatgtttgatcccagcatgtcagtccttcagttgggggaaggtctaaggaagcagcttcgatgtgacactcacaaagtgctcaagtttgaggactgcttcgagattgtatctccaaaggttaatgccacctttgaaagggtcctgctgcgactgtctaccccgtttgtgattagaaccaagcctgaggcttctggctctgaaaataaagacaaggtgatggaagtcaaaggacaaatgatccatgttccagaatcaaattccattttatttttgggctctccatgtgtggacaagttggatgaactcatgggccgagggctacatctctcagacatccctatccatgatgccacccgagatgtcattttggttggtgagcaggcaaaggcccaagatgggttgaagaaaaggatggataaattaaaggcaactttagaaagaactcaccaggccctggaagaagagaaaaagaagacagtggatcttctatattctattttccctggtgatgtagcccagcaattatggcaagggcagcaagtacaggccagaaagtttgatgatgtcaccatgctcttttcagacattgttggcttcacagccatatgtgcccagtgtactcccatgcaagtaatcagcatgctgaatgaactgtacaccagatttgaccaccagtgtggatttttggatatttataaggtggaaacaataggtgatgcctactgtgttgcagcagggctccacagaaaaagcctctgccatgctaaacccattgctctgatggccttgaagatgatggaactttcagaagaggtgctgacacctgatggaagaccgattcagccccagaggagtgaactccttttctcctttcctgtttccatccagctggttccagatcagcatcaaagtgaaacggatttgggtactgaaaagatgaggataggaattcactcaggctccgtgctggctggagttgttggggtgcgaatgccacgttattgcctgtttggaaataatgtcacactggcaagcaaattcgagtcgggaagtcaccctcggcgcatcaatgtcagcccaaccacttaccaattattaaaacgagaagaaagtttcacattcattccgcggtctcgtgaagagcttccagacaactttccaaaggaaattcctgggatctgctatttcctggaggtaaggactggtccaaagccaccaaagccttctctttcttcgtcgagaataaaaaaggtttcctacaacatcggcaccatgttcctccgggagacaagcctctgagacctgctacagatcaaagactcctccaaaaagcacaagcccagaacatgggtcaccaatggggggtggaaagagattgtgtctctttcattgctttgttgagaacaagcagcaaaatttctgtattatgtcaggcaataatcctactaaaaggtggaggtgaccgctgtcaataaaaagccggaggatgagggaaataagatgtgtccattcatatgagtggttttggtcatatatatacacatatattttaattacaagtgtgggtcccctttcagaactaaccaataaatagattccatgttttcttgtttatcacacatacaagtatctttccctatatatttgtaccacttttgagagcc

SEQ ID NO: 13132 - DNA, 5795 bp, Homo sapiens
  source 1..5795: mol_type = unassigned DNA
gaggcgggagcagagagggaaagggggcgagataggcgcgcaggcggcagaagcctctgcctctgcctccccttctgcttgggccgcagccctccccgccccgccgaccgcggtcacacactctcggagcctccccgtgagcgggagcgcggcgcacggcgatgcgccgaggcgggcgctgaggcggcgccgcgcgagcagcagcagaggcggcggcggcccccagcccagcccggcgccgccgccgagcccgggccccaaggtgcggcggcgccccaagttcccgccatgagcagccggctcggggggctccgcggccccggggactcccgccccgccgggcgcgaccgcagcgccccgcggccccgacgcgcttaacgttgtcgcttgccggtcccgccaccgccgcctccgccgccgctcgcgtcctcgccgccaccgcctcggccgctgcagctccgccggcagcatgtctcgaaggaagatttcgtccgagtccttcagctccctgggctccgactacctggagaccagcccggaggaggagggggagtgccccctgtctaggctctgctggaatggcagccggagcccgcccgggccgctggagcccagcccggccgcagctgccgctgccgccgccccggccccgaccccggctgcttctgccgccgccgccgctgccactgccggggccaggagggtgcagcgccggaggcgggtcaacctggactcgctgggcgagagcatcagccgcctgacggcgccctcgcctcagacgatacagcagactctcaagaggacactgcagtattatgaacatcaagttattggttacagggatgcagaaaagaatttccacaatatctctaacagatgctcctatgcagaccactccaacaaagaagaaattgaagatgtctcaggaattcttcagtgtactgctaatatactcggtttgaagtttgaggaaattcaaaaaagatttggtgaagagttctttaatatatgctttcatgagaatgagagagtccttcgagctgtaggtggcactttgcaggacttttttaacggctttgatgctttgttggaacacattagaacttcttttggaaaacaggccactctggagtcaccatctttcctatgcaaagagctccctgaaggtactctcatgctccactacttccaccctcaccatattgtggggtttgcaatgctggggatgattaaggctgcaggaaagaagatctatcggctggatgtggaagtggaacaggttgcaaatgagaagctatgctctgatgtttcaaacccaggcaattgtagctgtcttactttccttatcaaagaatgtgaaaatactaatatcatgaagaaccttccacagggaacctcccaagttcctgcggacctcagaattagcatcaacaccttctgtagagccttccctttccacttgatgtttgatcccagcatgtcagtccttcagttgggggaaggtctaaggaagcagcttcgatgtgacactcacaaagtgctcaagtttgaggactgcttcgagattgtatctccaaaggttaatgccacctttgaaagggtcctgctgcgactgtctaccccgtttgtgattagaaccaagcctgaggcttctggctctgaaaataaagacaaggtgatggaagtcaaaggacaaatgatccatgttccagaatcaaattccattttatttttgggctctccatgtgtggacaagttggatgaactcatgggccgagggctacatctctcagacatccctatccatgatgccacccgagatgtcattttggttggtgagcaggcaaaggcccaagatgggttgaagaaaaggatggataaattaaaggcaactttagaaagaactcaccaggccctggaagaagagaaaaagaagacagtggatcttctatattctattttccctggtgatgtagcccagcaattatggcaagggcagcaagtacaggccagaaagtttgatgatgtcaccatgctcttttcagacattgttggcttcacagccatatgtgcccagtgtactcccatgcaagtaatcagcatgctgaatgaactgtacaccagatttgaccaccagtgtggatttttggatatttataaggtggaaacaataggtgatgcctactgtgttgcagcagggctccacagaaaaagcctctgccatgctaaacccattgctctgatggccttgaagatgatggaactttcagaagaggtgctgacacctgatggaagaccgattcagatgaggataggaattcactcaggctccgtgctggctggagttgttggggtgcgaatgccacgttattgcctgtttggaaataatgtcacactggcaagcaaattcgagtcgggaagtcaccctcggcgcatcaatgtcagcccaaccacttaccaattattaaaacgagaagaaagtttcacattcattccgcggtctcgtgaagagcttccagacaactttccaaaggaaattcctgggatctgctatttcctggaggtaaggactggtccaaagccaccaaagccttctctttcttcgtcgagaataaaaaaggtttcctacaacatcggcaccatgttcctccgggagacaagcctctgagacctgctacagatcaaagactcctccaaaaagcacaagcccagaacatgggtcaccaatggggggtggaaagagattgtgtctctttcattgctttgttgagaacaagcagcaaaatttctgtattatgtcaggcaataatcctactaaaaggtggaggtgaccgctgtcaataaaaagccggaggatgagggaaataagatgtgtccattcatatgagtggttttggtcatatatatacacatatattttaattacaagtgtgggtcccctttcagaactaaccaataaatagattccatgttttcttgtttatcacacatacaagtatctttccctatatatttgtaccacttttgagagccagttttgattatatattcctacatttagtgagttggtgggtgaggaatattttctaagtttctttttctgaacagacatttcatacatgtatcatggcagtgtggtaaacttcccaactggaagaattgtaactcggcaaaatattttagggatattacctatttttatacatatctcttctagataactacatttcgcacaacattattagattttcagaatctgcttctgtattgttagtatattatatataatgctaacctattaatctaatatagtttcccttatttagagagatcagtgcttcgactgagaatacatataaccaaggatttcagataccaagaaagcattatatgtctgcttagtaaatatatcttttagatttaactaatgtagcatggaatccagaggaaatggaatttcctaacaccagatgtatctgtaaccaagattaaagaaaggtctttttgccaccttctaacaaatatcagttaaaatgaaatgctttgctacactggatccttttcaacttagcacttacaaatataggtagcttttgcaacactaaactgcattctaataaacagcattcagctaaatgacatgttagttacccccttcctcttccccagttgatgcctcctaagagccgactgctattcttgagaacaaattcctggatactggcattagtgacaaagaagtgtcaggacagtttgccaagaatgttgtttcttcttgtacaacacaaagcaaggaaacctctgtattttatggctttgaggttttaaaaaatgttctgcagtttgattgatatggcttttaaattcagtgaatcactttcatgaatactgaagtaggtataatcttcagaactagtaatcattatagttacagataggattccatcgcatgtcctgctcaaatgaagacctgttctcattaatcaatactgcatgaaaatattactggctcacactaaaattaggagcatcaggtgtccagagttttcctgtttgggttcagatataaaatctaagtttctattgaggttaataagctggaagcatttgtttcctttaagccttggagaggtcattttcttactcattgatagcttatgtctactgaatgcaatattcttttctgttcagggattttggctgcattatgatttggttatgacataactcagttaaggaatatatttactaatttccaatgtagtctatgaggttcatttaatgtttttaaattttctatgtgtgtggctagaaggcatttgtagatatgcaaatatttgttataatcctgatcccttttataatttgagttattttcttgccctgggggtttacaaggacacgagtgcaacactctttatatggagaagacaggaaatagaccttgagctctaaacctttgcctgaccccctcttctgtgggcctgtgtttctggacaatggggaggtttacagccagtatgagcagagcagactgggagcacctcaatcctcatgcttatattagaaaatgccttagcaatgttgatgggctccttgtagcactggagcatggggagggaacaagctcactgatgtcatttatgcctattgtcttcagtaacttagaacttattatggtatattaaatcaataaaatgttggtgatgaacaatgtgttttgtaaccataaggctgaaagggacttccaggaatatccaatctatttctctcactttttataaagatttgtctaagcaactactctaaacacatatttattatctccatacttaagaatatctacgggaagcatatttgaaaagcatcattggaaatccacctcaatactagtgataggcctggagagaagtattgtatttatatatctcaatttatcagaagaatcacaaattctgtattagtttatatgattttacttagagaataagtatccatttacattgccataaatgtcacgatgaagaacgtgccagagatttcttatttatcactgacaggatgtcaactacatttttcatacattataacctaagtgtattttcacagctatagtccgagataatggtccaatttgttatcattttgctaatctattatagttgattattgtagttacaatgttgctatatatgtttatgaggtactatataaaatgtctgttcattcaaacttcaatcacagaagttagaagatggagaaaaaattatatttttatttgtcctacacaatgccatctacatctcttctcttaggaattgtgattgtaacaatgtggtggcatttgttatttcatatgacttttatctatacagtattctcacttacttacaaactattaccaacagcatgcattttagtatggcagatacaagaaatttgtgtgatgttcccttagaaaccaaatgatattaaattggggaaatggttttaacccactctgcaagggatactttaaaatataatttggcacctatagctcttgcattttaatattcttttaagctgctgtttggaagaaggcaccttataactagccattagcaccaaagcatcacgttggtatcaggattattttgatggagagaatgtcatcatttgcaaataaatcagttatctaacaaaatcagaatcccccaatatgtactcagaatgtactaccctgtatcttctttgtggaccttaatcattaggtaacattggccataataaaaaataataatatgcttcagaaa

SEQ ID NO: 13133 - DNA, 4400 bp, Homo sapiens
  source 1..4400: mol_type = unassigned DNA
aggtagacatgagcgacccaagctgcggatttgcgaggcgcgccctggagctgctagagatccggaagcacagccccgaggtgtgcgaagccaccaaacatcccagttaccagtgtccttgaattgatagtggcttctgtttgtcagtctcatataagaactacagctcatcaggaggagatcgcagcagggtaagagacaccaacaccatgttctgcacgaagctcaaggatctcaagatcacaggagagtgtcctttctccttactggcaccaggtcaagttcctaacgagtcttcagaggaggcagcaggaagctcagagagctgcaaagcaaccgtgcccatctgtcaagacattcctgagaagaacatacaagaaagtcttcctcaaagaaaaaccagtcggagccgagtctatcttcacactttggcagagagtatttgcaaactgattttcccagagtttgaacggctgaatgttgcacttcagagaacattggcaaagcacaaaataaaagaaagcaggaaatctttggaaagagaagactttgaaaaaacaattgcagagcaagcagttgcagcaggagttccagtggaggttatcaaagaatctcttggtgaagaggtttttaaaatatgttacgaggaagatgaaaacatccttggggtggttggaggcacccttaaagattttttaaacagcttcagtacccttctgaaacagagcagccattgccaagaagcaggaaaaaggggcaggcttgaggacgcctccattctatgcctggataaggaggatgattttctacatgtttactacttcttccctaagagaaccacctccctgattcttcccggcatcataaaggcagctgctcacgtattatatgaaacggaagtggaagtgtcgttaatgcctccctgcttccataatgattgcagcgagtttgtgaatcagccctacttgttgtactccgttcacatgaaaagcaccaagccatccctgtcccccagcaaaccccagtcctcgctggtgattcccacatcgctattctgcaagacatttccattccatttcatgtttgacaaagatatgacaattctgcaatttggcaatggcatcagaaggctgatgaacaggagagactttcaaggaaagcctaattttgaagaatactttgaaattctgactccaaaaatcaaccagacgtttagcgggatcatgactatgttgaatatgcagtttgttgtacgagtgaggagatgggacaactctgtgaaaaaatcttcaagggttatggacctcaaaggccaaatgatctacattgttgaatccagtgcaatcttgtttttggggtcaccctgtgtggacagattagaagattttacaggacgagggctctacctctcagacatcccaattcacaatgcactgagggatgtggtcttaataggggaacaagcccgagctcaagatggcctgaagaagaggctggggaagctgaaggctacccttgagcaagcccaccaagccctggaggaggagaagaaaaagacagtagaccttctgtgctccatatttccctgtgaggttgctcagcagctgtggcaagggcaagttgtgcaagccaagaagttcagtaatgtcaccatgctcttctcagacatcgttgggttcactgccatctgctcccagtgctcaccgctgcaggtcatcaccatgctcaatgcactgtacactcgcttcgaccagcagtgtggagagctggatgtctacaaggtggagaccattggcgatgcctattgtgtagctgggggattacacaaagagagtgatactcatgctgttcagatagcgctgatggccctgaagatgatggagctctctgatgaagttatgtctccccatggagaacctatcaagatgcgaattggactgcactctggatcagtttttgctggcgtcgttggagttaaaatgccccgttactgtctttttggaaacaatgtcactctggctaacaaatttgagtcctgcagtgtaccacgaaaaatcaatgtcagcccaacaacttacagattactcaaagactgtcctggtttcgtgtttacccctcgatcaagggaggaacttccaccaaacttccctagtgaaatccccggaatctgccattttctggatgcttaccaacaaggaacaaactcaaaaccatgcttccaaaagaaagatgtggaagatggcaatgccaattttttaggcaaagcatcaggaatagattagcaacctatatacctatttataagtctttggggtttgactcattgaagatgtgtagagcctctgaaagcactttagggattgtagatggctaacaagcagtattaaaatttcaggagccaagtcacaatctttctcctgtttaacatgacaaaatgtatgtactcacttcagtacttcagctcttcaagaaaaaaaaaaaaaaccttaaaaagctacttttgtgggagtatttctattatataaccagcacttactacctgtactcaaaattcagcaccttgtacatatatcagataattgtagtcaattgtacaaactgatggagtcacctgcaatctcatatcctggtggaatgccatggttattaaagtgtgtttgtgatagtgtcgtcaaaaaaaaggtttttgaatagaaattacattctttgacaccctcagttctttcaaactttcaactctgcattttattgcattttctcatttaactgttagtatatgtttgaatataggctgactttttttctctattgcactttcttctttttttctttttagaaaataagcaattaggggttagatgcaatatgaatataaaatagttctgtaaataccaaatattatttttagttctggaagttaaaaatactctccatagtaacgtgtgttataataataaatatttcttttgtttgacttttttaaaattctacaatggtaaaagctattttaatccatgttagcaatttaattcctattaattcattttactatcataatagcaaagtattcagaataaaagaggtttatatcttctattaaaatgcagtaatactattcaaatctaatttagctggaagcaacatgggagtaaagtaatcatccaggggacccaccataaaggacattggtaaaacatttacacacgtaaacacacgtgcaggcacacttggaacaatatggacccacttcagcagacatcttctattgccatgctgagctgtttaaagttttaagaagaaaatctaagtatggaagtagaaaataagacttgttcttttggtggatatctcatttttcttgagtatttgtgctgaacattttggtgtatgtctatgaactaagaatcaagtttttgtctcattaaatatacatatatgaagtgtttttattctacttgaaatatcttgacttaaaaaaaacgactgttagtattgatgaagcaaatgaggcagtgactacattatggaaatgtctaagtattttttccggaacttcaactttttctttttgttttacataaacatttaagcagctaggaacttttagttttagttaggtcagttgaagttctctggtgaactaaaaaatctacattttggttggggataaagatttgattttaaaaacagcttgaatttaaagcaagaaaaagatgaacgttatagttttaaaatcaatattagcagagccatagataggctgagctcttatttggggttctgagaaataactcagtttaaaacttctttaactgcctcccttagtacccaggctagcccatggtgacatcagggatattcattactgattggcctctagtattccaagggtactactatagatattacaatgatgctgtttactaagtgataaccccgtatcttacaggactgactttgactcaataaaccactcagcctattattggaaagtgccataggccttgagaaagtatagttacatcctcacaaatatatgaagttaagtcactacttacaaggaaaaaaaatgtaaatacatttttctttctggaaccgaactcttattatggggaaataatagaaataaagaaaatgtaaaagcatgaaatggaatgtagtcttgatcaaacatttcagcagacctcaatttgcttacaatctgtactcaaaaagtttataattcaatcagaattcaaaaagtattttgtgtgtttgtgatgtattagcatatacacaaaacaaatgaggggaatgtatataatcttggtgaaaagttgtatgggagttttttgtacgattcctgcaacttttctataaacgtggcattatatctaaataaaaaattaccaaaaaacata

SEQ ID NO: 13134 - DNA, 2631 bp, Homo sapiens
  source 1..2631: mol_type = unassigned DNA
atggtgcgttttggctgctactttctttttcagtctttcggtgcggagaaggggaggaggcgggcagaggtctgaaaaaatcgaatgccttatggaaaggaactgcaagggttcctttggggtgatcaaagagggagacacagacacagagagacaaaggcaaggaggactgtctgggagccacgcgggcgatacagtttccgaggcacgccgcgtcccgcctagcctgttgaacagtgcggatttgcgaggcgcgccctggagctgctagagatccggaagcacagccccgaggtgtgcgaagccaccaatctcatataagaactacagctcatcaggaggagatcgcagcagggtaagagacaccaacaccatgttctgcacgaagctcaaggatctcaagatcacaggagagtgtcctttctccttactggcaccaggtcaagttcctaacgagtcttcagaggaggcagcaggaagctcagagagctgcaaagcaaccgtgcccatctgtcaagacattcctgagaagaacatacaagaaagtcttcctcaaagaaaaaccagtcggagccgagtctatcttcacactttggcagagagtatttgcaaactgattttcccagagtttgaacggctgaatgttgcacttcagagaacattggcaaagcacaaaataaaagaaagcaggaaatctttggaaagagaagactttgaaaaaacaattgcagagcaagcagttgcagcaggagttccagtggaggttatcaaagaatctcttggtgaagaggtttttaaaatatgttacgaggaagatgaaaacatccttggggtggttggaggcacccttaaagattttttaaacagcttcagtacccttctgaaacagagcagccattgccaagaagcaggaaaaaggggcaggcttgaggacgcctccattctatgcctggataaggaggatgattttctacatgtttactacttcttccctaagagaaccacctccctgattcttcccggcatcataaaggcagctgctcacgtattatatgaaacggaagtggaagtgtcgttaatgcctccctgcttccataatgattgcagcgagtttgtgaatcagccctacttgttgtactccgttcacatgaaaagcaccaagccatccctgtcccccagcaaaccccagtcctcgctggtgattcccacatcgctattctgcaagacatttccattccatttcatgtttgacaaagatatgacaattctgcaatttggcaatggcatcagaaggctgatgaacaggagagactttcaaggaaagcctaattttgaagaatactttgaaattctgactccaaaaatcaaccagacgtttagcgggatcatgactatgttgaatatgcagtttgttgtacgagtgaggagatgggacaactctgtgaaaaaatcttcaagggttatggacctcaaaggccaaatgatctacattgttgaatccagtgcaatcttgtttttggggtcaccctgtgtggacagattagaagattttacaggacgagggctctacctctcagacatcccaattcacaatgcactgagggatgtggtcttaataggggaacaagcccgagctcaagatggcctgaagaagaggctggggaagctgaaggctacccttgagcaagcccaccaagccctggaggaggagaagaaaaagacagtagaccttctgtgctccatatttccctgtgaggttgctcagcagctgtggcaagggcaagttgtgcaagccaagaagttcagtaatgtcaccatgctcttctcagacatcgttgggttcactgccatctgctcccagtgctcaccgctgcaggtcatcaccatgctcaatgcactgtacactcgcttcgaccagcagtgtggagagctggatgtctacaaggtggagaccattggcgatgcctattgtgtagctgggggattacacaaagagagtgatactcatgctgttcagatagcgctgatggccctgaagatgatggagctctctgatgaagttatgtctccccatggagaacctatcaagatgcgaattggactgcactctggatcagtttttgctggcgtcgttggagttaaaatgccccgttactgtctttttggaaacaatgtcactctggctaacaaatttgagtcctgcagtgtaccacgaaaaatcaatgtcagcccaacaacttacagattactcaaagactgtcctggtttcgtgtttacccctcgatcaagggaggaacttccaccaaacttccctagtgaaatccccggaatctgccattttctggatgcttaccaacaaggaacaaactcaaaaccatgcttccaaaagaaagatgtggaagatggcaatgccaattttttaggcaaagcatcaggaatagattagcaacctatatacctatttataagtctttggggtttgactcattgaagatgtgtagagcctctgaaagcactttagggattgtagatggctaacaagcagtattaaaatttcaggagccaagtcacaatctttctcctgtttaacatgacaaaatgtatgtactcacttcagtacttcagctcttc

SEQ ID NO: 13135 - DNA, 2715 bp, Homo sapiens
  source 1..2715: mol_type = unassigned DNA
acacagtgatttctgttatggcgattgggcggctgcagagaccaggactcagttcccctgccctagtctgagcctagtgggtgggactcagctcagagtcagttttccagaagcaggtttcagtgcagagttttcctacacttttcctgcgctagagcagcgagcagcctggaacagacccaggcggaggacacctgtgggggagggagcgcctggaggagcttagagaccccagccgggcgtgatctcaccatgtgcggatttgcgaggcgcgccctggagctgctagagatccggaagcacagccccgaggtgtgcgaagccaccaaacatcccagttaccagtgtccttgaattgatagtggcttctgtttgtcagtctcatataagaactacagctcatcaggaggagatcgcagcagggtaagagacaccaacaccatgttctgcacgaagctcaaggatctcaagatcacaggagagtgtcctttctccttactggcaccaggtcaagttcctaacgagtcttcagaggaggcagcaggaagctcagagagctgcaaagcaaccgtgcccatctgtcaagacattcctgagaagaacatacaagaaagtcttcctcaaagaaaaaccagtcggagccgagtctatcttcacactttggcagagagtatttgcaaactgattttcccagagtttgaacggctgaatgttgcacttcagagaacattggcaaagcacaaaataaaagaaagcaggaaatctttggaaagagaagactttgaaaaaacaattgcagagcaagcagttgcagcaggagttccagtggaggttatcaaagaatctcttggtgaagaggtttttaaaatatgttacgaggaagatgaaaacatccttggggtggttggaggcacccttaaagattttttaaacagcttcagtacccttctgaaacagagcagccattgccaagaagcaggaaaaaggggcaggcttgaggacgcctccattctatgcctggataaggaggatgattttctacatgtttactacttcttccctaagagaaccacctccctgattcttcccggcatcataaaggcagctgctcacgtattatatgaaacggaagtggaagtgtcgttaatgcctccctgcttccataatgattgcagcgagtttgtgaatcagccctacttgttgtactccgttcacatgaaaagcaccaagccatccctgtcccccagcaaaccccagtcctcgctggtgattcccacatcgctattctgcaagacatttccattccatttcatgtttgacaaagatatgacaattctgcaatttggcaatggcatcagaaggctgatgaacaggagagactttcaaggaaagcctaattttgaagaatactttgaaattctgactccaaaaatcaaccagacgtttagcgggatcatgactatgttgaatatgcagtttgttgtacgagtgaggagatgggacaactctgtgaaaaaatcttcaagggttatggacctcaaaggccaaatgatctacattgttgaatccagtgcaatcttgtttttggggtcaccctgtgtggacagattagaagattttacaggacgagggctctacctctcagacatcccaattcacaatgcactgagggatgtggtcttaataggggaacaagcccgagctcaagatggcctgaagaagaggctggggaagctgaaggctacccttgagcaagcccaccaagccctggaggaggagaagaaaaagacagtagaccttctgtgctccatatttccctgtgaggttgctcagcagctgtggcaagggcaagttgtgcaagccaagaagttcagtaatgtcaccatgctcttctcagacatcgttgggttcactgccatctgctcccagtgctcaccgctgcaggtcatcaccatgctcaatgcactgtacactcgcttcgaccagcagtgtggagagctggatgtctacaaggtggagaccattggcgatgcctattgtgtagctgggggattacacaaagagagtgatactcatgctgttcagatagcgctgatggccctgaagatgatggagctctctgatgaagttatgtctccccatggagaacctatcaagatgcgaattggactgcactctggatcagtttttgctggcgtcgttggagttaaaatgccccgttactgtctttttggaaacaatgtcactctggctaacaaatttgagtcctgcagtgtaccacgaaaaatcaatgtcagcccaacaacttacagattactcaaagactgtcctggtttcgtgtttacccctcgatcaagggaggaacttccaccaaacttccctagtgaaatccccggaatctgccattttctggatgcttaccaacaaggaacaaactcaaaaccatgcttccaaaagaaagatgtggaagatggcaatgccaattttttaggcaaagcatcaggaatagattagcaacctatatacctatttataagtctttggggtttgactcattgaagatgtgtagagcctctgaaagcactttagggattgtagatggctaacaagcagtattaaaatttcaggagccaagtcacaatctttctcctgtttaacatgacaaaatgtatgtactcacttcagtacttcagctcttcaagaaaaaaaaaaaaa

SEQ ID NO: 13136 - DNA, 2992 bp, Homo sapiens
  source 1..2992: mol_type = unassigned DNA
ttatggcgattgggcggctgcagagaccaggactcagttcccctgccctagtctgagcctagtgggtgggactcagctcagagtcagttttccagaagcaggtttcagtgcagagttttcctacacttttcctgcgctagagcagcgagcagcctggaacagacccaggcggaggacacctgtgggggagggagcgcctggaggagcttagagaccccagccgggcgtgatctcaccatgtgcggatttgcgaggcgcgccctggagctgctagagatccggaagcacagccccgaggtgtgcgaagccaccaagactgcggctcttggagaaagcgtgagcagggggccaccgcggtctccgcgcctgtctgcaccctgtcgcctgagctgcctgacagtgacaatgacatcccagttaccagtgtccttgaattgatagtggcttctgtttgtcagtctcatataagaactacagctcatcaggaggagatcgcagcagggtaagagacaccaacaccatgttctgcacgaagctcaaggatctcaagatcacaggagagtgtcctttctccttactggcaccaggtcaagttcctaacgagtcttcagaggaggcagcaggaagctcagagagctgcaaagcaaccgtgcccatctgtcaagacattcctgagaagaacatacaagaaagtcttcctcaaagaaaaaccagtcggagccgagtctatcttcacactttggcagagagtatttgcaaactgattttcccagagtttgaacggctgaatgttgcacttcagagaacattggcaaagcacaaaataaaagaaagcaggaaatctttggaaagagaagactttgaaaaaacaattgcagagcaagcagttgcagcaggagttccagtggaggttatcaaagaatctcttggtgaagaggtttttaaaatatgttacgaggaagatgaaaacatccttggggtggttggaggcacccttaaagattttttaaacagcttcagtacccttctgaaacagagcagccattgccaagaagcaggaaaaaggggcaggcttgaggacgcctccattctatgcctggataaggaggatgattttctacatgtttactacttcttccctaagagaaccacctccctgattcttcccggcatcataaaggcagctgctcacgtattatatgaaacggaagtggaagtgtcgttaatgcctccctgcttccataatgattgcagcgagtttgtgaatcagccctacttgttgtactccgttcacatgaaaagcaccaagccatccctgtcccccagcaaaccccagtcctcgctggtgattcccacatcgctattctgcaagacatttccattccatttcatgtttgacaaagatatgacaattctgcaatttggcaatggcatcagaaggctgatgaacaggagagactttcaaggaaagcctaattttgaagaatactttgaaattctgactccaaaaatcaaccagacgtttagcgggatcatgactatgttgaatatgcagtttgttgtacgagtgaggagatgggacaactctgtgaaaaaatcttcaagggttatggacctcaaaggccaaatgatctacattgttgaatccagtgcaatcttgtttttggggtcaccctgtgtggacagattagaagattttacaggacgagggctctacctctcagacatcccaattcacaatgcactgagggatgtggtcttaataggggaacaagcccgagctcaagatggcctgaagaagaggctggggaagctgaaggctacccttgagcaagcccaccaagccctggaggaggagaagaaaaagacagtagaccttctgtgctccatatttccctgtgaggttgctcagcagctgtggcaagggcaagttgtgcaagccaagaagttcagtaatgtcaccatgctcttctcagacatcgttgggttcactgccatctgctcccagtgctcaccgctgcaggtcatcaccatgctcaatgcactgtacactcgcttcgaccagcagtgtggagagctggatgtctacaaggtggagaccattggcgatgcctattgtgtagctgggggattacacaaagagagtgatactcatgctgttcagatagcgctgatggccctgaagatgatggagctctctgatgaagttatgtctccccatggagaacctatcaagatgcgaattggactgcactctggatcagtttttgctggcgtcgttggagttaaaatgccccgttactgtctttttggaaacaatgtcactctggctaacaaatttgagtcctgcagtgtaccacgaaaaatcaatgtcagcccaacaacttacagattactcaaagactgtcctggtttcgtgtttacccctcgatcaagggaggaacttccaccaaacttccctagtgaaatccccggaatctgccattttctggatgcttaccaacaaggaacaaactcaaaaccatgcttccaaaagaaagatgtggaagatggcaatgccaattttttaggcaaagcatcaggaatagattagcaacctatatacctatttataagtctttggggtttgactcattgaagatgtgtagagcctctgaaagcactttagggattgtagatggctaacaagcagtattaaaatttcaggagccaagtcacaatctttctcctgtttaacatgacaaaatgtatgtactcacttcagtacttcagctcttcaagaaaaaaaaaaaaaaccttaaaaagctacttttgtgggagtatttctattatataaccagcacttactacctgtactcaaaattcagcaccttgtacatatatcagataattgtagtcaattgtacaaactgatggagtcacctgcaatctcatatcctggtggaatgccatggttattaaagtgtgtttgtgatagtgtcgtcaaaaaaaa

SEQ ID NO: 13137 - DNA, 2656 bp, Homo sapiens
  source 1..2656: mol_type = unassigned DNA
gacgggggtgggcgccgagcagcgccgcgccggctgctgagctcgcggggccgggccgtgagaacgcgcggggcgcgccggggccgctggtctcccacggccagggcgcctgggccccagagcccatcagccgcgtgcagcgctgcggcctccggcgcgccggcaggcaagcgagcgggcgcagctgggggatgcctggaccccggaggcagcagggctggaggcggtggcgggcttcagggcaacttcacccggccggctgcggcgtggacatcccagttaccagtgtccttgaattgatagtggcttctgtttgtcagtctcatataagaactacagctcatcaggaggagatcgcagcagggtaagagacaccaacaccatgttctgcacgaagctcaaggatctcaagatcacaggagagtgtcctttctccttactggcaccaggtcaagttcctaacgagtcttcagaggaggcagcaggaagctcagagagctgcaaagcaaccgtgcccatctgtcaagacattcctgagaagaacatacaagaaagtcttcctcaaagaaaaaccagtcggagccgagtctatcttcacactttggcagagagtatttgcaaactgattttcccagagtttgaacggctgaatgttgcacttcagagaacattggcaaagcacaaaataaaagaaagcaggaaatctttggaaagagaagactttgaaaaaacaattgcagagcaagcagttgcagcaggagttccagtggaggttatcaaagaatctcttggtgaagaggtttttaaaatatgttacgaggaagatgaaaacatccttggggtggttggaggcacccttaaagattttttaaacagcttcagtacccttctgaaacagagcagccattgccaagaagcaggaaaaaggggcaggcttgaggacgcctccattctatgcctggataaggaggatgattttctacatgtttactacttcttccctaagagaaccacctccctgattcttcccggcatcataaaggcagctgctcacgtattatatgaaacggaagtggaagtgtcgttaatgcctccctgcttccataatgattgcagcgagtttgtgaatcagccctacttgttgtactccgttcacatgaaaagcaccaagccatccctgtcccccagcaaaccccagtcctcgctggtgattcccacatcgctattctgcaagacatttccattccatttcatgtttgacaaagatatgacaattctgcaatttggcaatggcatcagaaggctgatgaacaggagagactttcaaggaaagcctaattttgaagaatactttgaaattctgactccaaaaatcaaccagacgtttagcgggatcatgactatgttgaatatgcagtttgttgtacgagtgaggagatgggacaactctgtgaaaaaatcttcaagggttatggacctcaaaggccaaatgatctacattgttgaatccagtgcaatcttgtttttggggtcaccctgtgtggacagattagaagattttacaggacgagggctctacctctcagacatcccaattcacaatgcactgagggatgtggtcttaataggggaacaagcccgagctcaagatggcctgaagaagaggctggggaagctgaaggctacccttgagcaagcccaccaagccctggaggaggagaagaaaaagacagtagaccttctgtgctccatatttccctgtgaggttgctcagcagctgtggcaagggcaagttgtgcaagccaagaagttcagtaatgtcaccatgctcttctcagacatcgttgggttcactgccatctgctcccagtgctcaccgctgcaggtcatcaccatgctcaatgcactgtacactcgcttcgaccagcagtgtggagagctggatgtctacaaggtggagaccattggcgatgcctattgtgtagctgggggattacacaaagagagtgatactcatgctgttcagatagcgctgatggccctgaagatgatggagctctctgatgaagttatgtctccccatggagaacctatcaagatgcgaattggactgcactctggatcagtttttgctggcgtcgttggagttaaaatgccccgttactgtctttttggaaacaatgtcactctggctaacaaatttgagtcctgcagtgtaccacgaaaaatcaatgtcagcccaacaacttacagattactcaaagactgtcctggtttcgtgtttacccctcgatcaagggaggaacttccaccaaacttccctagtgaaatccccggaatctgccattttctggatgcttaccaacaaggaacaaactcaaaaccatgcttccaaaagaaagatgtggaagatggcaatgccaattttttaggcaaagcatcaggaatagattagcaacctatatacctatttataagtctttggggtttgactcattgaagatgtgtagagcctctgaaagcactttagggattgtagatggctaacaagcagtattaaaatttcaggagccaagtcacaatctttctcctgtttaacatgacaaaatgtatgtactcacttcagtacttcagctcttcaagaaaaaaaaaaaaa

SEQ ID NO: 13138 - DNA, 3124 bp, Homo sapiens
  source 1..3124: mol_type = unassigned DNA
gtagccgctgccgcctctgcctgggtcccttcggccgtacctctgcgtgggggctgcctccccggctcccggtgcagacaccatgtacggatttgtgaatcacgccctggagttgctggtgatccgcaattacggccccgaggtgtgggaagacatcaaaaaagaggcacagttagatgaagaaggacagtttcttgtcagaataatatatgatgactccaaaacttatgatttggttgctgctgcaagcaaagtcctcaatctcaatgctggagaaatcctccaaatgtttgggaagatgtttttcgtcttttgccaagaatctggttatgatacaatcttgcgtgtcctgggctctaatgtcagagaatttctacagaaccttgatgctctgcacgaccaccttgctaccatctacccaggaatgcgtgcaccttcctttaggtgcactgatgcagaaaagggcaaaggactcattttgcactactactcagagagagaaggacttcaggatattgtcattggaatcatcaaaacagtggcacaacaaatccatggcactgaaatagacatgaaggttattcagcaaagaaatgaagaatgtgatcatactcaatttttaattgaagaaaaagagtcaaaagaagaggatttttatgaagatcttgacagatttgaagaaaatggtacccaggaatcacgcatcagcccatatacattctgcaaagcttttccttttcatataatatttgaccgggacctagtggtcactcagtgtggcaatgctatatacagagttctcccccagctccagcctgggaattgcagccttctgtctgtcttctcgctggttcgtcctcatattgatattagtttccatgggatcctttctcacatcaatactgtttttgtattgagaagcaaggaaggattgttggatgtggagaaattagaatgtgaggatgaactgactgggactgagatcagctgcttacgtctcaagggtcaaatgatctacttacctgaagcagatagcatactttttctatgttcaccaagtgtcatgaacctggacgatttgacaaggagagggctgtatctaagtgacatccctctgcatgatgccacgcgcgatcttgttcttttgggagaacaatttagagaggaatacaaactcacccaagaactggaaatcctcactgacaggctacagctcacgttaagagccctggaagatgaaaagaaaaagacagacacattgctgtattctgtccttcctccgtctgttgccaatgagctgcggcacaagcgtccagtgcctgccaaaagatatgacaatgtgaccatcctctttagtggcattgtgggcttcaatgctttctgtagcaagcatgcatctggagaaggagccatgaagatcgtcaacctcctcaacgacctctacaccagatttgacacactgactgattcccggaaaaacccatttgtttataaggtggagactgttggtgacaagtatatgacagtgagtggtttaccagagccatgcattcaccatgcacgatccatctgccacctggccttggacatgatggaaattgctggccaggttcaagtagatggtgaatctgttcagataacaatagggatacacactggagaggtagttacaggtgtcataggacagcggatgcctcgatactgtctttttgggaatactgtcaacctcacaagccgaacagaaaccacaggagaaaagggaaaaataaatgtgtctgaatatacatacagatgtcttatgtctccagaaaattcagatccacaattccacttggagcacagaggcccagtgtccatgaagggcaaaaaagaaccaatgcaagtttggtttctatccagaaaaaatacaggaacagaggaaacaaagcaggatgatgactgaatcttggattatggggtgaagaggagtacagactaggttccagttttctcctaacacgtgccaagcccaggagcagttcttccctatggatacagattttcttttgtccttgtccattaccccaagactttcttctagatatatctctcactatccgttattcaaccttagctctgctttctattactttttaggctttagtatattatctaaagtttggcttttgatgtggatgatgtgagcttcatgtgtcttaaaatctactacaagcattacctaacatggtgatctgcaagtagtaggcacccaataaatatttgttgaatttagttaaatgaaactgaacagtgtttggccatgtgtatatttatatcatgtttaccaaatctgtttagtgttccacatatatgtatatgtatattttaatgactataatgtaataaagtttatatcatgttggtgtatatcattatagaaatcattttctaaaggagtgaattctaagttttaggggaaaaaatgcaatttattttcagactcccaaagtaagaattaacatatcatgctaagaaaatagtgactattttgaagtatgctacttccctttcagaaatatagaatacacgtttctgttattaaagtatttgattactaattcaaatcatatggcaattataattcttctaaaatgctatcatttgtaactgtatcccctgtattaaatctcattaaccacaggcagctgttacagaaagctgcattgtttcacattgagctgttacattagttcaggctaaatgttgggagctccaaccacatccaagaataaatctggaaacacactgctgggatactgctgttagagcccttcttggccttgtattcccagaaatgagctccctttccttagcttagaagaatgtgattatatccaggacatcatgttcagaaaacttagtttactttcagcatagaatgcattactgttggaataattggcctctagctcttaaatgtctctgataacttattaatatctatctttataaaatagagtgcaactacttttgtgtaaaaatgtttgcctttaaatttagtatttcatatcagcacatcgatatatgtataaatgttccatgttaatgtgtaaaagagtctgtaataaattatttttttcacgtg

SEQ ID NO: 13139 - DNA, 2316 bp, Homo sapiens
  source 1..2316: mol_type = unassigned DNA
aatcagggcgggccaaggcggctgttctcgctccagctcgatgctgcctccccggcccggttgcgctgtagccgctgccgcctctgcctgggtcccttcggccgtacctctgcgtgggggctgcctccccggctcccggtgcagacaccatgaaaagaggcacagttagatgaagaaggacagtttcttgtcagaataatatatgatgactccaaaacttatgatttggttgctgctgcaagcaaagtcctcaatctcaatgctggagaaatcctccaaatgtttgggaagatgtttttcgtcttttgccaagaatctggttatgatacaatcttgcgtgtcctgggctctaatgtcagagaatttctacagaaccttgatgctctgcacgaccaccttgctaccatctacccaggaatgcgtgcaccttcctttaggtgcactgatgcagaaaagggcaaaggactcattttgcactactactcagagagagaaggacttcaggatattgtcattggaatcatcaaaacagtggcacaacaaatccatggcactgaaatagacatgaaggttattcagcaaagaaatgaagaatgtgatcatactcaatttttaattgaagaaaaagagtcaaaagaagaggatttttatgaagatcttgacagatttgaagaaaatggtacccaggaatcacgcatcagcccatatacattctgcaaagcttttccttttcatataatatttgaccgggacctagtggtcactcagtgtggcaatgctatatacagagttctcccccagctccagcctgggaattgcagccttctgtctgtcttctcgctggttcgtcctcatattgatattagtttccatgggatcctttctcacatcaatactgtttttgtattgagaagcaaggaaggattgttggatgtggagaaattagaatgtgaggatgaactgactgggactgagatcagctgcttacgtctcaagggtcaaatgatctacttacctgaagcagatagcatactttttctatgttcaccaagtgtcatgaacctggacgatttgacaaggagagggctgtatctaagtgacatccctctgcatgatgccacgcgcgatcttgttcttttgggagaacaatttagagaggaatacaaactcacccaagaactggaaatcctcactgacaggctacagctcacgttaagagccctggaagatgaaaagaaaaagacagacacattgctgtattctgtccttcctccgtctgttgccaatgagctgcggcacaagcgtccagtgcctgccaaaagatatgacaatgtgaccatcctctttagtggcattgtgggcttcaatgctttctgtagcaagcatgcatctggagaaggagccatgaagatcgtcaacctcctcaacgacctctacaccagatttgacacactgactgattcccggaaaaacccatttgtttataaggtggagactgttggtgacaagtatatgacagtgagtggtttaccagagccatgcattcaccatgcacgatccatctgccacctggccttggacatgatggaaattgctggccaggttcaagtagatggtgaatctgttcagataacaatagggatacacactggagaggtagttacaggtgtcataggacagcggatgcctcgatactgtctttttgggaatactgtcaacctcacaagccgaacagaaaccacaggagaaaagggaaaaataaatgtgtctgaatatacatacagatgtcttatgtctccagaaaattcagatccacaattccacttggagcacagaggcccagtgtccatgaagggcaaaaaagaaccaatgcaagtttggtttctatccagaaaaaatacaggaacagaggaaacaaagcaggatgatgactgaatcttggattatggggtgaagaggagtacagactaggttccagttttctcctaacacgtgccaagcccaggagcagttcttccctatggatacagattttcttttgtccttgtccattaccccaagactttcttctagatatatctctcactatccgttattcaaccttagctctgctttctattactttttaggctttagtatattatctaaagtttggcttttgatgtggatgatgtgagcttcatgtgtcttaaaatctactacaagcattacctaacatggtgatctgcaagtagtaggcacccaataaatatttgttgaatttagttaaatgaaactgaacagtgtttggccatgtgtatatttatatcatgttta

SEQ ID NO: 13140 - DNA, 2456 bp, Homo sapiens
  source 1..2456: mol_type = unassigned DNA
agctcgatgctgcctccccggcccggttgcgctgtagccgctgccgcctctgcctgggtcccttcggccgtacctctgcgtgggggctgcctccccggctcccggtgcagacaccatgtacggatttgtgaatcacgccctggagttgctggtgatccgcaattacggccccgaggtgtgggaagacatcaagagagaagaggtcttggtatgtcgcccaggctgttctcaaattcctgagctcaacggatcctcccacctgggcttcccaaagtgctgggataacaggcatgagccaacctgcccagccagaaaagagagattttaatgcttatgtgctttataaaagaggcacagttagatgaagaaggacagtttcttgtcagaataatatatgatgactccaaaacttatgatttggttgctgctgcaagcaaagtcctcaatctcaatgctggagaaatcctccaaatgtttgggaagatgtttttcgtcttttgccaagaatctggttatgatacaatcttgcgtgtcctgggctctaatgtcagagaatttctacagaaccttgatgctctgcacgaccaccttgctaccatctacccaggaatgcgtgcaccttcctttaggtgcactgatgcagaaaagggcaaaggactcattttgcactactactcagagagagaaggacttcaggatattgtcattggaatcatcaaaacagtggcacaacaaatccatggcactgaaatagacatgaaggttattcagcaaagaaatgaagaatgtgatcatactcaatttttaattgaagaaaaagagtcaaaagaagaggatttttatgaagatcttgacagatttgaagaaaatggtacccaggaatcacgcatcagcccatatacattctgcaaagcttttccttttcatataatatttgaccgggacctagtggtcactcagtgtggcaatgctatatacagagttctcccccagctccagcctgggaattgcagccttctgtctgtcttctcgctggttcgtcctcatattgatattagtttccatgggatcctttctcacatcaatactgtttttgtattgagaagcaaggaaggattgttggatgtggagaaattagaatgtgaggatgaactgactgggactgagatcagctgcttacgtctcaagggtcaaatgatctacttacctgaagcagatagcatactttttctatgttcaccaagtgtcatgaacctggacgatttgacaaggagagggctgtatctaagtgacatccctctgcatgatgccacgcgcgatcttgttcttttgggagaacaatttagagaggaatacaaactcacccaagaactggaaatcctcactgacaggctacagctcacgttaagagccctggaagatgaaaagaaaaagacagacacattgctgtattctgtccttcctccgtctgttgccaatgagctgcggcacaagcgtccagtgcctgccaaaagatatgacaatgtgaccatcctctttagtggcattgtgggcttcaatgctttctgtagcaagcatgcatctggagaaggagccatgaagatcgtcaacctcctcaacgacctctacaccagatttgacacactgactgattcccggaaaaacccatttgtttataaggtggagactgttggtgacaagtatatgacagtgagtggtttaccagagccatgcattcaccatgcacgatccatctgccacctggccttggacatgatggaaattgctggccaggttcaagtagatggtgaatctgttcagataacaatagggatacacactggagaggtagttacaggtgtcataggacagcggatgcctcgatactgtctttttgggaatactgtcaacctcacaagccgaacagaaaccacaggagaaaagggaaaaataaatgtgtctgaatatacatacagatgtcttatgtctccagaaaattcagatccacaattccacttggagcacagaggcccagtgtccatgaagggcaaaaaagaaccaatgcaagtttggtttctatccagaaaaaatacaggaacagaggaaacaaagcaggatgatgactgaatcttggattatggggtgaagaggagtacagactaggttccagttttctcctaacacgtgccaagcccaggagcagttcttccctatggatacagattttcttttgtccttgtccattaccccaagactttcttctagatatatctctcactatccgttattcaaccttagctctgctttctattactttttaggctttagtatattatctaaagtttggcttttgatgtggatgatgtgagcttcatgtgtcttaaaatctactacaagcattacctaacatggtgatctgcaagtagtaggcacccaataaatatttgttgaattta

SEQ ID NO: 13141 - DNA, 2355 bp, Homo sapiens
  source 1..2355: mol_type = unassigned DNA
gctgagcgccagcggaagggaaggctccgggttcgcgtccccgcgctgcccccgatgcccagcctctcccggagcggtgacagtacggatttgtgaatcacgccctggagttgctggtgatccgcaattacggccccgaggtgtgggaagacatcaaaaaagaggcacagttagatgaagaaggacagtttcttgtcagaataatatatgatgactccaaaacttatgatttggttgctgctgcaagcaaagtcctcaatctcaatgctggagaaatcctccaaatgtttgggaagatgtttttcgtcttttgccaagaatctggttatgatacaatcttgcgtgtcctgggctctaatgtcagagaatttctacagaaccttgatgctctgcacgaccaccttgctaccatctacccaggaatgcgtgcaccttcctttaggtgcactgatgcagaaaagggcaaaggactcattttgcactactactcagagagagaaggacttcaggatattgtcattggaatcatcaaaacagtggcacaacaaatccatggcactgaaatagacatgaaggttattcagcaaagaaatgaagaatgtgatcatactcaatttttaattgaagaaaaagagtcaaaagaagaggatttttatgaagatcttgacagatttgaagaaaatggtacccaggaatcacgcatcagcccatatacattctgcaaagcttttccttttcatataatatttgaccgggacctagtggtcactcagtgtggcaatgctatatacagagttctcccccagctccagcctgggaattgcagccttctgtctgtcttctcgctggttcgtcctcatattgatattagtttccatgggatcctttctcacatcaatactgtttttgtattgagaagcaaggaaggattgttggatgtggagaaattagaatgtgaggatgaactgactgggactgagatcagctgcttacgtctcaagggtcaaatgatctacttacctgaagcagatagcatactttttctatgttcaccaagtgtcatgaacctggacgatttgacaaggagagggctgtatctaagtgacatccctctgcatgatgccacgcgcgatcttgttcttttgggagaacaatttagagaggaatacaaactcacccaagaactggaaatcctcactgacaggctacagctcacgttaagagccctggaagatgaaaagaaaaagacagacacattgctgtattctgtccttcctccgtctgttgccaatgagctgcggcacaagcgtccagtgcctgccaaaagatatgacaatgtgaccatcctctttagtggcattgtgggcttcaatgctttctgtagcaagcatgcatctggagaaggagccatgaagatcgtcaacctcctcaacgacctctacaccagatttgacacactgactgattcccggaaaaacccatttgtttataaggtggagactgttggtgacaagtatatgacagtgagtggtttaccagagccatgcattcaccatgcacgatccatctgccacctggccttggacatgatggaaattgctggccaggttcaagtagatggtgaatctgttcagataacaatagggatacacactggagaggtagttacaggtgtcataggacagcggatgcctcgatactgtctttttgggaatactgtcaacctcacaagccgaacagaaaccacaggagaaaagggaaaaataaatgtgtctgaatatacatacagatgtcttatgtctccagaaaattcagatccacaattccacttggagcacagaggcccagtgtccatgaagggcaaaaaagaaccaatgcaagtttggtttctatccagaaaaaatacaggaacagaggaaacaaagcaggatgatgactgaatcttggattatggggtgaagaggagtacagactaggttccagttttctcctaacacgtgccaagcccaggagcagttcttccctatggatacagattttcttttgtccttgtccattaccccaagactttcttctagatatatctctcactatccgttattcaaccttagctctgctttctattactttttaggctttagtatattatctaaagtttggcttttgatgtggatgatgtgagcttcatgtgtcttaaaatctactacaagcattacctaacatggtgatctgcaagtagtaggcacccaataaatatttgttgaatttagttaaatgaaactgaacagtgtttggccatgtgtatatttatatcatgtttaccaaatctgtttagtgttccacatatatgtatat

SEQ ID NO: 13142 - DNA, 3834 bp, Homo sapiens
  source 1..3834: mol_type = unassigned DNA
gaccagagagaagcgtggggaagagtgggctgagggactccactagaggctgtccatctggattccctgcctccctaggagcccaacagagcaaagcaagtgggcacaaggagtatggttctaacgtgattggggtcatgaagacgttgctgttggacttggctttgtggtcactgctcttccagcccgggtggctgtcctttagttcccaggtgagtcagaactgccacaatggcagctatgaaatcagcgtcctgatgatgggcaactcagcctttgcagagcccctgaaaaacttggaagatgcggtgaatgaggggctggaaatagtgagaggacgtctgcaaaatgctggcctaaatgtgactgtgaacgctactttcatgtattcggatggtctgattcataactcaggcgactgccggagtagcacctgtgaaggcctcgacctactcaggaaaatttcaaatgcacaacggatgggctgtgtcctcatagggccctcatgtacatactccaccttccagatgtaccttgacacagaattgagctaccccatgatctcagctggaagttttggattgtcatgtgactataaagaaaccttaaccaggctgatgtctccagctagaaagttgatgtacttcttggttaacttttggaaaaccaacgatctgcccttcaaaacttattcctggagcacttcgtatgtttacaagaatggtacagaaactgaggactgtttctggtaccttaatgctctggaggctagcgtttcctatttctcccacgaactcggctttaaggtggtgttaagacaagataaggagtttcaggatatcttaatggaccacaacaggaaaagcaatgtgattattatgtgtggtggtccagagttcctctacaagctgaagggtgaccgagcagtggctgaagacattgtcattattctagtggatcttttcaatgaccagtactttgaggacaatgtcacagcccctgactatatgaaaaatgtccttgttctgacgctgtctcctgggaattcccttctaaatagctctttctccaggaatctatcaccaacaaaacgagactttgctcttgcctatttgaatggaatcctgctctttggacatatgctgaagatatttcttgaaaatggagaaaatattaccacccccaaatttgctcatgctttcaggaatctcacttttgaagggtatgacggtccagtgaccttggatgactggggggatgttgacagtaccatggtgcttctgtatacctctgtggacaccaagaaatacaaggttcttttgacctatgatacccacgtaaataagacctatcctgtggatatgagccccacattcacttggaagaactctaaacttcctaatgatattacaggccggggccctcagatcctgatgattgcagtcttcaccctcactggagctgtggtgctgctcctgctcgtcgctctcctgatgctcagaaaatatagaaaagattatgaacttcgtcagaaaaaatggtcccacattcctcctgaaaatatctttcctctggagaccaatgagaccaatcatgttagcctcaagatcgatgatgacaaaagacgagatacaatccagagactacgacagtgcaaatacgacaaaaagcgagtgattctcaaagatctcaagcacaatgatggtaatttcactgaaaaacagaagatagaattgaacaagttgcttcagattgactattacaacctgaccaagttctacggcacagtgaaacttgataccatgatcttcggggtgatagaatactgtgagagaggatccctccgggaagttttaaatgacacaatttcctaccctgatggcacattcatggattgggagtttaagatctctgtcttgtatgacattgctaagggaatgtcatatctgcactccagtaagacagaagtccatggtcgtctgaaatctaccaactgcgtagtggacagtagaatggtggtgaagatcactgattttggctgcaattccattttacctccaaaaaaggacctgtggacagctccagagcacctccgccaagccaacatctctcagaaaggagatgtgtacagctatgggatcatcgcacaggagatcatcctgcggaaagaaaccttctacactttgagctgtcgggaccggaatgagaagattttcagagtggaaaattccaatggaatgaaacccttccgcccagatttattcttggaaacagcagaggaaaaagagctagaagtgtacctacttgtaaaaaactgttgggaggaagatccagaaaagagaccagatttcaaaaaaattgagactacacttgccaagatatttggactttttcatgaccaaaaaaatgaaagctatatggataccttgatccgacgtctacagctatattctcgaaacctggaacatctggtagaggaaaggacacagctgtacaaggcagagagggacagggctgacagacttaactttatgttgcttccaaggctagtggtaaagtctctgaaggagaaaggctttgtggagccggaactatatgaggaagttacaatctacttcagtgacattgtaggtttcactactatctgcaaatacagcacccccatggaagtggtggacatgcttaatgacatctataagagttttgaccacattgttgatcatcatgatgtctacaaggtggaaaccatcggtgatgcgtacatggtggctagtggtttgcctaagagaaatggcaatcggcatgcaatagacattgccaagatggccttggaaatcctcagcttcatggggacctttgagctggagcatcttcctggcctcccaatatggattcgcattggagttcactctggtccctgtgctgctggagttgtgggaatcaagatgcctcgttattgtctatttggagatacggtcaacacagcctctaggatggaatccactggcctccctttgagaattcacgtgagtggctccaccatagccatcctgaagagaactgagtgccagttcctttatgaagtgagaggagaaacatacttaaagggaagaggaaatgagactacctactggctgactgggatgaaggaccagaaattcaacctgccaacccctcctactgtggagaatcaacagcgtttgcaagcagaattttcagacatgattgccaactctttacagaaaagacaggcagcagggataagaagccaaaaacccagacgggtagccagctataaaaaaggcactctggaatacttgcagctgaataccacagacaaggagagcacctatttttaaacctaaatgaggtataaggactcacacaaattaaaatacagctgcactgaggcagcgacctcaagtgtcctgaaagcttacattttcctgagacctcaatgaagcagaaatgtacttaggcttggctgccctgtctggaacatggactttcttgcatgaatcagatgtgtgttctcagtgaaataactaccttccactctggaaccttattccagcagttgttccagggagcttctacctggaaaagaaaagaaatgaatagactatctagaacttgagaagattttattcttatttcatttattttttgtttgtttatttttatcgtttttgtttactggctttccttctgtattcataagattttttaaattgtcataattatattttaaatacccatcttcattaaagtatatttaactcataatttttgcagaaaatatgctatatattaggcaagaataaaagctaaagg

SEQ ID NO: 13143 - DNA, 3623 bp, Homo sapiens
  source 1..3623: mol_type = unassigned DNA
caaaagggggaccggccctgtgacccctcaccgggggccgtgggcccgagcccccggacttccctaagccggcaatgaccgcctgcgcccgccgagcgggtgggcttccggaccccgggctctgcggtcccgcgtggtgggctccgtccctgccccgcctcccccgggccctgccccggctcccgctcctgctgctcctgcttctgctgcagccccccgccctctccgccgtgttcacggtgggggtcctgggcccctgggcttgcgaccccatcttctctcgggctcgcccggacctggccgcccgcctggccgccgcccgcctgaaccgcgaccccggcctggcaggcggtccccgcttcgaggtagcgctgctgcccgagccttgccggacgccgggctcgctgggggccgtgtcctccgcgctggcccgcgtgtcgggcctcgtgggtccggtgaaccctgcggcctgccggccagccgagctgctcgccgaagaagccgggatcgcgctggtgccctggggctgcccctggacgcaggcggagggcaccacggcccctgccgtgacccccgccgcggatgccctctacgccctgcttcgcgcattcggctgggcgcgcgtggccctggtcaccgccccccaggacctgtgggtggaggcgggacgctcactgtccacggcactcagggcccggggcctgcctgtcgcctccgtgacttccatggagcccttggacctgtctggagcccgggaggccctgaggaaggttcgggacgggcccagggtcacagcagtgatcatggtgatgcactcggtgctgctgggtggcgaggagcagcgctacctcctggaggccgcagaggagctgggcctgaccgatggctccctggtcttcctgcccttcgacacgatccactacgccttgtccccaggcccggaggccttggccgcactcgccaacagctcccagcttcgcagggcccacgatgccgtgctcaccctcacgcgccactgtccctctgaaggcagcgtgctggacagcctgcgcagggctcaagagcgccgcgagctgccctctgacctcaatctgcagcaggtctccccactctttggcaccatctatgacgcggtcttcttgctggcaaggggcgtggcagaagcgcgggctgccgcaggtggcagatgggtgtccggagcagctgtggcccgccacatccgggatgcgcaggtccctggcttctgcggggacctaggaggagacgaggagcccccattcgtgctgctagacacggacgcggcgggagaccggctttttgccacatacatgctggatcctgcccggggctccttcctctccgccggtacccggatgcacttcccgcgtgggggatcagcacccggacctgacccctcgtgctggttcgatccaaacaacatctgcggtggaggactggagccgggcctcgtctttcttggcttcctcctggtggttgggatggggctggctggggccttcctggcccattatgtgaggcaccggctacttcacatgcaaatggtctccggccccaacaagatcatcctgaccgtggacgacatcacctttctccacccacatgggggcacctctcgaaaggtggcccaggggagtcgatcaagtctgggtgcccgcagcatgtcagacattcgcagcggccccagccaacacttggacagccccaacattggtgtctatgagggagacagggtttggctgaagaaattcccaggggatcagcacatagctatccgcccagcaaccaagacggccttctccaagctccaggagctccggcatgagaacgtggccctctacctggggcttttcctggctcggggagcagaaggccctgcggccctctgggagggcaacctggctgtggtctcagagcactgcacgcggggctctcttcaggacctcctcgctcagagagaaataaagctggactggatgttcaagtcctccctcctgctggaccttatcaagggaataaggtatctgcaccatcgaggcgtggctcatgggcggctgaagtcacggaactgcatagtggatggcagattcgtactcaagatcactgaccacggccacgggagactgctggaagcacagaaggtgctaccggagcctcccagagcggaggaccagctgtggacagccccggagctgcttagggacccagccctggagcgccggggaacgctggccggcgacgtctttagcttggccatcatcatgcaagaagtagtgtgccgcagtgccccttatgccatgctggagctcactcccgaggaagtggtgcagagggtgcggagcccccctccactgtgtcggcccttggtgtccatggaccaggcacctgtcgagtgtatcctcctgatgaagcagtgctgggcagagcagccggaacttcggccctccatggaccacaccttcgacctgttcaagaacatcaacaagggccggaagacgaacatcattgactcgatgcttcggatgctggagcagtactctagtaacctggaggatctgatccgggagcgcacggaggagctggagctggaaaagcagaagacagaccggctgcttacacagatgctgcctccgtctgtggctgaggccttgaagacggggacaccagtggagcccgagtactttgagcaagtgacactgtactttagtgacattgtgggcttcaccaccatctctgccatgagtgagcccattgaggttgtggacctgctcaacgatctctacacactctttgatgccatcattggttcccacgatgtctacaaggtggagacaataggggacgcctatatggtggcctcggggctgccccagcggaatgggcagcgacacgcggcagagatcgccaacatgtcactggacatcctcagtgccgtgggcactttccgcatgcgccatatgcctgaggttcccgtgcgcatccgcataggcctgcactcgggtccatgcgtggcaggcgtggtgggcctcaccatgccgcggtactgcctgtttggggacacggtcaacaccgcctcgcgcatggagtccaccgggctgccttaccgcatccacgtgaacttgagcactgtggggattctccgtgctctggactcgggctaccaggtggagctgcgaggccgcacggagctgaagggcaagggcgccgaggacactttctggctagtgggcagacgcggcttcaacaagcccatccccaaaccgcctgacctgcaaccggggtccagcaaccacggcatcagcctgcaggagatcccacccgagcggcgacggaagctggagaaggcgcggccgggccagttctcttgagaagtgaggcccggccccggacagggtctgggccctgctccctgtcccatctgcagtggaccccaggcacccccctttgaggaggtggggtgaactgctccttggcagggatttgtgacactgcattgctgggctgtgttcctcgggctcttctggaccttgcaccgtggataccaggccatgtgccatggtatttgggtcctgggagggtgggtgaaataaaggcatgctgtcttc

SEQ ID NO: 13144 - DNA, 3714 bp, Homo sapiens
  source 1..3714: mol_type = unassigned DNA
tctgcggatgctgaagagtgattttcaaaacatttactaacgctttcaattatttaccccattaatggaatttgtcaacagactggagtccttgacaggattgtgaatgcatagaggatgcaaagaaatggacacactgaggtagctatgccagtggtctgcatgcgcaggcagtaaactgaagacatttgagcggtgaattacttggcatttggaaacaccaccgtctgtgtcgggaaagcagaataactctccagtatctcgtcattagcttgctggaagcaggagggctatgttcctgggactcgggcgcttttctcgccttgttctctggtttgcggctttcaggaaactgctgggacaccatggccttgcatctgccaagttcctgtggtgcttgtgccttctgtctgtcatgtcccttccgcagcaggtgtggacactcccctacaagataggggtggtgggcccttgggcttgtgattcgctgttttcaaaggccctgcctgaggttgctgcgcgattagccattgagcgaatcaaccgggacccatcttttgacctgagttattcttttgaatacgtgattctcaatgaagactgccagacttcgagggctctctccagtttcatttcccaccaccagatggcctcaggatttattggacctaccaaccctggctactgcgaggcagcctcgctcctgggaaacagctgggacaaaggaattttctcttgggcttgtgtgaattatgaattagacaataaaattagctacccgaccttttctcggacactcccttctcccatccgggtgcttgtaactgtcatgaaatatttccagtgggctcatgctggagtcatttcctcagatgaagacatttgggtgcatacagccaatcgagtcgcaagtgctcttcggagccacggcttacctgtaggggtcgtcctgaccacaggacaagacagccaaagcatgcggaaagccctccagaggattcaccaggcagacagaattcgcataatcatcatgtgtatgcattcagctttgattgggggagagactcagatgcatctcttggaatgtgctcatgatctgaaaatgactgatggaacctacgtctttgttccttatgatgccctgctctacagtttaccttataagcacaccccctaccgggtcctaaggaacaacccaaagctccgggaagcctatgatgcagtgttgaccattacagtggagtcccaagaaaagaccttctatcaagccttcacagaggcagcagcaagaggtgaaattcctgagaagctggagttcgatcaagtttcaccgttgtttggaaccatctacaattcaatttactttatcgcacaagccatgaataatgctatgaaagaaaatggacaggctggtgctgccagcctggttcagcattccagaaacatgcagttccatggattcaaccagttgatgaggacagattcaaatggaaatggaatttcagaatatgtaatcctggacaccaacttgaaagaatgggaactccatagcacctacactgtggacatggaaatggagctgctacgtttcggagggacccctattcacttccctggtggcaggccccctagagcagatgcaaaatgctggtttgcagaagggaagatctgccatggaggcatcgaccctgcctttgccatgatggtctgccttactttgcttatagccctgctgtctattaatggatttgcttactttataaggcgtcgtataaataaaatccagttgatcaaaggacccaatagaattctactgactttggaggatgtaacgtttatcaatccccactttggcagtaagagaggaagtcgtgccagtgtaagcttccagattacctcagaggtccaaagtgggaggtccccaagactctccttttcttcagggagtctaactccagctacctatgaaaactccaacatagcgatttatgagggtgattgggtgtggctgaaaaagttctcccttggagattttggagaccttaagtccatcaaatcaagagcaagtgatgtgttcgaaatgatgaaggacttgcgtcatgagaatattaaccctttattgggtttcttctatgattcggggatgtttgccattgtgacagaattctgttcccgagggagcctagaagacatactgacaaatcaagatgtgaaacttgactggatgtttaaatcatcactcttgctggatctcataaagggcatgaagtacttacaccacagagagtttgttcatgggaggctaaagtctcgaaactgtgtggtagatgggcgttttgtactaaaagtgacagattatggctttaacgacatcttagaaatgctgagactctctgaagaggaatcttctatggaagagctgctgtggacggcccctgaactgttgagagctccaagaggcagcaggttaggttcttttgcaggagatgtctatagctttgccatcatcatgcaagaagtgatggtccggggtaccccattctgcatgatggatctgccagctcaagaaatcataaacagacttaagaagcctcctcctgtgtacagaccagtagttcctcctgagcatgcccctccagaatgtctccagctgatgaagcagtgctgggctgaggctgcagaacaacgaccaacttttgatgaaatatttaaccagtttaaaacttttaataaagggaagaagaccaatattattgattctatgcttcggatgttggagcaatattctagcaacttggaagatttgattcgggagcggactgaagagctggaaattgaaaaacagaaaacggaaaagcttctaacacagatgctaccaccatcagttgctgaatctctcaaaaagggctgcacagttgaacctgagggctttgacttggtcaccttgtacttcagcgacattgtgggcttcacaaccatttcagccatgagtgagcccattgaggtcgtggatcttctgaatgacctgtacacactctttgatgcaataattggcagtcatgatgtctacaaggtagagaccattggagatgcctacatggtggcttcaggcctcccaaagaggaatggcagtaggcatgcagctgagattgcaaacatgtccttagatatcctgagctctgtgggcactttcaagatgcggcacatgccagaagtgccggtccgaattcgaattggccttcactcagggccggttgttgctggagtggtgggcctcaccatgcccagatactgcttgtttggagacactgtgaacacagcttctcggatggaatctacaggcttaccttatcgcattcatgtcagtctcagcactgttacaattcttcaaaatctgagtgagggctatgaagtggagcttcgaggaagaacagagctcaagggcaaaggcacagaggaaaccttctggctgattgggaaaaaaggcttcatgaagccccttcctgtgcccccaccagtggacaaagatgggcaagtgggccatggcctgcaaccagtggagattgcagccttccaaagaagaaaagcagaaaggcagttggtgagaaacaagccataaggggcaaagggctccaggatttgaatcttctcttggtgaggcaatgggaaagctcacttcagttcaagaaattgttctgcctgggcaagaaatta

SEQ ID NO: 13145 - DNA, 1874 bp, Homo sapiens
  source 1..1874: mol_type = unassigned DNA
cagaagttccacctcaccatcaagaaaggccctggtccaggatgtgcaaggtgtgatgaaatcacagggctggggaaggtcagctcggggtcacaagaagcctgatgggcaggaaagagcatgaaagccccagccagcctcacatgtgcggctgggaggactcacagaaaccctctgtacccagtcatgggccaaagacaccgtcatgcaagggggtgaaggctccacactcgtcccggccccgggcgtggaagcaggacctcgagcagtctctggcagcagcctatgtgccggtcgttgtggactctaaggggcagaatccggacaagctcagggtacagtctcccctggggctgcaaggatttagtggagactcttaacaccagttctctggcatctgtgagtttgagtgtgggccatcatcttcttccttctgctctctccctctccacatttcccggtaccatctgatccatcaggcccttctttgctcaggcctgaaggactcaggcctgtgagagaggacggccccgttgtcggccaagacacctttgggcgaggagcagcgaacagggcctgtccatctcagacgtcagccccctgaaggcctgagcaatgggcaacgtgatggagggaaagtcagtggaggagctgagcagcaccgagtgccaccagtggtacaagaagttcatgactgagtgcccctctggccaactcaccctctatgagttccgccagttcttcggcctcaagaacctgagcccgtcggccagccagtacgtggaacagatgtttgagacttttgacttcaacaaggacggctacattgatttcatggagtacgtggcagcgctcagcttggtcctcaaggggaaggtggaacagaagctccgctggtacttcaagctctatgatgtagatggcaacggctgcattgaccgcgatgagctgctcaccatcatccaggccattcgcgccattaacccctgcagcgataccaccatgactgcagaggagttcaccgatacagtgttctccaagattgacgtcaacggggatggggaactctccctggaagagtttatagagggcgtccagaaggaccagatgctcctggacacactgacacgaagcctggaccttacccgcatcgtgcgcaggctccagaatggcgagcaagacgaggagggggctgacgaggccgctgaggcagccggctgagtgcaccgcccggctgcttctgcactagcgggtggggtggtatggtggtgcctgttggtggtgttcttgtcttaaccctagatagaatctaatgaactcagaggcttagctcgcctctttagggtccatggtggcagcagagaggcagaagtgggagtccagagccaggaacagtgaaggatggttcctggcccctctgagtgacagctggtggcagcactccttgctggggggcactgttcaacatccctctgccgtcgggtgaccccctagcccttctgactcctctcccagcttttcccagctttccccactgagcttctccagtccatgctcttctggacgtggactctctgaggcagaactgagcttttccaggcctcttatggaatcctgcagatccagtggctgcagcttcaatcccagtgctgcaatcacacatccattctgccctgggggaccctggagcctacttgtgcgctttgcatttcattgattgacgcctcccttcaacaagcatttactgagcgcctactatgtactaatgctagatgttagatgtacaaagaagacagttttcatcctctaggaactcataggctaatggtgagacacacagacaaacatcattataataaaatatgctaagagaa

SEQ ID NO: 13146 - DNA, 1575 bp, Homo sapiens
  source 1..1575: mol_type = unassigned DNA
tgcttctctaagccttgttctattttcaactcttttctccagggtacagtctcccctggggctgcaaggatttagtggagactcttaacaccagttctctggcatctgtgagtttgagtgtgggccatcatcttcttccttctgctctctccctctccacatttcccggtaccatctgatccatcaggcccttctttgctcaggcctgaaggactcaggcctgtgagagaggacggccccgttgtcggccaagacacctttgggcgaggagcagcgaacagggcctgtccatctcagacgtcagccccctgaaggcctgagcaatgggcaacgtgatggagggaaagtcagtggaggagctgagcagcaccgagtgccaccagtggtacaagaagttcatgactgagtgcccctctggccaactcaccctctatgagttccgccagttcttcggcctcaagaacctgagcccgtcggccagccagtacgtggaacagatgtttgagacttttgacttcaacaaggacggctacattgatttcatggagtacgtggcagcgctcagcttggtcctcaaggggaaggtggaacagaagctccgctggtacttcaagctctatgatgtagatggcaacggctgcattgaccgcgatgagctgctcaccatcatccaggccattcgcgccattaacccctgcagcgataccaccatgactgcagaggagttcaccgatacagtgttctccaagattgacgtcaacggggatggggaactctccctggaagagtttatagagggcgtccagaaggaccagatgctcctggacacactgacacgaagcctggaccttacccgcatcgtgcgcaggctccagaatggcgagcaagacgaggagggggctgacgaggccgctgaggcagccggctgagtgcaccgcccggctgcttctgcactagcgggtggggtggtatggtggtgcctgttggtggtgttcttgtcttaaccctagatagaatctaatgaactcagaggcttagctcgcctctttagggtccatggtggcagcagagaggcagaagtgggagtccagagccaggaacagtgaaggatggttcctggcccctctgagtgacagctggtggcagcactccttgctggggggcactgttcaacatccctctgccgtcgggtgaccccctagcccttctgactcctctcccagcttttcccagctttccccactgagcttctccagtccatgctcttctggacgtggactctctgaggcagaactgagcttttccaggcctcttatggaatcctgcagatccagtggctgcagcttcaatcccagtgctgcaatcacacatccattctgccctgggggaccctggagcctacttgtgcgctttgcatttcattgattgacgcctcccttcaacaagcatttactgagcgcctactatgtactaatgctagatgttagatgtacaaagaagacagttttcatcctctaggaactcataggctaatggtgagacacacagacaaacatcattataataaaatatgct

SEQ ID NO: 13147 - DNA, 1924 bp, Homo sapiens
  source 1..1924: mol_type = unassigned DNA
agtatcctgccaagagtcctccctgaccaccagaagttccacctcaccatcaagaaaggccctggtccaggatgtgcaaggtgtgatgaaatcacagggctggggaaggtcagctcggggtcacaagaagcctgatgggcaggaaagagcatgaaagccccagccagcctcacatgtgcggctgggaggactcacagaaaccctctgtacccagtcatgggccaaagacaccgtcatgcaagggggtgaaggctccacactcgtcccggccccgggcgtggaagcaggacctcgagcagtctctggcagcagcctatgtgccggtcgttgtggactctaaggggcagaatccggacaagctcagggtacagtctcccctggggctgcaaggatttagtggagactcttaacaccagttctctggcatctgtgagtttgagtgtgggccatcatcttcttccttctgctctctccctctccacatttcccggtaccatctgatccatcaggcccttctttgctcaggcctgaaggactcaggcctgtgagagaggacggccccgttgtcggccaagacacctttgggcgaggagcagcgaacagggcctgtccatctcagacgtcagccccctgaaggcctgagcaatgggcaacgtgatggagggaaagtcagtggaggagctgagcagcaccgagtgccaccagtggtacaagaagttcatgactgagtgcccctctggccaactcaccctctatgagttccgccagttcttcggcctcaagaacctgagcccgtcggccagccagtacgtggaacagatgtttgagacttttgacttcaacaaggacggctacattgatttcatggagtacgtggcagcgctcagcttggtcctcaaggggaaggtggaacagaagctccgctggtacttcaagctctatgatgtagatggcaacggctgcattgaccgcgatgagctgctcaccatcatccagtttcctcatcaataccaaaagacggccattcgcgccattaacccctgcagcgataccaccatgactgcagaggagttcaccgatacagtgttctccaagattgacgtcaacggggatggggaactctccctggaagagtttatagagggcgtccagaaggaccagatgctcctggacacactgacacgaagcctggaccttacccgcatcgtgcgcaggctccagaatggcgagcaagacgaggagggggctgacgaggccgctgaggcagccggctgagtgcaccgcccggctgcttctgcactagcgggtggggtggtatggtggtgcctgttggtggtgttcttgtcttaaccctagatagaatctaatgaactcagaggcttagctcgcctctttagggtccatggtggcagcagagaggcagaagtgggagtccagagccaggaacagtgaaggatggttcctggcccctctgagtgacagctggtggcagcactccttgctggggggcactgttcaacatccctctgccgtcgggtgaccccctagcccttctgactcctctcccagcttttcccagctttccccactgagcttctccagtccatgctcttctggacgtggactctctgaggcagaactgagcttttccaggcctcttatggaatcctgcagatccagtggctgcagcttcaatcccagtgctgcaatcacacatccattctgccctgggggaccctggagcctacttgtgcgctttgcatttcattgattgacgcctcccttcaacaagcatttactgagcgcctactatgtactaatgctagatgttagatgtacaaagaagacagttttcatcctctaggaactcataggctaatggtgagacacacagacaaacatcattataataaaatatgctaag

SEQ ID NO: 13148 - DNA, 2233 bp, Homo sapiens
  source 1..2233: mol_type = unassigned DNA
acctcaccatcaagaaaggccctggtccaggatgtgcaaggtgtgatgaaatcacagggctggggaaggtcagctcggggtcacaagaagcctgatgggcaggaaagagcatgaaagccccagccagcctcacatgtgcggctgggaggactcacagaaaccctctgtacccagtcatgggccaaagacaccgtcatgcaagggggtgaaggctccacactcgtcccggccccgggcgtggaagcaggacctcgagcagtctctggcagcagcctatgtgccggtcgttgtggactctaaggggcagaatccggacaagctcaggttcaatttctacacctcccagtactccaactccctgaaccccttctacactttgcagaagcctacctgtggctacctgtaccgccgggacactgaccacacccgcaagcgctttgatgtgcctcctgccaacttggtcttgtggcgctcctaggcctgagccaaacggaagcccccgacccttcaccctcacccctgtgacctcaggtccccaaggggaagggctgctcactgcaggaggagtgacctatattcgggctaagacagctgtgccatgcccacctattgacaatgataaagggaggtctctcttctcagcagcagttaaagtttgtccttcctttccctggcatctgaatgggtggctgtggggtacagtctcccctggggctgcaaggatttagtggagactcttaacaccagttctctggcatctgtgagtttgagtgtgggccatcatcttcttccttctgctctctccctctccacatttcccggtaccatctgatccatcaggcccttctttgctcaggcctgaaggactcaggcctgtgagagaggacggccccgttgtcggccaagacacctttgggcgaggagcagcgaacagggcctgtccatctcagacgtcagccccctgaaggcctgagcaatgggcaacgtgatggagggaaagtcagtggaggagctgagcagcaccgagtgccaccagtggtacaagaagttcatgactgagtgcccctctggccaactcaccctctatgagttccgccagttcttcggcctcaagaacctgagcccgtcggccagccagtacgtggaacagatgtttgagacttttgacttcaacaaggacggctacattgatttcatggagtacgtggcagcgctcagcttggtcctcaaggggaaggtggaacagaagctccgctggtacttcaagctctatgatgtagatggcaacggctgcattgaccgcgatgagctgctcaccatcatccaggccattcgcgccattaacccctgcagcgataccaccatgactgcagaggagttcaccgatacagtgttctccaagattgacgtcaacggggatggggaactctccctggaagagtttatagagggcgtccagaaggaccagatgctcctggacacactgacacgaagcctggaccttacccgcatcgtgcgcaggctccagaatggcgagcaagacgaggagggggctgacgaggccgctgaggcagccggctgagtgcaccgcccggctgcttctgcactagcgggtggggtggtatggtggtgcctgttggtggtgttcttgtcttaaccctagatagaatctaatgaactcagaggcttagctcgcctctttagggtccatggtggcagcagagaggcagaagtgggagtccagagccaggaacagtgaaggatggttcctggcccctctgagtgacagctggtggcagcactccttgctggggggcactgttcaacatccctctgccgtcgggtgaccccctagcccttctgactcctctcccagcttttcccagctttccccactgagcttctccagtccatgctcttctggacgtggactctctgaggcagaactgagcttttccaggcctcttatggaatcctgcagatccagtggctgcagcttcaatcccagtgctgcaatcacacatccattctgccctgggggaccctggagcctacttgtgcgctttgcatttcattgattgacgcctcccttcaacaagcatttactgagcgcctactatgtactaatgctagatgttagatgtacaaagaagacagttttcatcctctaggaactcataggctaatggtgagacacacagacaaacatcattataataaaatatgctaagag

SEQ ID NO: 13149 - DNA, 801 bp, Homo sapiens
  source 1..801: mol_type = unassigned DNA
agtatcctgccaagagtcctccctgaccaccagaagttccacctcaccatcaagaaaggccctggtccaggatgtgcaaggactcacagaaaccctctgtacccagtcatgggccaaagacaccgtcatgcaagggggtgaaggctccacactcgtcccggccccgggcgtggaagcaggacctcgagcagtctctggcagcagcctatgtgccggtcgttgtggactctaaggggcagaatccggacaagctcagggtacagtctcccctggggctgcaaggatttagtggagactcttaacaccagttctctggcatctgtgagtttgagtgtgggccatcatcttcttccttctgctctctccctctccacatttcccggtaccatctgatccatcaggcccttctttgctcaggcctgaaggactcaggcctgtgagagaggacggccccgttgtcggccaagacacctttgggcgaggagcagcgaacagggcctgtccatctcagacgtcagccccctgaaggcctgagcaatgggcaacgtgatggagggaaagtcagtggaggagctgagcagcaccgagtgccaccagtggtacaagaagttcatgactgagtgcccctctggccaactcaccctctatgagttccgccagttcttcggcctcaagaacctgagcccgtcggccagccagtacgtggaacagatgtttgagacttttgacttcaacaaggacggctacattgatttcatggagtacgtggcagcgctcagcttggtcctcaaggggaaggtg

SEQ ID NO: 13150 - DNA, 1075 bp, Homo sapiens
  source 1..1075: mol_type = unassigned DNA
agtatcctgccaagagtcctccctgaccaccagaagttccacctcaccatcaagaaaggccctggtccaggatgtgcaaggtgtgatgaaatcacagggctggggaaggtcagctcggggtcacaagaagcctgatgggcaggaaagagcatgaaagccccagccagcctcacatgtgcggctgggagggtacagtctcccctggggctgcaaggatttagtggagactcttaacaccagttctctggcatctgtgagtttgagtgtgggccatcatcttcttccttctgctctctccctctccacatttcccggtaccatctgatccatcaggcccttctttgctcaggcctgaaggactcaggcctgtgagagaggacggccccgttgtcggccaagacacctttgggcgaggagcagcgaacagggcctgtccatctcagacgtcagccccctgaaggcctgagcaatgggcaacgtgatggagggaaagtcagtggaggagctgagcagcaccgagtgccaccagtggtacaagaagttcatgactgagtgcccctctggccaactcaccctctatgagttccgccagttcttcggcctcaagaacctgagcccgtcggccagccagtacgtggaacagatgtttgagacttttgacttcaacaaggacggctacattgatttcatggagtacgtggcagcgctcagcttggtcctcaaggggaaggtggaacagaagctccgctggtacttcaagctctatgatgtagatggcaacggctgcattgaccgcgatgagctgctcaccatcatccaggccattcgcgccattaacccctgcagcgataccaccatgactgcagaggagttcaccgatacagtgttctccaagattgacgtcaacggggatggggaactctccctggaagagtttatagagggcgtccagaaggaccagatgctcctggacacactgacacgaagcctggaccttacccgcatcgtgcgcaggctccagaatggcgagcaagacgaggagggggctgacgaggccgctgaggcagccggctga

SEQ ID NO: 13151 - DNA, 1113 bp, Homo sapiens
  source 1..1113: mol_type = unassigned DNA
ggaaagggaggaagagggccctagttggagagatccatcagcagaagccagggaggagatacagacccttgctccctgatgctcctcagggctagcatggggcaggagtttagctgggaggaggcggaggcagctggcgagatagatgtggcggagctccaggagtggtacaagaagtttgtgatggagtgccccagcggcacactctttatgcatgagtttaagcgcttcttcaaggtcacagacgatgaggaggcctcccagtatgtagagggcatgttccgagccttcgacaagaatggggacaacaccatcgacttcctggagtacgtggcagctctgaatctcgtgctgaggggcaccctggagcacaagctgaagtggacattcaagatctatgataaggatggcaatggctgcatcgaccgcctggagctactcaacattgtggagggaatttaccagctgaagaaagcctgccggcgagagctacaaactgagcaaggccagctgctcacacccgaggaggtcgtggacaggatcttcctcctggtggatgagaatggagatggccagctgtctctgaacgagtttgttgaaggtgcccgtcgggacaagtgggtgatgaagatgctgcagatggacatgaatcccagcagctggctcgctcagcagagacggaaaagtgccatgttctgaggagtctggggcccctccacgactccaggctcacccaggtttccagggtagtaggagggtccctggctcagcctgctcatgcccactcttcccctggtgttgacttcctggcaccccctgtgcagggctgagtggggatggggaagggctgctgggtttgaagtggccaacagggcatagtccattttggaggagtccctgggatggtgaagggaattcagttacttttcctgttcagccgctcctgggaggactgtgccttggctgggtggttgtggggctcccacagtttctgggtgttctcagttggaagcaagagccaactgaggggtgagggtcccacagaccaaatcagaaatgagaacacaaagactggtaggaggcaggggtgggagggtgttgagactgaagaaa

SEQ ID NO: 13152 - DNA, 652 bp, Homo sapiens
  source 1..652: mol_type = unassigned DNA
agtcacccaggagatgatggagaggctgatcaggcctcctggaaagggaggaagagggccctagttggagagatccatcagcagaagccagggaggagatacagacccttgctccctgatgctcctcagggctagcatggggcaggagtttagctgggaggaggcggaggcagctggcgagatagatgtggcggagctccaggagtggtacaagaagtttgtgatggagtgccccagcggcacactctttatgcatgagtttaagcgcttcttcaaggtcacagacgatgaggaggcctcccagtatgtagagggcatgttccgagccttcgacaagaatggggacaacaccatcgacttcctggagtacgtggcagctctgaatctcgtgctgaggggcaccctggagcacaagctgaagtggacattcaagatctatgataaggatggcaatggctgcatcgaccgcctggagctactcaacattgtggagtgccggcgagagctacaaactgagcaaggccagctgctcacacccgaggaggtcgtggacaggatcttcctcctggtggatgagaatggagatggccagctgtctctgaacgagtttgttgaaggtgcccgtcgggacaacctgctcatgcccactctt

SEQ ID NO: 13153 - DNA, 982 bp, Homo sapiens
  source 1..982: mol_type = unassigned DNA
ttgctgtaagaggtttagagtagctttctgagggcatatgttagccttcagttttagtgaggagtaagggactaaatccagcaaaaacttaagtgaaaacaacctgaggaaaagctgtagactgtgagtcaagatggggaatggcaaatctatagctggtgatcagaaagcagttcctacacaagagacccatgtgtggtacagaacatttatgatggaatatccatccggcctgcaaacactacatgaatttaagacacttttgggtctgcaaggtctgaatcagaaggccaataaacatattgatcaagtttataatacctttgacacgaacaaggatggatttgttgactttttggagtttattgctgctgtaaatctaatcatgcaagaaaaaatggagcaaaaattaaaatggtattttaagctgtatgatgctgatggaaatggttctattgacaaaaatgaactactggacatgttcatggcggtacaagccctcaatggccagcaaactctgagtcctgaagaattcatcaacttggtgttccataagatcgatataaacaatgatggggaattgactttagaagaatttatcaatggcatggcaaaagatcaggatctcctggagattgtttacaagagcttcgacttctccaatgtgctgagagtaatctgtaatgggaagcagccagacatggagacagactcctccaaatctcctgacaaggctggtctagggaaggtgaaaatgaagtagctgtgagaatacctgtcccagctatcaatgagcacaacatttcagtagagaagaaatagaatcttccccatgtacatgctgttgatttcaggtctttgttataattcatataggcttgtgaatatagcacttattttaatccagtagagacttgcataaagatcctaaacagatgcattgttgcttttctgtgctgtctctgcagattaaaacataatg

SEQ ID NO: 13154 - DNA, 900 bp, Homo sapiens
  source 1..900: mol_type = unassigned DNA
atggggaatggcaaatctatagctggtgatcagaaagcagttcctacacaagagacccatgtgtggtacagaacatttatgatggaatatccatccggcctgcaaacactacatgaatttaagacacttttgggtctgcaaggtctgaatcagaaggccaataaacatattgatcaagtttataatacctttgacacgaacaaggatggatttgttgactttttggagtttattgctgctgtaaatctaatcatgcaagaaaaaatggagcaaaaattaaaatggtattttaagctgtatgatgctgatggaaatggttctattgacaaaaatgaactactggacatgttcatggcggtacaagccctcaatggccagcaaactctgagtcctgaagaattcatcaacttggtgttccataagatcgatataaacaatgatggtaatggagctactctctactggatcacttttcctacaaagggaattgactttagaagaatttatcaatggcatggcaaaagatcaggatctcctggagattgtttacaagagcttcgacttctccaatgtgctgagagtaatctgtaatgggaagcagccagacatggagacagactcctccaaatctcctgacaaggctggtctagggaaggtgaaaatgaagtagctgtgagaatacctgtcccagctatcaatgagcacaacatttcagtagagaagaaatagaatcttccccatgtacatgctgttgatttcaggtctttgttataattcatataggcttgtgaatatagcacttattttaatccagtagagacttgcataaagatcctaaacagatgcattgttgcttttctgtgctgtctctgcagattaaaacataatgattacactaaa

SEQ ID NO: 13155 - DNA, 569 bp, Homo sapiens
  source 1..569: mol_type = unassigned DNA
gctgccatgaatgccttcctgctctccgcactgtgcctccttggggcctgggccgccttggcaggaggggtcaccgtgcaggatggaaatttctccttttctctggagtcagtgaagaagctcaaagacctccaggagccccaggagcccagggttgggaaactcaggaactttgcacccatccctggtgaacctgtggttcccatcctctgtagcaacccgaactttccagaagaactcaagcctctctgcaaggagcccaatgcccaggagatacttcagaggctggaggaaatcgctgaggacccgggcacatgtgaaatctgtgcctacgctgcctgtaccggatgctaggggggcttgcccactgcctgcctcccctccgcagcagggaagctcttttctcctgcagaaagggccacccatgatactccactcccagcagctcaacctaccctggtccagtcgggaggagcagcccggggaggaactgggtgactggaggcctcgccccaacactgtccttccctgccacttcaacccccagctaataaaccagattccagagt

SEQ ID NO: 13156 - DNA, 597 bp, Homo sapiens
  source 1..597: mol_type = unassigned DNA
gacagcggcagggggaacccagggagcgcgatgggctgcagggctgcatcagggctcctgccaggagtggccgtggtcctcctgctgctgctgcagagcacacagtcagtctacatccagtaccaaggcttccgggtccagctggaatccatgaagaagctgagtgacctggaggcacagtgggcacccagcccccgcctgcaggcccagagcctcctgcccgccgtgtgccaccaccctgctctgcctcaggaccttcagcctgtctgcgcctcgcaggaggcttccagcatcttcaagaccctgaggaccatcgctaacgacgactgtgagctgtgtgtgaacgttgcgtgtaccggctgcctctgagatagccctgggtaccctgagcccaccagggacacctcgcccttcagcccaccaccctggcaggcttccatccccgtccatgctcaagatgggtccctggccaccatggtcatcaccacccttccagggcctgagcagctggatctggtacaaagcaatcggacatagagttggagggggaggcccctgaggcagcccagctcctgaataaagattctacaacacacg

SEQ ID NO: 13157 - DNA, 1084 bp, Homo sapiens
  source 1..1084: mol_type = unassigned DNA
gaggtggccccggatgctgcggcgcccgctggccgggctggctgcggccgccctgggccgggccccaccggacggcttgctctgctctttacctggggttgctgtcgaggaccctgtgcaagactcggccggtttttctttctccctgatggacagacccaaacatagccgcgcagcatcgtgaagggctggggccttcactcctctgtggctctggaagagcccgatttcctcaggaggcatgtcgggccccaggcctgtggtgctgagcgggccttcgggagctgggaagagcaccctgctgaagaggctgctccaggagcacagcggcatctttggcttcagcgtgtcccataccacgaggaacccgaggcccggcgaggagaacggcaaagattactactttgtaaccagggaggtgatgcagcgtgacatagcagccggcgacttcatcgagcatgccgagttctcggggaacctgtatggcacgagcaaggtggcggtgcaggccgtgcaggccatgaaccgcatctgtgtgctggacgtggacctgcagggtgtgcggaacatcaaggccaccgatctgcggcccatctacatctctgtgcagccgccttcactgcacgtgctggagcagcggctgcggcagcgcaacactgaaaccgaggagagcctggtgaagcggctggctgctgcccaggccgacatggagagcagcaaggagcccggcctgtttgatgtggtcatcattaacgacagcctggaccaggcctacgcagagctgaaggaggcgctctctgaggaaatcaagaaagctcaaaggaccggcgcctgaggcttgctgtctgttctcggcaccccgggcccatacaggaccagggcagcagcattgagccacccccttggcaggcgatacggcagctctgtgcccttggccagcatgtggagtggaggagatgctgcccctgtggttggaacatcctggggtgacccccgacccagcctcgctgggctgtcccctgtccctatctctcactctggacccagggctgacatcctaataaaataactgttggattagaaa

SEQ ID NO: 13158 - DNA, 940 bp, Homo sapiens
  source 1..940: mol_type = unassigned DNA
cagcagatggggactagaggccgcactgctatccacagcctctcttctcacccccaggcatgtcgggccccaggcctgtggtgctgagcgggccttcgggagctgggaagagcaccctgctgaagaggctgctccaggagcacagcggcatctttggcttcagcgtgtcccataccacgaggaacccgaggcccggcgaggagaacggcaaagattactactttgtaaccagggaggtgatgcagcgtgacatagcagccggcgacttcatcgagcatgccgagttctcggggaacctgtatggcacgagcaaggtggcggtgcaggccgtgcaggccatgaaccgcatctgtgtgctggacgtggacctgcagggtgtgcggaacatcaaggccaccgatctgcggcccatctacatctctgtgcagccgccttcactgcacgtgctggagcagcggctgcggcagcgcaacactgaaaccgaggagagcctggtgaagcggctggctgctgcccaggccgacatggagagcagcaaggagcccggcctgtttgatgtggtcatcattaacgacagcctggaccaggcctacgcagagctgaaggaggcgctctctgaggaaatcaagaaagctcaaaggaccggcgcctgaggcttgctgtctgttctcggcaccccgggcccatacaggaccagggcagcagcattgagccacccccttggcaggcgatacggcagctctgtgcccttggccagcatgtggagtggaggagatgctgcccctgtggttggaacatcctggggtgacccccgacccagcctcgctgggctgtcccctgtccctatctctcactctggacccagggctgacatcctaataaaataactgttggattagaaactccataaatgagtggaatgtggccccaaggttggtgg

SEQ ID NO: 13159 - DNA, 1275 bp, Homo sapiens
  source 1..1275: mol_type = unassigned DNA
cgcctcgcctgagttgtgtccaaggtgtgcgtgtggccaggggtccatccgcttccctctagcccagcccctgaacacagctgcagtgcacggccccactcctcagctctgctccccatcccaactcgaagacgctgccctggccctgtgtgtgcagctcatgtggactgggagggcagggcaggtgcaggtcttggggcaagagctggagctgtcttttccttcctgcacagccgcagagcaggtggatggggctgcttccctgcaagggcccagggccaggccccctggggatttattcgtggcttagaagggtggggccagaagcaggcgtagtggggattagggactcagcacccccagctctcagtccagcagacagacccaccccaggctgactacagaggctgcacctcagcaaacaggcatgtcgggccccaggcctgtggtgctgagcgggccttcgggagctgggaagagcaccctgctgaagaggctgctccaggagcacagcggcatctttggcttcagcgtgtcccataccacgaggaacccgaggcccggcgaggagaacggcaaagattactactttgtaaccagggaggtgatgcagcgtgacatagcagccggcgacttcatcgagcatgccgagttctcggggaacctgtatggcacgagcaaggtggcggtgcaggccgtgcaggccatgaaccgcatctgtgtgctggacgtggacctgcagggtgtgcggaacatcaaggccaccgatctgcggcccatctacatctctgtgcagccgccttcactgcacgtgctggagcagcggctgcggcagcgcaacactgaaaccgaggagagcctggtgaagcggctggctgctgcccaggccgacatggagagcagcaaggagcccggcctgtttgatgtggtcatcattaacgacagcctggaccaggcctacgcagagctgaaggaggcgctctctgaggaaatcaagaaagctcaaaggaccggcgcctgaggcttgctgtctgttctcggcaccccgggcccatacaggaccagggcagcagcattgagccacccccttggcaggcgatacggcagctctgtgcccttggccagcatgtggagtggaggagatgctgcccctgtggttggaacatcctggggtgacccccgacccagcctcgctgggctgtcccctgtccctatctctcactctggacccagggctgacatcctaataaaataactgttggattagaaactcca

SEQ ID NO: 13160 - DNA, 689 bp, Homo sapiens
  source 1..689: mol_type = unassigned DNA
tgcggccgccctgggccgggccccaccggacggcatgtcgggccccaggcctgtggtgctgagcgggccttcgggagctgggaagagcaccctgctgaagaggctgctccaggagcacagcggcatctttggcttcagcgtgtcccgtgagtccagggctctcgtggagggataccacgaggaacccgaggcccggcgaggagaacggcaaagggaggtgatgcagcgtgacatagcagccggcgacttcatcgagcatgccgagttctcggggaacctgtatggcacgagcaaggtggcggtgcaggccgtgcaggccatgaaccgcatctgtgtgctggacgtggacctgcagggtgtgcggaacatcaaggccaccgatctgcggcccatctacatctctgtgcagccgccttcactgcacgtgctggagcagcggctgcggcagcgcaacactgaaaccgaggagagcctggtgaagcggctggctgctgcccaggccgacatggagagcagcaaggagcccggcctgtttgatgtggtcatcattaacgacagcctggaccaggcctacgcagagctgaaggaggcgctctctgaggaaatcaagaaagctcaaaggaccggcgcctgaggcttgctgtctgttctcggcaccccgggcccatacaggaccagggcagcagcat

SEQ ID NO: 13161 - DNA, 850 bp, Homo sapiens
  source 1..850: mol_type = unassigned DNA
gctggccgggctggctgcggccgccctgggccgggccccaccggacgcctctcttctcacccccaggcatgtcgggccccaggcctgtggtgctgagcgggccttcgggagctgggaagagcaccctgctgaagaggctgctccaggagcacagcggcatctttggcttcagcgtgtcccataccacgaggaacccgaggcccggcgaggagaacggcaaagattactactttgtaaccagggaggtgatgcagcgtgacatagcagccggcgacttcatcgagcatgccgagttctcggggaacctgtatggcacgagcaaggtggcggtgcaggccgtgcaggccatgaaccgcatctgtgtgctggacgtggacctgcagggtgtgcggaacatcaaggccaccgatctgcggcccatctacatctctgtgcagccgccttcactgcacgtgctgcggctgcggcagcgcaacactgaaaccgaggagagcctggtgaagcggctggctgctgcccaggccgacatggagagcagcaaggagcccggcctgtttgatgtggtcatcattaacgacagcctggaccaggcctacgcagagctgaaggaggcgctctctgaggtgggcccatccttgtgcctacctgggcaaggcccaaggggaggcctgggggccaggcctttgttgtccatgaggccactgaggaaatcaagaaagctcaaaggaccggcgcctgaggcttgctgtctgttctcggcaccccgggcccatacaggaccagggcagcagcattgagccacccccttggcaggcgatacggcagctctgtgcccttggccagcatgtgg

SEQ ID NO: 13162 - DNA, 844 bp, Homo sapiens
  source 1..844: mol_type = unassigned DNA
gatgctgcggcgcccgctggccgggctggctgcggccgccctgggccgggccccaccggacggcatgtcgggccccaggcctgtggtgctgagcgggccttcgggagctgggaagagcaccctgctgaagaggctgctccaggagcacagcggcatctttggcttcagcgtgtcccataccacgaggaacccgaggcccggcgaggagaacggcaaagattactactttgtaaccagggaggtgatgcagcgtgacatagcagccggcgacttcatcgagcatgccgagttctcggggaacctgtatggcacgagcaaggtggcggtgcaggccgtgcaggccatgaaccgcatctgtgtgctggacgtggacctgcagggtgtgcggaacatcaaggccaccgatctgcggcccatctacatctctgtgcagccgccttcactgcacgtgctggagcagcggctgcggcagcgcaacactgaaaccgaggagagcctggtgaagcggctggctgctgcccaggccgacatggagagcagcccggctgggctggaaagctgtcccacagccgcagtgaggacagccgcaggccagagcccggcctgtttgatgtggtcatcattaacgacagcctggaccaggcctacgcagagctgaaggaggcgctctctgaggaaatcaagaaagctcaaaggaccggcgcctgaggcttgctgtctgttctcggcaccccgggcccatacaggaccagggcagcagcattgagccacccccttggcaggcgatacggcagctctgtgcccttggccagcatgtggagtggaggagatgctgcccctgtgg

SEQ ID NO: 13163 - DNA, 873 bp, Homo sapiens
  source 1..873: mol_type = unassigned DNA
agaggtggccccggatgctgcggcgcccgctggccgggctggctgcggccgccctgggccgggccccaccggacgcctctcttctcacccccaggcatgtcgggccccaggcctgtggtgctgagcgggccttcgggagctgggaagagcaccctgctgaagaggctgctccaggagcacagcggcatctttggcttcagcgtgtcccataccacgaggaacccgaggcccggcgaggagaacggcaaagattactactttgtaaccagggaggtgatgcagcgtgacatagcagccggcgacttcatcgagcatgccgagttctcggggaacctgtatggcacgagcaaggtggcggtgcaggccgtgcaggccatgaaccgcatctgtgtgctggacgtggacctgcagggtgtgcggaacatcaaggccaccgatctgcggcccatctacatctctgtgcagccgccttcactgcacgtgctggagcagcggctgcggcagcgcaacactgaaaccgaggagagcctggtgaagcggctggctgctgcccaggccgacatggagagcagcaaggagcccggcctgtttgatgtggtcatcattaacgacagcctggaccaggcctacgcagagctgaaggaggcgctctctgaggaaatcaagaaagctcaaaggaccggcgcctgaggcttgctgtctgttctcggcaccccgggcccatacaggaccagggcagcagcattgagccacccccttggcaggcgatacggcagctctgtgcccttggccagcatgtggagtggaggagatgctgcccctgtggttggaacatcctggggtgacccccgacccagcctcgctgggctgtcc

SEQ ID NO: 13164 - DNA, 842 bp, Homo sapiens
  source 1..842: mol_type = unassigned DNA
gaggtggccccggatgctgcggcgcccgctggccgggctggctgcggccgccctgggccgggccccaccggacggcatgtcgggccccaggcctgtggtgctgagcgggccttcgggagctgggaagagcaccctgctgaagaggctgctccaggagcacagcggcatctttggcttcagcgtgtcccataccacgaggaacccgaggcccggcgaggagaacggcaaagattactactttgtaaccagggaggtgatgcagcgtgacatagcagccggcgacttcatcgagcatgccgagttctcggggaacctgtatggcacgagcaaggtggcggtgcaggccgtgcaggccatgaaccgcatctgtgtgctggacgtggacctgcagggtgtgcggaacatcaaggccaccgatctgcggcccatctacatctctgtgcagccgccttcactgcacgtgctggagcagcggctgcggcagcgcaacactgaaaccgaggagagcctggtgaagcggctggctgctgcccaggccgacatggagagcagaaatcaagaaagctcaaaggaccggcgcctgaggcttgctgtctgttctcggcaccccgggcccatacaggaccagggcagcagcattgagccacccccttggcaggcgatacggcagctctgtgcccttggccagcatgtggagtggaggagatgctgcccctgtggttggaacatcctggggtgacccccgacccagcctcgctgggctgtcccctgtccctatctctcactctggacccagggctgacatcctaataaaataactgttggattagaaactccataaa

SEQ ID NO: 13165 - DNA, 937 bp, Homo sapiens
  source 1..937: mol_type = unassigned DNA
cttctctgagtgacaagcgggacaagtacgccgtgggcggggccggcgggtcgtgatgttagttcgcgctgtgtggaggcgggccggcgtggcgctgtgacgcagcgggagaagacgggctgggagggcgctgtgctgaacgcccctgcggtcgcgacaggccagcgcaggtggaggcggggctagcgaggcactgaggcatgtcgggccccaggcctgtggtgctgagcgggccttcgggagctgggaagagcaccctgctgaagaggctgctccaggagcacagcggcatctttggcttcagcgtgtcccataccacgaggaacccgaggcccggcgaggagaacggcaaagattactactttgtaaccagggaggtgatgcagcgtgacatagcagccggcgacttcatcgagcatgccgagttctcggggaacctgtatggcacgagcaaggtggcggtgcaggccgtgcaggccatgaaccgcatctgtgtgctggacgtggacctgcagggtgtgcggaacatcaaggccaccgatctgcggcccatctacatctctgtgcagccgccttcactgcacgtgctggagcagcggctgcggcagcgcaacactgaaaccgaggagagcctggtgaagcggctggctgctgcccaggccgacatggagagcagcaaggagcccggcctgtttgatgtggtcatcattaacgacagcctggaccaggcctacgcagagctgaaggaggcgctctctgaggaaatcaagaaagctcaaaggaccggcgcctgaggcttgctgtctgttctcggcaccccgggcccatacaggaccagggcagcagcattgagccacccccttggcaggcgatacggcagctctgtgcccttggccagcatgtggagtggaggagatgctgcccctgtggttggaac

SEQ ID NO: 13166 - DNA, 990 bp, Homo sapiens
  source 1..990: mol_type = unassigned DNA
agtctcgcgcgcgggcggaggtgggccggtgcggcgctgtcacgtaggttcagtgggcggaagaggtggccccggatgctgcggcgcccgctggccgggctggctgcggccgccctgggccgggccccaccggacggcatgtcgggccccaggcctgtggtgctgagcgggccttcgggagctgggaagagcaccctgctgaagaggctgctccaggagcacagcggcatctttggcttcagcgtgtcccataccacgaggaacccgaggcccggcgaggagaacggcaaagattactactttgtaaccagggaggtgatgcagcgtgacatagcagccggcgacttcatcgagcatgccgagttctcggggaacctgtatggcacgagcaaggtggcggtgcaggccgtgcaggccatgaaccgcatctgtgtgctggacgtggacctgcagggtgtgcggaacatcaaggccaccgatctgcggcccatctacatctctgtgcagccgccttcactgcacgtgctggagcagcggctgcggcagcgcaacactgaaaccgaggagagcctggtgaagcggctggctgctgcccaggccgacatggagagcagcaaggagcccggcctgtttgatgtggtcatcattaacgacagcctggaccaggcctacgcagagctgaaggaggcgctctctgaggaaatcaagaaagctcaaaggaccggcgcctgaggcttgctgtctgttctcggcaccccgggcccatacaggaccagggcagcagcattgagccacccccttggcaggcgatacggcagctctgtgcccttggccagcatgtggagtggaggagatgctgcccctgtggttggaacatcctggggtgacccccgacccagcctcgctgggctgtcccctgtccctatctctcactctggacccagggctgacatcctaataaaataactgttggattagaaactccataaa

SEQ ID NO: 13167 - DNA, 1012 bp, Homo sapiens
  source 1..1012: mol_type = unassigned DNA
tgaaggccaggatgcgtgctacccggatgtgtgcccagaaaccctgcagccaagagcagccgcctggaccaccagcctccccttcatccacctggcccagcccagagcccaggcccacgtctggtggtttgtgtcttacgagaggccaggcgggggctgaattctctcggttctcagaaggtcaagccctctgttagcatctcctcgaacagtgggccgggggcaaggtggtgactctgttcagtccttaggatggctggaagccagaaggaggagattatgccgccacagcagggagtgcctttccaggaaagcggctgctggggcagcatgggagcccagtccagggagcgttctggcagagaccattccggaacatggatctgcgccggcggctcccaggagaccttccatctcggagctcctgtggagaccacgtgcctggcaggcatgtcgggccccaggcctgtggtgctgagcgggccttcgggagctgggaagagcaccctgctgaagaggctgctccaggagcacagcggcatctttggcttcagcgtgtcccataccacgaggaacccgaggcccggcgaggagaacggcaaagattactactttgtaaccagggaggtgatgcagcgtgacatagcagccggcgacttcatcgagcatgccgagttctcggggaacctgtatggcacgagcaaggtggcggtgcaggccgtgcaggccatgaaccgcatctgtgtgctggacgtggacctgcagggtgtgcggaacatcaaggccaccgatctgcggcccatctacatctctgtgcagccgccttcactgcacgtgctggagcagcggctgcggcagcgcaacactgaaaccgaggagagcctggtgaagcggctggctgctgcccaggccgacatggagagcagcaaggagcccggcctgtttgatgtggtcatcattaacgacagcctggaccaggcctacgcagagctgaaggaggcgctctctgagg

SEQ ID NO: 13168 - DNA, 760 bp, Homo sapiens
  source 1..760: mol_type = unassigned DNA
atgtcgggccccaggcctgtggtgctgagcgggccttcgggagctgggaagagcaccctgctgaagaggctgctccaggagcacagcggcatctttggcttcagcgtgtcccgtgagtccaataccacgaggaacccgaggcccggcgaggagaacggcaaagattactactttgtaaccagggaggtgatgcagcgtgacatagcagccggcgacttcatcgagcatgccgagttctcggggaacctgtatggcacgagcaaggtggcggtgcaggccgtgcaggccatgaaccgcatctgtgtgctggacgtggacctgcagggtgtgcggaacatcaaggccaccgatctgcggcccatctacatctctgtgcagccgccttcactgcacgtgctggagcagcggctgcggcagcgcaacactgaaaccgaggagagcctggtgaagcggctggctgctgcccaggccgacatggagagcgaaatcaagaaagctcaaaggaccggcgcctgaggcttgctgtctgttctcggcaccccgggcccatacaggaccagggcagcagcattgagccacccccttggcaggcgatacggcagctctgtgcccttggccagcatgtggagtggaggagatgctgcccctgtggttggaacatcctggggtgacccccgacccagcctcgctgggctgtcccctgtccctatctctcactctggacccagggctgacatcctaataaaataactgttggatt

SEQ ID NO: 13169 - DNA, 865 bp, Homo sapiens
  source 1..865: mol_type = unassigned DNA
ctggccgggctggctgcggccgccctgggccgggccccaccggacggatggctggaagccagaaggaggagattatgccgccacagcagggagtgcctttccaggaaagcggctgctggggcagcatgggagcccagtccagggagcgttctggcagagaccattccggaacatggatctgcgccggcggctcccaggagaccttccatctcggagctcctgtggagaccacgtgcctggcagcctctcttctcacccccaggcatgtcgggccccaggcctgtggtgctgagcgggccttcgggagctgggaagagcaccctgctgaagaggctgctccaggagcacagcggcatctttggcttcagcgtgtcccataccacgaggaacccgaggcccggcgaggagaacggcaaagggaggtgatgcagcgtgacatagcagccggcgacttcatcgagcatgccgagttctcggggaacctgtatggcacgagcaaggtggcggtgcaggccgtgcaggccatgaaccgcatctgtgtgctggacgtggacctgcagggtgtgcggaacatcaaggccaccgatctgcggcccatctacatctctgtgcagccgccttcactgcacgtgctggagcagcggctgcggcagcgcaacactgaaaccgaggagagcctggtgaagcggctggctgctgcccaggccgacatggagagcagaaatcaagaaagctcaaaggaccggcgcctgaggcttgctgtctgttctcggcaccccgggcccatacaggaccagggcagcagcattgagccacccccttggcaggcgatacggcagctctgtgcccttggccagcatgtgga

SEQ ID NO: 13170 - DNA, 656 bp, Homo sapiens
  source 1..656: mol_type = unassigned DNA
cccggatgctgcggcgcccgctggccgggctggctgcggccgccctgggccgggccccaccggacggcatgtcgggccccaggcctgtggtgctgagcgggccttcgggagctgggaagagcaccctgctgaagaggctgctccaggagcacagcggcatctttggcttcagcgtgtcccataccacgaggaacccgaggcccggcgaggagaacggcaaagattactactttgtaaccagggaggtgatgcagcgtgacatagcagccggcgacttcatcgagcatgccgagttctcggggaacctgtatggcacgagcaaggtggcggtgcaggccgtgcaggccatgaaccgcatctgtgtgctggacgtggacctgcagggtgtgcggaacatcaaggccaccgatctgcggcccatctacatctctgtgcagccgccttcactgcacgtgctggagcagcggctgcggcagcgcaacactgaaaccgaggagagcctggtgaagcggctggctgctgcccaggccgacatggagagcagcaaggagcccggcctgtttgatgtggtcatcattaacgacagcctggaccaggcctacgcagagctgaaggaggcgctctctgaggaaatcaagaaagctcaaaggaccggc

SEQ ID NO: 13171 - DNA, 3342 bp, Homo sapiens
  source 1..3342: mol_type = unassigned DNA
aaaggaaggggcggcgtccacatggttacccttctgctgcgcgggtcaagtagcttcttctggagggcgcaaggcgcggcgggggtgatgagcccttgggttctcgctccgactgctaaattcgcttggccgggtccaccttctcgtggcctcactcgccacacggatcagaatccggagcaggcagttctctctattctgaggctcctgcggctgccgcgctgacttccctgtgtgcgggagggaactctgggcaggctggttttcttggaatgtgtttacgatgttgaatgggacttgaacaggaagctggacgctgcagctggaactagcgtgccaagttatttatgattccatctgatatacataggagagaaactgatagaagaattctgatggcaactgtatgatagaagctatataaagtcaagtgtccattttctttcaactatatttgagcatacccaggatttaagtcgtggaactgaacatttatttggctgatcctcatcatgaaccgtgcttttagcaggaagaaagacaaaacatggatgcatacacctgaagctttatcaaaacatttcattccctataatgcaaagtttcttggcagtacagaagtggaacagccaaaaggaacagaagttgtgagagatgctgtaaggaaactaaagtttgcaagacatatcaagaaatctgaaggccagaaaattcctaaagtggagttgcaaatatcaatttatggagtaaaaattctagaacccaaaacaaaggaagttcaacacaattgccagcttcatagaatatctttttgtgcagatgataaaactgacaagaggatattcactttcatatgcaaagattctgagtcaaataaacatttgtgctatgtatttgacagcgaaaagtgtgctgaagagatcactttaacaattggccaagcatttgacctggcatacaggaaatttctagaatcaggaggaaaagatgttgaaacaagaaaacagatcgcagggttacaaaaaagaatccaagacttagaaacagaaaatatggaacttaaaaataaagtacaagatttggaaaaccaactgagaataactcaagtatcagcacctccagcaggcagtatgacacctaagtcgccctccactgacatctttgatatgattccattttctccaatatcacaccagtcttcgatgcctactcgcaatggcacacagccacctccagtacctagtagatctactgagattaaacgggacctgtttggagcagaaccttttgacccatttaactgtggagcagcagatttccctccagatattcaatcaaaattagatgagatgcaggaggggttcaaaatgggactaactcttgaaggcacagtattttgtctcgacccgttagacagtaggtgctgacatcaagaacaagaaatcctgattcatgttaaatgtgtttgtatacacatgtcatttattattattactttaagataggtattattcatgtgtcaatgtttttgaatattttaatattttgaaaattttctcagttaaatttcctcaccttcactattgatctgtaatttttattttaaaaacagcttactgtaaagtagatcatacttttatgttcctttctgtttctactgtagatgaatttgtaattgaaagacatattatacaaatacctgccttgtgtctgagttctatttagttagcatcttgaaatttgtattcattttccagatggctagtttattaatgatttcccaaaagccataccttaaagataactttttaaattctgaagagacatgccaatgtcaaactaaacatgttctgtttttaaaccaacaaacatgttactattcattggacagatatcattttatgtataaatactgttcacatcactgggaaaatgtaaactttaaacataatgccacaaggtcactaatttctagcaggtaaaattataaggatataaattccaataataaaccaaatgtatttagagtatttattagtaaatgcaaggtgatgttagttatgatcagttatactctaaatatttaatttgttttataaaggtagtgaaaaaatgaaaatttgctatttattaaaaaacattaaatttcattccaaatgagataagtgatattactataacatctaagcatcatctgatttgatattccctaaaaaacatttggaatatatgctatctatagattcagtatctactacccatatttactttaccaaatatatttctcctcactgcataaggactactcttctcatattttcttctttgatgaagatatttttcaccaaagtttattttgtgatgccctcttggttttgatactttaaaatctgtggcacccgttctacatgaattatcaatatttggtaaattcaatctgtatttgttttgttaaagtcaaaaatctcattttccaaaaaaaaaaaaaaaacccagttactgctcagtttagtcttgaacatgagcaataaaattctcttgcatttcattattgatgtgctgatgaacctggacttttaaaaatatttgtttcctatacctttaccctttacctaacagactaatttgtactcagtaaaacaaaaatttatggtcaaaatttctaacttggttcatcacattataagataaataaattaaattaatgaaaatgtgacttagagtaggggtagccctcaaaaatagatttatcatttactcattggaattttcttcaagtgttaaaggtacattttcactaggaaaagaaatcaaatatgcttatgcaatatatatttgtgtgtttttccttaatgttatatggtatatatgagccttcttgtttagtttcttttatctgctaagttgtaccttaattagagggcaatatatgtttcataaagaagagtctttataattttgtttgtcagatagtattttggaatttgtataataaggatgtttagaagccatataagtggctttttttaacagatagaatttgtatttttattgtactttaaaaagatttatgtaataggtatatatttagtggccatttattatcaatggtaacacaatggagtactaagatggtatttgcacatttaagatatgttactttaccaatttttaatggtaatcaactctgctactggcatgatgaaatagtacataactggtcattaattatgaacatttatttctccagtgcgtttttatgaagatctggttgaaaattgtatttctatgtaaactcaacgatatgtttggttttcctgaaaataaatgattttaaataaa

SEQ ID NO: 13172 - DNA, 3544 bp, Homo sapiens
  source 1..3544: mol_type = unassigned DNA
tggagggcgcaaggcgcggcgggggtgatgagcccttgggttctcgctccgactgctaaattcgcttggccgggtccaccttctcgtggcctcactcgccacacggatcagaatccggagcaggcagttctctctattctgaggctcctgcggctgccgcgctgacttccctgtgtgcgggagggaactctgggcaggctggttttcttggaatgtgtttacgatgttgaatgggacttgaacaggaagctggacgctgcagctggaactagcgtgccaaggtagagtaaggaagacttagctggtgttgggcttggcgggtccacttggtacgctgggcaaactccaacagcaagaattgaagacttaagggtttgagcagatggttttctacctaaattgaataattcaattacgtattctcagctagcatggatttgggtcatggaattaaagtagaaacgtatccggcatgacttctttgtgcttatcaaaagtgatcctgataaacagatcttgctctttcatgtaaagaagtaaaagttatttatgattccatctgatatacataggagagaaactgatagaagaattctgatggcaactgtatgatagaagctatataaagtcaagtgtccattttctttcaactatatttgagcatacccaggatttaagtcgtggaactgaacatttatttggctgatcctcatcatgaaccgtgcttttagcaggaagaaagacaaaacatggatgcatacacctgaagctttatcaaaacatttcattccctataatgcaaagtttcttggcagtacagaagtggaacagccaaaaggaacagaagttgtgagagatgctgtaaggaaactaaagtttgcaagacatatcaagaaatctgaaggccagaaaattcctaaagtggagttgcaaatatcaatttatggagtaaaaattctagaacccaaaacaaaggaagttcaacacaattgccagcttcatagaatatctttttgtgcagatgataaaactgacaagaggatattcactttcatatgcaaagattctgagtcaaataaacatttgtgctatgtatttgacagcgaaaagtgtgctgaagagatcactttaacaattggccaagcatttgacctggcatacaggaaatttctagaatcaggaggaaaagatgttgaaacaagaaaacagatcgcagggttacaaaaaagaatccaagacttagaaacagaaaatatggaacttaaaaataaagtacaagatttggaaaaccaactgagaataactcaagtatcagcacctccagcaggcagtatgacacctaagtcgccctccactgacatctttgatatgattccattttctccaatatcacaccagtcttcgatgcctactcgcaatggcacacagccacctccagtacctagtagatctactgagattaaacgggacctgtttggagcagaaccttttgacccatttaactgtggagcagcagatttccctccagatattcaatcaaaattagatgagatgcaggaggggttcaaaatgggactaactcttgaaggcacagtattttgtctcgacccgttagacagtaggtgctgacatcaagaacaagaaatcctgattcatgttaaatgtgtttgtatacacatgtcatttattattattactttaagataggtattattcatgtgtcaatgtttttgaatattttaatattttgaaaattttctcagttaaatttcctcaccttcactattgatctgtaatttttattttaaaaacagcttactgtaaagtagatcatacttttatgttcctttctgtttctactgtagatgaatttgtaattgaaagacatattatacaaatacctgccttgtgtctgagttctatttagttagcatcttgaaatttgtattcattttccagatggctagtttattaatgatttcccaaaagccataccttaaagataactttttaaattctgaagagacatgccaatgtcaaactaaacatgttctgtttttaaaccaacaaacatgttactattcattggacagatatcattttatgtataaatactgttcacatcactgggaaaatgtaaactttaaacataatgccacaaggtcactaatttctagcaggtaaaattataaggatataaattccaataataaaccaaatgtatttagagtatttattagtaaatgcaaggtgatgttagttatgatcagttatactctaaatatttaatttgttttataaaggtagtgaaaaaatgaaaatttgctatttattaaaaaacattaaatttcattccaaatgagataagtgatattactataacatctaagcatcatctgatttgatattccctaaaaaacatttggaatatatgctatctatagattcagtatctactacccatatttactttaccaaatatatttctcctcactgcataaggactactcttctcatattttcttctttgatgaagatatttttcaccaaagtttattttgtgatgccctcttggttttgatactttaaaatctgtggcacccgttctacatgaattatcaatatttggtaaattcaatctgtatttgttttgttaaagtcaaaaatctcattttccaaaaaaaaaaaaaaaacccagttactgctcagtttagtcttgaacatgagcaataaaattctcttgcatttcattattgatgtgctgatgaacctggacttttaaaaatatttgtttcctatacctttaccctttacctaacagactaatttgtactcagtaaaacaaaaatttatggtcaaaatttctaacttggttcatcacattataagataaataaattaaattaatgaaaatgtgacttagagtaggggtagccctcaaaaatagatttatcatttactcattggaattttcttcaagtgttaaaggtacattttcactaggaaaagaaatcaaatatgcttatgcaatatatatttgtgtgtttttccttaatgttatatggtatatatgagccttcttgtttagtttcttttatctgctaagttgtaccttaattagagggcaatatatgtttcataaagaagagtctttataattttgtttgtcagatagtattttggaatttgtataataaggatgtttagaagccatataagtggctttttttaacagatagaatttgtatttttattgtactttaaaaagatttatgtaataggtatatatttagtggccatttattatcaatggtaacacaatggagtactaagatggtatttgcacatttaagatatgttactttaccaatttttaatggtaatcaactctgctactggcatgatgaaatagtacataactggtcattaattatgaacatttatttctccagtgcgtttttatgaagatctggttgaaaattgtatttctatgtaaactcaacgatatgtttggttttcctgaaaataaatgattttaaataaa

SEQ ID NO: 13173 - DNA, 1932 bp, Homo sapiens
  source 1..1932: mol_type = unassigned DNA
agactgagctcagtagccaggcatgaaagagactgggcaagttgcaggggctaattggaaaggggctgtcggttgcacttggggtttaaacaagaggtttcttttgcaatgagaatttttaggtggctaagatcagtcttcttggcaaaaaaataaactaagcatagagtgcagttggatatgaccgaggaaattacaaaaagggctccaggagcaaagtctgaactttccttatcagtgttgcagtggaatagctgggggcctgatgctgtttgtgctgatcatactttgcaaatgcccacactttgttgctgtttgtctccttggacgaggtttgctgcaacttcaattccttgacttcggccttactttgttttcatagcagcaagaattgaagacttaagggtttgagcagatggttttctacctaaattgaataattcaattacgtattctcagctagcatggatttgggtcatggaattaaagtagaaacgtatccggcatgacttctttgtgcttatcaaaagtgatcctgataaacagatcttgctctttcatgtaaagaagtaaaagttatttatgattccatctgatatacataggagagaaactgatagaagaattctgatggcaactgtatgatagaagctatataaagtcaagtgtccattttctttcaactatatttgagcatacccaggatttaagtcgtggaactgaacatttatttggctgatcctcatcatgaaccgtgcttttagcaggaagaaagacaaaacatggatgcatacacctgaagctttatcaaaacatttcattccctataatgcaaagtttcttggcagtacagaagtggaacagccaaaaggaacagaagttgtgagagatgctgtaaggaaactaaagtttgcaagacatatcaagaaatctgaaggccagaaaattcctaaagtggagttgcaaatatcaatttatggagtaaaaattctagaacccaaaacaaaggaagttcaacacaattgccagcttcatagaatatctttttgtgcagatgataaaactgacaagaggatattcactttcatatgcaaagattctgagtcaaataaacatttgtgctatgtatttgacagcgaaaagtgtgctgaagagatcactttaacaattggccaagcatttgacctggcatacaggaaatttctagaatcaggaggaaaagatgttgaaacaagaaaacagatcgcagggttacaaaaaagaatccaagacttagaaacagaaaatatggaacttaaaaataaagtacaagatttggaaaaccaactgagaataactcaagtatcagcacctccagcaggcagtatgacacctaagtcgccctccactgacatctttgatatgattccattttctccaatatcacaccagtcttcgatgcctactcgcaatggcacacagccacctccagtacctagtagatctactgagattaaacgggacctgtttggagcagaaccttttgacccatttaactgtggagcagcagatttccctccagatattcaatcaaaattagatgagatgcaggaggggttcaaaatgggactaactcttgaaggcacagtattttgtctcgacccgttagacagtaggtgctgacatcaagaacaagaaatcctgattcatgttaaatgtgtttgtatacacatgtcatttattattattactttaagataggtattattcatgtgtcaatgtttttgaatattttaatattttgaaaattttctcagttaaatttcctcaccttcactattgatctgtaatttttattttaaaaacagcttactgtaaagtagatcatacttttatgttcctttctgtttctactgtagatgaatttgtaattgaaagacatattatacaaat

SEQ ID NO: 13174 - DNA, 1242 bp, Homo sapiens
  source 1..1242: mol_type = unassigned DNA
cgcaaggcgcggcgggggtgatgagcccttgggttctcgctccgactgctaaattcgcttggccgggtccaccttctcgtggcctcactcgccacacggatcagaatccggagcaggcagttctctctattctgaggctcctgcggctgccgcgctgacttccctgtgtgcgggagggaactctgggcaggctggttttcttggaatgtgtttacgatgttgaatgggacttgaacaggaagctggacgctgcagctggaactagcgtgccaagttatttatgattccatctgatatacataggagagaaactgatagaagaattctgatggcaactgtatgatagaagctatataaagtcaagtgtccattttctttcaactatatttgagcatacccaggatttaagtcgtggaactgaacatttatttggctgatcctcatcatgaaccgtgcttttagcaggaagaaagacaaaacatggatgcatacacctgaagctttatcaaaacatttcattccctataatgcaaagtttcttggcagtacagaagtggaacagccaaaaggaacagaagttgtgagagatgctgtaaggaaactaaagtttgcaagacatatcaagaaatctgaaggccagaaaattcctaaagtggagttgcaaatatcaatttatggagtaaaaattctagaacccaaaacaaaggaagttcaacacaattgccagcttcatagaatatctttttgtgcagatgataaaactgacaagaggatattcactttcatatgcaaagattctgagtcaaataaacatttgtgctatgtatttgacagcgaaaagtgtgtaagtatcccagatgttgtagggtggtttgttctgttttataagccaggaattgtcttgcttctggcattggcaaagtatttgaaaatgaataattttctgtaaattattctgtaaaaagtctgtaaatacttagctgtactaatagatttattttgtcatgagaatatgcttcaggatttcatctgtaactaaattctcatggtcatgagcataaacttacatgtaaatttcttttattagaatgccatgcctgcttatgttatgcatgtattttataataatttaatctattttacaattttaaactcaaatatgatttagtattatgcacataatacaaacagtagtggtgagcaaacgtgtgtttcccccacatgtgcagaatatgatggatt

SEQ ID NO: 13175 - DNA, 1376 bp, Homo sapiens
  source 1..1376: mol_type = unassigned DNA
cccggccgggagcgacccggagtccccagccccgcgtcccagctgccgccagcgccagttttggattcggcggattaggaagaggagggaggggggagagagcgcgaagagggaggggaccgaagctggagggtcccgagtccagcgccgtgttggcgtagagaaactttccctctcggcctcggagacggcgccccggccgtgccggagtggagatcgccaggctcggaggaaccggcagctctccacgcccctgcccgaagcctgacccgactgcctctctcagtgagttatttatgattccatctgatatacataggagagaaactgatagaagaattctgatggcaactgtatgatagaagctatataaagtcaagtgtccattttctttcaactatatttgagcatacccaggatttaagtcgtggaactgaacatttatttggctgatcctcatcatgaaccgtgcttttagcaggaagaaagacaaaacatggatgcatacacctgaagctttatcaaaacatttcattccctataatgcaaagtttcttggcagtacagaagtggaacagccaaaaggaacagaagttgtgagagatgctgtaaggaaactaaagtttgcaagacatatcaagaaatctgaaggccagaaaattcctaaagtggagttgcaaatatcaatttatggagtaaaaattctagaacccaaaacaaaggaagttcaacacaattgccagcttcatagaatatctttttgtgcagatgataaaactgacaagaggatattcactttcatatgcaaagattctgagtcaaataaacatttgtgctatgtatttgacagcgaaaagtgtgctgaagagatcactttaacaattggccaagcatttgacctggcatacaggaaatttctagaatcaggaggaaaagatgttgaaacaagaaaacagatcgcagggttacaaaaaagaatccaagacttagaaacagaaaatatggaacttaaaaataaagtacaagatttggaaaaccaactgagaataactcaagtatcagcacctccagcaggcagtatgacacctaagtcgccctccactgacatctttgatatgattccattttctccaatatcacaccagtcttcgatgcctactcgcaatggcacacagccacctccagtacctagtagatctactgagattaaacgggacctgtttggagcagaaccttttgacccatttaactgtggagcagcagatttccctccagatattcaatcaaaattagatgagatgcaggaggggttcaaaatgggactaactcttgaaggcacagtattttgtctcgacccgttagacagtaggtgctga

SEQ ID NO: 13176 - DNA, 583 bp, Homo sapiens
  source 1..583: mol_type = unassigned DNA
gagtccagcgccgtgttggcgtagagaaactttccctctcggcctcggagacggcgccccggccgtgccggagtggagatcgccaggctcggaggaaccggcagctctccacgcccctgcccgaagcctgacccgactgcctctctcagtgaggtacggagatttatctaggctcttccctggctgcgaacccaggctccctccagttatttatgattccatctgatatacataggagagaaactgatagaagaattctgatggcaactgtatgatagaagctatataaagtcaagtgtccattttctttcaactatatttgagcatacccaggatttaagtcgtggaactgaacatttatttggctgatcctcatcatgaaccgtgcttttagcaggaagaaagacaaaacatggatgcatacacctgaagctttatcaaaacatttcattccctataatgcaaagtttcttggcagtacagaagtggaacagccaaaaggaacagaagttgtgagagatgctgtaaggaaactaaagtttgcaagacatatcaagaaatctgaaggccagaaaattcctaa

SEQ ID NO: 13177 - DNA, 1595 bp, Homo sapiens
  source 1..1595: mol_type = unassigned DNA
gcggattaggaagaggagggaggggggagagagcgcgaagagggaggggaccgaagctggagggtcccgagtccagcgccgtgttggcgtagagaaactttccctctcggcctcggagacggcgccccggccgtgccggagtggagatcgccaggctcggaggaaccggcagctctccacgcccctgcccgaagcctgacccgactgcctctctcagtgagttatttatgattccatctgatatacataggagagaaactgatagaagaattctgatggcaactgtatgatagaagctatataaagtcaagtgtccattttctttcaactatatttgagcatacccaggatttaagtcgtggaactgaacatttatttggctgatcctcatcatgaaccgtgcttttagcaggaagaaagacaaaacatggatgcatacacctgaagctttatcaaaacatttcattccctataatgcaaagtttcttggcagtacagaagtggaacagccaaaaggaacagaagttgtgagagatgctgtaaggaaactaaagtttgcaagacatatcaagaaatctgaaggccagaaaattcctaaagtggagttgcaaatatcaatttatggagtaaaaattctagaacccaaaacaaaggaagttcaacacaattgccagcttcatagaatatctttttgtgcagatgataaaactgacaagaggatattcactttcatatgcaaagattctgagtcaaataaacatttgtgctatgtatttgacagcgaaaagtgtgtaagtatcccagatgttgtagggtggtttgttctgttttataagccaggaattgtcttgcttctggcattggcaaagtatttgaaaatgaataattttctgtaaattattctgtaaaaagtctgtaaatacttagctgtactaatagatttattttgtcatgagaatatgcttcaggatttcatctgtaactaaattctcatggtcatgagcataaacttacatgtaaatttcttttattagaatgccatgcctgcttatgttatgcatgtattttataataatttaatctattttacaattttaaactcaaatatgatttagtattatgcacataatacaaacagtagtggtgagcaaacgtgtgtttcccccacatgtgcagaatatgatggattttatgaaaataaatattcttaactccaggaaatatgatctatatggttccttaaaagattttccaatacactgaaaatttagttccttatgttcattgtataaaaatcttaggccaggcgcggtggctcacgcctgtaatcccagcacttcgggaggccgaggcgggcagatcatgaggtgaagagatcgagaccatcctgaccaaaatggtgaaactctgtctctactaaaaatacaaaaattagctgggtgtggtggtgtgtgccagtggtcccagctactagggaggctgaggcaggaaatcacttgaacctgggaggcagaggttgcagtgagccaagatcgcgccactgaattccagcctggcggcagagtgagactccatctcaagagaaaaaaaaaaaa

SEQ ID NO: 13178 - DNA, 2329 bp, Homo sapiens
  source 1..2329: mol_type = unassigned DNA
ggaagaaacacagatggcggcggcgcagcgccattccgggccgggagcaggcagccagcagccctgtcctcaccgcggtccgcccgccgccgctaaatacccggatgcgccgcccaagcgccagacgcggagctgggaaaagggaggcagaggaggcggaggcagaggcagaggcagaggcagagcccgagcccggtgccgagaccaagcgacagaccggcggggctgggcctcgcaaagccggctcggcgagctctcccgacacccgagccggggaggaaaagcagcgactcctcgctcgcatccccgggagccgcactccagactggcccggtagtcaggggctcaggagcagatcccgaggcaggctttgctcagcctccgacgagggctggccctttggaaggcgccttcaacagccggaccagacaggccaccatgaccgagaattccacgtccgcccctgcggccaagcccaagcgggccaaggcctccaagaagtccacagaccaccccaagtattcagacatgatcgtggctgccatccaggccgagaagaaccgcgctggctcctcgcgccagtccattcagaagtatatcaagagccactacaaggtgggtgagaacgctgactcgcagatcaagttgtccatcaagcgcctggtcaccaccggtgtcctcaagcagaccaaaggggtgggggcctcggggtccttccggctagccaagagcgacgaacccaagaagtcagtggccttcaagaagaccaagaaggaaatcaagaaggtagccacgccaaagaaggcatccaagcccaagaaggctgcctccaaagccccaaccaagaaacccaaagccaccccggtcaagaaggccaagaagaagctggctgccacgcccaagaaagccaaaaaacccaagactgtcaaagccaagccggtcaaggcatccaagcccaaaaaggccaaaccagtgaaacccaaagcaaagtccagtgccaagagggccggcaagaagaagtgacaatgaagtcttttcttgcggacactccctcctgtctcctattttctgtaaataattttctccttttttctctcttgatgctcaccaccaccttttgcccccttctgttctgactttataagagacaggatttggattcttcagaaattacagaataattcatttttccttaaccagttgtgcaaggacagcaacaaccaatctaatgatgagaatgtacttatattttgttttgctattaacctacttacggggttagggatttgcggggggggcttgtgtgttttgttggcttgtttgccatgaaggtagatgtgggtggggagaagacacaaggcagtttgttctggctagatgagagggaacccaggaattgtgaggttagcaggaatatctttagggtgagtgagttttctttgagttgggcacccgttgtgagagtttcagaacctttggccagcaggagagaggtggtagggagcagccagccggcaaaggaaggagggggaaaaaaaccgccaccgggctgacttccacctcccagtggtgagcagtgggggcccaaacccagtttccttctcatttttgttagtttgcgctttcggcctccctattttcttagggaaggggagtggggtccaagtgacagctggatgggagaagccatagtttctcccagtcagctaggatgtagccattgggggatctttgtggcttcagcaaattctcttgttaaaccggagtgaaaacttcaggggaagggtggggagtcagccaagtgcctcagtgtgccctgttgaaacttaggtttttccacgcaatcgatggattgtgtcctaggaagacttttcttttcctctggatttttgttcctcctgtacaagaggtgtctttgcttggtttggtggggctgcggccacttaaaacctcccgatctctttttgagtcctttattataagtagttgtagctgcgggagggggagggggagtgggcgggcagtggatagtaagacttactgcagtcgatttgggatttgctaagtagttttacagagctagatctgtgtgcatgtgtgtgtttgtgtatatatacatatctagggctagtacttagtttcacacccgggagctgggagaaaaaacctgtacagttgtctttctcttatttttaataaaatagaaaaatcgcgcacttgcgcgtcccccccccacccccttttttaaacaagtgttacttgtgccgggaaaattttgctgtctttgtaattttaaaactttaaaataaattggaaaagggagaaactg

SEQ ID NO: 13179 - DNA, 1172 bp, Homo sapiens
  source 1..1172: mol_type = unassigned DNA
agacgcggagctgggaaaagggaggcagaggaggcggaggcagaggcagaggcagaggcagagcccgagcccggtgccgagaccaagcgacagaccggcggggctgggcctcgcaaagccggctcggcgagctctcccgacacccgagccggggaggaaaagcagcgactcctcgctcgcatccccgggagccgcactccagactggcccggtagtcaggggctcaggagcagatcccgaggcaggctttgctcagcctccgacgagggctggccctttggaaggcgccttcaacagccggaccagacaggccaccatgaccgagaagtccacagaccaccccaagtattcagacatgatcgtggctgccatccaggccgagaagaaccgcgctggctcctcgcgccagtccattcagaagtatatcaagagccactacaaggtgggtgagaacgctgactcgcagatcaagttgtccatcaagcgcctggtcaccaccggtgtcctcaagcagaccaaaggggtgggggcctcggggtccttccggctagccaagagcgacgaacccaagaagtcagtggccttcaagaagaccaagaaggaaatcaagaaggtagccacgccaaagaaggcatccaagcccaagaaggctgcctccaaagccccaaccaagaaacccaaagccaccccggtcaagaaggccaagaagaagctggctgccacgcccaagaaagccaaaaaacccaagactgtcaaagccaagccggtcaaggcatccaagcccaaaaaggccaaaccagtgaaacccaaagcaaagtccagtgccaagagggccggcaagaagaagtgacaatgaagtcttttcttgcggacactccctcctgtctcctattttctgtaaataattttctccttttttctctcttgatgctcaccaccaccttttgcccccttctgttctgactttataagagacaggatttggattcttcagaaattacagaataattcatttttccttaaccagttgtgcaaggacagcaacaaccaatctaatgatgagaatgtacttatattttgttttgctattaacctacttacggggttagggatttgcggggggggcttgtgtgttttgttggcttgtttgccatgaaggtagatgtgggtgg

SEQ ID NO: 13180 - DNA, 1308 bp, Homo sapiens
  source 1..1308: mol_type = unassigned DNA
ttttcttttgacttgtttgtggatggaatgtttacagacatttctaattactgctttaattaaataaattggatcaaaggccgttcgaggtatttttgttttgccgtttgtcgctcagaattggcattttgagaggtgattgatactgctaacaattttctagtactctagtttgtttcaagaagagattttgggtagacgtaatcttcaccctttcaaattatataacaatacgaacattattttttatactgatcataatttccagatttggggagggggtgatcgtggcaggaaaagttgtatgtttggtagttgcatatggtgatttttgatttttcaatgctggtaggtaagtaaggaggtctctgtaccatggctcgtacaaagcagactgcccgcaaatcgaccggtggtaaagcacccaggaagcaactggctacaaaagccgctcgcaagagtgcgccctctactggaggggtgaagaaacctcatcgttacaggcctggtactgtggcgctccgtgaaattagacgttatcagaagtccactgaacttctgattcgcaaacttcccttccagcgtctggtgcgagaaattgctcaggactttaaaacagatctgcgcttccagagcgcagctatcggtgctttgcaggaggcaagtgaggcctatctggttggcctttttgaagacaccaacctgtgtgctatccatgccaaacgtgtaacaattatgccaaaagacatccagctagcacgccgcatacgtggagaacgtgcttaagaatccactatgatgggaaacatttcattctcaaaaaaaaaaaaaaaaatttctcttcttcctgttattggtagttctgaacgttagatattttttttccatggggtcaaaaggtacctaagtatatgattgcgagtggaaaaataggggacagaaatcaggtattggcagtttttccattttcatttgtgtgtgaatttttaatataaatgcggagacgtaaagcattaatgcaagttaaaatgtttcagtgaacaagtttcagcggttcaactttataataattataaataaacctgttaaatttttctggacaatgccagcatttggatttttttaaaacaagtaaatttcttattgatggcaactaaatggtgtttgtagcatttttatcatacagtagattccatccattcactatacttttctaactgagttgtcctacatgcaagtacatgtttttaatgttgtctgtcttctgtgctgttcctgtaagtttgctattaaaatacattaaactat

SEQ ID NO: 13181 - DNA, 1863 bp, Homo sapiens
  source 1..1863: mol_type = unassigned DNA
atctttcaattgtgttcgcagccgccgccgcgccgccgtcgctctccaacgccagcgccgcctctcgctcgccgagctccagccgaaggagaaggggggtaagtaaggaggtctctgtaccatggctcgtacaaagcagactgcccgcaaatcgaccggtggtaaagcacccaggaagcaactggctacaaaagccgctcgcaagagtgcgccctctactggaggggtgaagaaacctcatcgttacaggcctggtactgtggcgctccgtgaaattagacgttatcagaagtccactgaacttctgattcgcaaacttcccttccagcgtctggtgcgagaaattgctcaggactttaaaacagatctgcgcttccagagcgcagctatcggtgctttgcaggtaaaatggtgggtgggaagactcagagtttgtattcctgttgtgtaccaagaacagttccaaattgttgcatgtgcttatatcatttaatcacaagcctgtcaggtagttgatattgttacttcactgttgagacttcagaaaggttaaattgctcaaggtcatacacgtagaaaatggcaaaaccataatttgaacctatttgactccaaggcttagtgcacattccattataccatttaaaattttgaaacattgcactaaaaacaatatttaaagaaaatcctctggtttggtttatggatgctgcaggacattaagaagaacttgagactagaggtctatatttgtagtaacaatttcaaacaacagtgcctagaataaaagaaatgtctcttcaggtcctgaagaaacatataggtagagagagcttaatacctaggatgggaataggcagtattaaaaaattatgcattaagacgtaaaaggagcagtgagtggaggataggattggattggcaagattgggggaacggtgcttaaaggtgatactggacgtgtaaaggggccaggatttgccttgtggtttcctaaaggggattagggattgccacttacatgtggagcatattgaatttaatcttaatctctagcatgtcaggacttagagaaatactgttctagagatatttatgtatttgagatatttgtggtttaagttaagaccaaaacttgaaattcctacaagatacttgataaaggtatgtagacgtcattaacatcagtcacttaagtaacctattttatattgtgtggttggattctttagttgcaagtatcccagaatacagtaaagctaccacctccatcagaagcatgcagttgggggtcgttaaaaatgctgattgttaggcaccattgcagacctgaatcattctgggggtggggagggggcatccagaatctaagtacattccattggaggattttcaaggctgctgttgctgtgctgggcttttgctttatgtatgagaaagataggataggtggattccaccctgaagtgtaattggtcgagctgtttctatggttaatctaaacttcatttgattggtgaattccaggagtaggcatccattaaattctcagtgagttgctgaaatttcaactactaaaatcttccatgtttttacttaaaactttattttctgttttaatagccgattatcttcagttcttatttattactaaatacagaaatgttactaagattcgtaagcattggtacaaagctgctaatattttctagttagaactgtgcttaaagaacaatactgtacttgaaaagtgtagcgtttttagcttaaatgtcaataatgtagccttttaaattgaatttactaaacaatctgggtaaaagactcatctttctaaaattattcacatgtaaacttccattg

SEQ ID NO: 13182 - DNA, 1088 bp, Homo sapiens
  source 1..1088: mol_type = unassigned DNA
ggcggcgtgtgttgggggatagcctcggtgtcagccatctttcaattgtgttcgcagccgccgccgcgccgccgtcgctctccaacgccagcgccgcctctcgctcgccgagctccagccgaaggagaaggggggtaagtaaggaggtctctgtaccatggctcgtacaaagcagactgcccgcaaatcgaccggtggtaaagcacccaggaagcaactggctacaaaagccgctcgcaagagtgcgccctctactggaggggtgaagaaacctcatcgttacaggcctggtactgtggcgctccgtgaaattagacgttatcagaagtccactgaacttctgattcgcaaacttcccttccagcgtctggtgcgagaaattgctcaggactttaaaacagatctgcgcttccagagcgcagctatcggtgctttgcaggaggcaagtgaggcctatctggttggcctttttgaagacaccaacctgtgtgctatccatgccaaacgtgtaacaattatgccaaaagacatccagctagcacgccgcatacgtggagaacgtgcttaagaatccactatgatgggaaacatttcattctcaaaaaaaaaaaaaaaaatttctcttcttcctgttattggtagttctgaacgttagatattttttttccatggggtcaaaaggtacctaagtatatgattgcgagtggaaaaataggggacagaaatcaggtattggcagtttttccattttcatttgtgtgtgaatttttaatataaatgcggagacgtaaagcattaatgcaagttaaaatgtttcagtgaacaagtttcagcggttcaactttataataattataaataaacctgttaaatttttctggacaatgccagcatttggatttttttaaaacaagtaaatttcttattgatggcaactaaatggtgtttgtagcatttttatcatacagtagattccatccattcactatacttttctaactgagttgtcctacatgcaagtacatgtttttaatgttgtctgtcttctgtgctgttcctgtaagtttgctattaaaatacattaaact

SEQ ID NO: 13183 - DNA, 799 bp, Homo sapiens
  source 1..799: mol_type = unassigned DNA
cgcgacacagccatcttgcgtcgggggcccgggcccgggaggagagcgagccccgtcccctgatcccggaggccaacaccggcgaggggctgccctgcacgcaggcggccggcccaggagtcttagcggatcaagttgtctacggcggactcgggccggtcccgcaggacccggccgcacttggccgagcgcgcaggcgggaaggaggccgtcggtccgcccctcccgctgccgcagcggccagccgccgccgcgccgccgtcgctctccaacgccagcgccgcctctcgctcgccgagctccagccgaaggagaaggggggtaagtaaggaggtctctgtaccatggctcgtacaaagcagactgcccgcaaatcgaccggtggtaaagcacccaggaagcaactggctacaaaagccgctcgcaagagtgcgccctctactggaggggtgaagaaacctcatcgttacaggcctggtactgtggcgctccgtgaaattagacgttatcagaagtccactgaacttctgattcgcaaacttcccttccagcgtctggtgcgagaaattgctcaggactttaaaacagatctgcgcttccagagcgcagctatcggtgctttgcaggaggcaagtgaggcctatctggttggcctttttgaagacaccaacctgtgtgctatccatgccaaacgtgtaacaattatgccaaaagacatccagctagcacgccgcatacgtggagaacgtgcttaagaatccactatgatgggaaacatttcattctcaaaaaaaaaaaa

SEQ ID NO: 13184 - DNA, 2703 bp, Homo sapiens
  source 1..2703: mol_type = unassigned DNA
gagcgcagagcggtttggtcgttcgttgggcggtgctggtttttcgctcgtcgactgcggctcttcctcgggcagcggaagcggcgcggcggtcggagaagtggcctaaaacttcggcgttgggtgaaagaaaatggcccgaaccaagcagactgctcgtaagtccaccggtgggaaagccccccgcaaacagctggccacgaaagccgccaggaaaagcgctccctctaccggcggggtgaagaagcctcatcgctacaggcccgggaccgtggcgcttcgagagattcgtcgttatcagaagtcgaccgagctgctcatccggaagctgcccttccagaggttggtgagggagatcgcgcaggatttcaaaaccgacctgaggtttcagagcgcagccatcggtgcgctgcaggaggctagcgaagcgtacctggtgggtctgttcgaagataccaacctgtgtgccatccacgctaagagagtcaccatcatgcccaaagacatccagttggctcgccggatacggggagagagagcttaagtgaaggcagtttttatggcgttttgtagtaaattctgtaaaatactttggtttaatttgtgactttttttgtaagaaattgtttataatatgttgcatttgtacttaagtcattccatctttcactcaggatgaatgcgaaaagtgactgttcacagacctcagtgatgtgagcactgttgctcaggagtgacaagttgctaatatgcagaagggatgggtgatacttcttgcttctcatgatgcatgtttctgtatgttaatgacttgttgggtagctattaaggtactagagttgataaatgtgtacagggtccttttgcaataaaactggttatgacttgatccaagtgtttaacaattggggctgttaagtctgaccatacatcactgtgatagaatgtgggctttttcaagggtgaagatacaagtcttaaccacagtgtaacttacagtttcctttaaaaaaaaaaaaagtaaacctggcagctatagaatacactatgtgcatttataatagctattttatatattgtagtatcaacatttttaaattaaatgttttacattcacaagtggtggggagtcttgtcattaaggtgtgtgtaatttagagtccagttggttttcttctgactgcacttgttctcatagtagtaaaatgctatgcgcatttataccttgcataagtcctcattctaccacatgttaaccctctagctgataatgcaaacactaactgggggattttatttataagggctctagaaaaaacgagttattcacaccagcatcatcttaactaacattctgaactagttagtgcagcttttcattgtgttgtgtggttggtctcataactaggttgagtttttctcctctgctgaggaaacagtaccgaagttctttttcttgtggcatttgtattataaaaacttggtgtgggggaggagcacaaaactccagcccactgaacctctgccaattaagatggtgttgggttaggttacatctggttactgtcctgggaaaatcatttttatagagatggccttccaagtggttttaaaatttactgaagtttttaggtcaattatgtatgttgactaaatttacaaataaacttgtttatccaactaagtgtccaaaacctaaattgaatgtactaagttttcacatgtcccattatctaggtccttgtatactaatgttttgaacttagatcatttcaggtgttgtttggtggataaaggaaccttttatttataaagatactgtagaaagcatgtgaacagctctctgcttgattaagatgccataatagtgctgtatttgcagtgtgggctaagacaaagtatattaataagcttttcagcccccccactcccgttccgtagtgtagaagcccacaggtgtagaactcagtcttaaacttcagtatgaaaccagtttccttgtgcgatgatggccactaaagcatagtacgtggatgtcagtgagacagcatgagagccagcagtcatcaaagcgttccacgtttgaagttagcaactgcttaaagttataccccattaaaattgctttctcaaaagtttgggttagtttcaaatgtgatattttggagggaaggtaaagtaggtatctttcaggtcgtgataatgagctcctatgaaaggatgcaatataatgacccgcttttctagaaagttcataatcagctctggaacaagcacacttgattcctcactgtgcttcagaatgagattaagatcagatgttggaacgtgctatgctgtagcgtgtctggaaacaaagtacacaaacctggctacggtgatgagttagcttctgcttactacctgtgacaacccaagtgggtgacactagtgaaccttctccagtctgcaggctggcatagaaggctcttagattatattgggcagcttgcaatctgccgaagcagtgacttgcatttccacacttggcttgagcactcaacccagaaggcgaagatagcttttggttgtaggcggcttcctgtatgggatatccctcggtaagggtaaaggagcagaggcaaaggagaaaagcagaagttgcagctgatgcaggtatcctatgcccttgatggatgagactaaaataaaatttttgaagtt

SEQ ID NO: 13185 - DNA, 1893 bp, Homo sapiens
  source 1..1893: mol_type = unassigned DNA
ccgatcagctgtcggcgcgcactcgctcccggcccggcccagcccagcccggcgcggaggccgccgcctgccctgcggggcccgacgccagcggtccgggtagcagctccagggccggcccgcgcgtgcgcccgggagccgcgcgccaccatccccagcggggaccgaggagcccggccgagcccgagaagcccgcggccgcgatgcctgacgagctgacggagcccgggcgcgccacgccggcccgcgcctcctccttcctcatcgagaacctgctggcggccgaggccaagggcgcagggcgcgcgacccagggcgacggcagccgggaggacgaggaggaggacgacgacgaccccgaagacgaggacgccgagcaggcgcggcggcgacggctacagcggcggcgacagttgctcgcgggcaccgggcccggcggggaggcgcgggcccgtgcgctgctcgggccgggcgcgctgggcctcggtcctcggccgccccccggtcccgggccgcccttcgctctgggctgcggaggcgcagcgcgctggtacccacgggcgcacggtggctatggaggcggcctcagtcctgacaccagcgaccgggactcaccggagacgggcgaggagatgggccgtgcggagggcgcctggccgcgaggccccgggccgggagcggtgcagcgggaggcagcggagctggcggcgcgtggcccggcggccggcacggaggaggcgtcggagctggccgaggtccctgcggcggctggggagacacgcggcggcgttggcgtgggcggcggccgaaagaagaagacgcgcacagtcttctcccgcagccaggtcttccagctggaatccaccttcgacctgaagcgctacctgagcagcgccgagcgcgccggcctggccgcctccctgcagctcaccgagacgcaggttaagatctggttccagaaccgccgcaacaagtggaagcggcagctggcagccgagctggaggcggccagcctgtccccgccgggagcgcagcgcctggtccgcgtgccggtgctctaccacgaaagccccccggccgcagccgccgctgggcccccggccaccctgcccttcccgctggcgcccgccgcgcccgcgccgcccccaccgctgctcggcttctccggggccctcgcctacccgctggccgccttcccggccgccgcctccgtgccctttctgcgggcgcagatgcctggcctggtgtgagccccgcctgccgggccctctccccacgaccctgtggacctgtgtggacgcgcgattcagcggcaggcgcagggctcagggggcgttagggaagggatggtcgctcctgcggcctcctagatacctcgggagcgcaggccgcggccgggcgggcctcagcttctgtggggagcgcctctagaatgtaatgggacgccccacccatttgccaggctggatccccactcgaacagggggccatgcagagactctgggctgcgcagcccccggcgccacggccaccccccggcctcagcgaggagcggtcggccatggccacccggggcagctgccctcaggccaagcccagcgcaacaaaggaaaactacgaaccggctgtccaaggctgagcggtgactgtccccacagactgcccccaacactaaacgtccctttcctgggacccagacagcaggccggcccggagggctgtgctacccctctcgcgggtgctggtggagaaaggaccctggacctgtgggtcccatcgtccgttccaggagcaggcaggctggggctctctgcagacgtcgcagcctccgggttgttgtttttttaaatgaatctacttatttgcgtatggaataaaaagggacattttctg

SEQ ID NO: 13186 - DNA, 1628 bp, Homo sapiens
  source 1..1628: mol_type = unassigned DNA
cgggcgaggaaggggcatttgcaccggggctgggcgggcgcacccagagccaggcgggcaggaacccctgcgcagccatccggtgcctgcatgtccctggcgcggaagggacgcctcaccagcctcggcgccccctccccctagatttcctccccgcccctccccactgcctgcctgctgcaccaccttccacccagatcacccagatcgtctctaaagggagttcttggtttccttcgatttcttatgaacccaggatgggcagcaaagaagatgcgggcaaggggtgtccggcggccggtggcgtctccagcttcaccatccagtccatcctgggcgggggcccctcggaggcaccgcgggagcccgtcggctggccagccaggaagcgcagcctgtccgtgtcctcggaggaggaggagccggacgacggctggaaggcgcccgcctgcttctgcccagaccagcacggccctaaggagcagggccccaagcaccatccccccatcccttttccttgcctgggtacccccaagggcagcggaggctcgggcccgggcggcttggagcgcacgcctttcctctctccttcgcactcggactttaaagaagagaaagagaggctcctgcccgcgggctcgccctcgccggggtccgagcggccgcgggacggcggcgctgagcggcaggccggcgcggccaagaagaagacgcgcaccgtcttttcgcgcagccaggtgtaccagctcgagtccaccttcgacatgaagcgctacctgagcagctcggagcgcgcctgcctcgcctccagcctgcagctcacggagacccaggtaaagacttggttccagaaccgccgcaacaagtggaagcggcagctctcggctgagctggaggcggccaacatggcgcacgcgtcggcgcagactctggtgagcatgccgctggtgttccgggacagttcgctgctgcgcgtgccggtgccgcgctcgctcgcctttcccgcgccgctctactacccgggaagcaacctctcggccttacctctctacaacctatacaacaagctcgactactgaccggcccgccgccccgcgccgcccccagctgcccgcagagccgggcgcgtactgtactgtaagcagggctccggagcaaggcggcgtgtttccagaaatatgaagaaatacaccatgtgtattcattagctcttatttatggtctctgccctactttttgttttgattgtttcgggtatttattggcattccctaagtcagagagcctgcttcctacctagaccgaaccagtacgctttgaaaaccattcggagtgagatgttctcgggtggtggtgggaaagggagttttggccagacaggctgtggttggtagggaaaaaaatcaggaaaacacctacaaaaccaggtacactcctcccccatatatacacctgtatatatgtacatgcatacacgctcggccaagccaggccctcagaggctttggacaattactaaattgcttcttttcgtttccctcatcccgaggatggtagggacgaaaaggggagagttcagatctgtaaatatttttaaaaagaaaaaaaaataaaacattttaaacatc

SEQ ID NO: 13187 - DNA, 3911 bp, Homo sapiens
  source 1..3911: mol_type = unassigned DNA
tatggtctgatttccggcctctcgcctgctcgccccgccgcccgcctgtcccgctccctccctcccggggacccggaggagaggggaccatgccggaacccgggccggacgctgccggcaccgccagcgcacagccccaaccgccgccgccccccccacccgctcccaaggagtccccgttctccatcaagaacctgctcaacggagaccaccaccggccgccccctaagcctcagccgcccccacggacgctcttcgcgccagcctcggctgccgccgccgccgccgctgccgctgccgcggcggccaagggggccctggagggcgccgcgggcttcgcgctctcgcaggtgggcgacctggctttccctcgctttgagatcccggcgcagaggtttgccctgcccgcgcactacctggagcgctccccagcctggtggtacccctacaccctgacccccgccggcggccacctcccgcgacctgaagcctcggagaaggccttgctgagagactcctcccccgcctccggcacagaccgcgactctccggagccactgctcaaggccgaccccgatcacaaggagctggactccaagagcccggacgagatcattctggaggagagcgactccgaggaaagcaaaaaggaaggcgaagcggcgccaggcgcggccggggcgagcgtaggggcggcggcggccactccgggcgcagaagactggaagaagggcgctgaaagtccagagaagaagccggcgtgccgcaagaagaagacgcgcacagtcttctcgcgcagccaggtcttccagctcgagtccaccttcgacatgaagcgctatctgagcagctcggagcgagccggcctggccgcgtccctgcacctcaccgagacgcaggtcaagatctggttccagaaccgccgcaacaagtggaagcggcagctggcggcggagctggaggcggccaacctgagccatgccgcggcgcagcgcatcgtgcgggtgcccatcctctaccacgagaactcggcggccgagggcgcggcggctgcagccgcgggggccccggtgccagtcagccagccgctgctcaccttcccgcaccccgtctactactcgcacccggtggtctcttccgtgccgctgctacggccggtctgaggccccagaggggtgggggagggagcgcccggcctccttgtccggaccccggaggagactgggccgggccgagggcgccgagaagtccagcggccttcaggaactggggcttgggcgcgcagcctctgcttcccctcccccagtcggtagcattttgtaagtatttgcaatgcattttcgtgcaattcatccctaatggattggaggcgcttcccctcttacttttggtttttggcttatattaagagaaagcaggaacaagacaaaattttcgggtcagagatttcggccgatagtttttgtaaaatgtgcagccctcccttccaaatttccattgcgcggtggctttttggttttatttttatagaaggaaaataagcgcaaaacctaaatccctctagtttattcttttctgcttttttttttttttccgagacggaatcttgctctatctattgcccaggctggagtgcagtggcgcgatctcggctcacttcgacctccgcctcccgggttcaagtgattctcctgtctcagcctcccgagtagctgggattgcaggtgtgtgccaccacgtccggctaatttttgtatttttagtagagacgcggtttcaccatgttggccaggctggtcttgagctcctgacctcgtgatccgcccgcctcggcctcccaaagtgctgggattacaggcgtgagccactgcgcccggcctagtttattccttttctatagaactgttttcagaatccagagagggagagaattcatatgatagtacttttatttctggatttctgggtatgtttcttcctcccaacccccaaatcagttatccaccttaattttcaaaatatgagcagcctctcataagaatcccgactcaggccgcttttctcttctggagaggtctgttgcaattagcctcttcatcggtcttactttgtgatggaagaattctctaagtgtctaaagagaaaagacagccaaaaatcagaactctgactatttgaaacagctccatatctggcctggtctaagtggtcttatttattagtagcatttattttgagaatttcatttgtaaattattattaatattactattattactttgttccctgttttgagagagtaatttcagtatttttaatatgatatcttttatcctctcctcttacttttcatgttctgcagtaattattgtacgttgacctgtgcaatattgtacaaaatctcctgagaaagctgtttcctcctccaccgtgggaaacagaccttttcactgtataatcatggtcattcatttagaaagaaaaaagtaggcaggggaaaggggggaagaaagaaacaagcttaggtagtgatgctcaaaggagtaagttaggcatactggagcgctttaagtgaaggacaatcaatttagcagaattttaacttatttgataaatgtacagatttcttgtaaagttcaccctctactccgcagggctcctggctctgtcacccaatctgttttctttctgtcggtacacctgttgttctgtgatagtttgtttcccctcatctccctcacctctgcctgggttgagtccctttttaagaaaaagagaaaaaaaaaacccacaaaatattgttacactaatgttgtcgtgacattgaattaattaaaaagaaaagaaaagctttacgtgttgccagagtgtgtaagtttggacgattttccctagagcaaatgtctccaaaactcttttctgtcttgctcgctgactgcctctgcgctctctaagtacaacctggacgcacaaccctgtattccgggaggcggtggagacagaggcggctttgttcgcgaccagaggcactctctcccctgtactttccgcggcctgaaacgcccagcgagcagggaagaatgctgggcggaaggggagtggacttaggcttatctagtttgcgaaattgagcaaagcgacagcgcgcgaggcgagataccagagacagctggtatttccgaacactggtctgcagcctcccgttctgttcttaaacctgggttccttcgggagccgagagcttttgggcagggcatccctgggcattcgtcagctggttaacttcggtgggctctggttggagggaagaagggagtgagttcagagtttagctgcagccgtaggccgattgccaagtcaggctaggaaaggctgggccacaagaggacaaccccagggacagccagctcttgggacagcggctcccactaccaggagaggggaacttcctcaggtcttgcagagctgagattcccggggcgactcgagcatgggcgcggtcctgatgtgctaagtgtgagggaacagaggctacctagctgctgcagctgcaacagagaagaccttgtctcttccgtgccaggctcttctctttcccctggcgcccaacacctcctgggcggcatctctagatccccgaccctgtcctggcagacgccgagaagcgtagcgctcaccacacccgcgcgctactgggttccaggccgccgcgctcttagtgagcagcctgcggaggcacagcgcgccggaaccgcctggaagggtgggtccgcccgacagaagcaggtgcctgggcgacactcgctggccgggtgtggccgcctgcctttaagctgggggtctgcacgtacaattcctggcggggcacctttgaagctggggagccgaaagggggagatgaggaacccaga

SEQ ID NO: 13188 - DNA, 5351 bp, Homo sapiens
  source 1..5351: mol_type = unassigned DNA
ggtgctggaggaggaaaccggcggagcagcttccccactctcagttgcgcttctggcgatggcgatcagaggtcctgctgcgctctccgccgcgctctacctccattagccgcgctgcgcggtgctgcgccctcgccggtgcctctctcctgggtcccaggatcggcccccaccatccaggcacgacccccttccccggcccctcggcctttcccccaactcggccatctccgacccggggcgcgtgttccccccggcccggcgccttctctccctccgggggcacccgctccctagccccggcccggccctccccgcggcgcagcacggagtctcggcgtcccatggcgcaacctacggcctcggcccagaagctggtgcggccgatccgcgccgtgtgccgcatcctgcagatcccggagtccgacccctccaacctgcggccctagagcgcccccgccgccccgggggaaggagagcgcgagcgcgctgagcagacagagcgggagaacgcgtcctcgcccgccggccgggaggccccggagctggcccatggggagcaggcgcccggtgccggccacgacgaccgccaccgcccgcgccgcgaccggccggtgaagcccagggacccccctctgggagagccccatgagggcaggagagtgatggagagtacgcccagcttcctgaagggcaccccaacctgggagaagacggccccagagaacggcatcgtgagacaggagcccggcagcccgcctcgagatggactgcaccatgggccgctgtgcctgggagagcctgctcccttttggaggggcgtcctgagcaccccagactcctggcttccccctggcttcccccagggccccaaggacatgctcccacttgtggagggcgagggcccccagaatggggagaggaaggtcaactggctgggcagcaaagagggactgcgctggaaggaggccatgcttacccatccgctggcattctgcgggccagcgtgcccacctcgctgtggccccctgatgcctgagcatagtggtggccatctcaagagtgaccctgtggccttccggccctggcactgccctttccttctggagaccaagatcctggagcgagctcccttctgggtgcccacctgcttgccaccctacctagtgtctggcctgcccccagagcatccatgtgactggcccctgaccccgcacccctgggtatactccgggggccagcccaaagtgccctctgccttcagcttaggcagcaagggcttttactacaaggatccgagcattcccaggttggcaaaggagcccttggcagctgcggaacctgggttgtttggcttaaactctggtgggcacctgcagagagccggggaggccgaacgcccttcactgcaccagagggatggagagatgggagctggccggcagcagaatccttgcccgctcttcctggggcagccagacactgtgccctggacctcctggcccgcttgtcccccaggccttgttcatactcttggcaacgtctgggctgggccaggcgatgggaaccttgggtaccagctggggccaccagcaacaccaaggtgcccctctcctgagccgcctgtcacccagcggggctgctgttcatcctacccacccactaaaggtgggggtcttggcccttgtgggaagtgccaggagggcctggaggggggtgccagtggagccagcgaacccagcgaggaagtgaacaaggcctctggccccagggcctgtccccccagccaccacaccaagctgaagaagacatggctcacacggcactcggagcagtttgaatgtccacgcggctgccctgaggtcgaggagaggccggttgctcggctccgggccctcaaaagggcaggcagccccgaggtccagggagcaatgggcagtccagcccccaagcggccaccggacccttttccaggcactgcagaacagggggctgggggttggcaggaggtgcgggacacatcgatagggaacaaggatgtggactcgggacagcatgatgagcagaaaggaccccaagatggccaggccagtctccaggacccgggacttcaggacataccatgcctggctctccctgcaaaactggctcaatgccaaagttgtgcccaggcagctggagagggaggagggcacgcctgccactctcagcaagtgcggagatcgcctctgggaggggagctgcagcaggaggaagacacagccaccaactccagctctgaggaaggcccagggtccggccctgacagccggctcagcacaggcctcgccaagcacctgctcagtggtttgggggaccgactgtgccgcctgctgcggagggagcgggaggccctggcttgggcccagcgggaaggccaagggccagccgtgacagaggacagcccaggcattccacgctgctgcagccgttgccaccatggactcttcaacacccactggcgatgtccccgctgcagccaccggctgtgtgtggcctgtggtcgtgtggcaggcactgggcgggccagggagaaagcaggctttcaggagcagtccgcggaggagtgcacgcaggaggccgggcacgctgcctgttccctgatgctgacccagtttgtctccagccaggctttggcagagctgagcactgcaatgcaccaggtctgggtcaagtttgatatccgggggcactgcccctgccaagctgatgcccgggtatgggcccccggggatgcaggccagcagaaggaatcaacacagaaaacgcccccaactccacaaccttcctgcaatggcgacacccacaggaccaagagcatcaaagaggagacccccgattccgctgagaccccagcagaggaccgtgctggccgagggcccctgccttgtccttctctctgcgaactgctggcttctaccgcggtcaaactctgcttgggccatgagcgaatacacatggccttcgcccccgtcactccggccctgcccagtgatgaccgcatcaccaacatcctggacagcattatcgcacaggtggtggaacggaagatccaggagaaagccctggggccggggcttcgagctggcccgggtctgcgcaagggcctgggcctgcccctctctccagtgcggccccggctgcctcccccaggggctttgctgtggctgcaggagccccagccttgccctcggcgtggcttccacctcttccaggagcactggaggcagggccagcctgtgttggtgtcagggatccaaaggacattgcagggcaacctgtgggggacagaagctcttggggcacttggaggccaggtgcaggcgctgagccccctcggacctccccagcccagcagcctgggcagcacaacattctgggagggcttctcctggcctgagcttcgcccaaagtcagacgagggctctgtcctcctgctgcaccgagctttgggggatgaggacaccagcagggtggagaacctagctgccagtctgccacttccggagtactgcgccctccatggaaaactcaacctggcttcctacctcccaccgggccttgccctgcgtccactggagccccagctctgggcagcctatggtgtgagcccgcaccggggacacctggggaccaagaacctctgtgtggaggtggccgacctggtcagcatcctggtgcatgccgacacaccactgcctgcctggcaccgggcacagaaagacttcctttcaggcctggacggggaggggctctggtctccgggcagccaggtcagcactgtgtggcacgtgttccgggcacaggacgcccagcgcatccgccgctttctccagatggtgcagggcctggtgagcacagtcagcgtcactcagcacttcctctcccctgagacctctgccctctctgctcagctctgccaccagggacccagccttccccctgactgccacctgctttatgcccagatggactgggctgtgttccaagcagtgaaggtggccgtggggacattacaggaggccaaatagagggatgctaggtgtctgggatcggggtggggacaggtagaccaggtgctcagcccaggcacaacttcagcaggggatggcgctaggggacttggggatttctggtcaaccccacaagcaccactctgggcacaagcagggcactctgttcccctcccccttaagccaacaaccacagtgccaccaagctcacacctgtccttctcaggctggcatctcccccaccctgtgccccttttcatggtaccaggcccgcactgggggcaattgacttcctccaatccccactcctccgagacccaggagacaaacagcccttccttggggaaacttgggaatcattctggcttaaacaacacctcctcctgctgctcactcccgctgagcccactctactgccccagctccgtttctaccaccgcatcctcactgggctcactgcaggcatgctgaacaaggggcctccaaccttctgccctcctgccaaaagatctggggagtgtgaggagagggtggcatcaggagctgctcaggcttggcggagggagcggcatgggcgatgtcactcagccccttcccggtccgcccgcttccctccttcatgatttccattaaagtctgttgttttgtgactgctgccagtgtggttggccctgcccctgcaggccacatggtccagggagggagggggacatggaaatctgccttagagacaaatggagtagggcagcccggagctggggcccaagggacaggacaccactgcctgctcttcgtctggggcctggggccttgcctcccactgaggagactttgggtggggtggggggctgtcccccaaagatgctcctgagtgcaagagcaggcaaggcagagtcctggggcacagccacgaggtgacctccctgtgcagagactcccgagccctactccacccagcaagctccagtccgccccatctctcccgtctaccctgacctggagatccagaagtatggcccagaagagcccttgccccgcctgtctgcccttggtggcagtggccatggccgacgccaggcccagccaccctgggactgagcctgactgcttcagacagccgacccctccttgtccccgctccacgcccgcagcctcctggtggcgctccgccctctcccgcttcctttgtgtatctcagccctacaaagaaaaacactcccactcttgtcatacctaattgttcctgctgtggtttggggaattttttttattaaataaagttttttattataagggtaa

SEQ ID NO: 13189 - DNA, 6336 bp, Homo sapiens
  source 1..6336: mol_type = unassigned DNA
tctcccgggagccactcccatgggcgcctctccagcccctggcctggaagcaccaggaaccctggggatggggcagaccctcacagcccggggtctggagccggtgtcggagctcatctgggcccatgacctctccagacatttggcaaaatcaaggcccttagaccagggacagacccaagcccaggccctcccagaggtcctaggacgcaaccctttgtgcccttgggctctggaagaggtttgggaagggtttggggtggaagatggcaaagagcagcttggccaggtgaggatgaggcagggcagacacaggccagtggggcgtgccatgtgccacagatggagaggaccaggagccagtggcccggcaggcacagcccggttggcgtgggccagagcgcccatcactgacccgtgagaactcgactgcccctgccagctctggcactgccccctcccagccgccccgccctagcaccctggggggcaccccgcccaaccgtggcctggtccggcccctcccgccctttgctccagttcccgggcttggcacctatagtgggggtgccgcccgcctgccaggctccggggccgggcccacgggagggtggggcggctgggaagctggcacgctgccccgggggagcctctctcggcaggcgcccgggtgccgcgggggggagggggaacaaagggctcattctccccgtgcgcagccggtggcatcgccggggcgttggcggaagcccccggggcccgggagggggcaggcccaggcgcggccgccgaatcacgggctcctgtttcccgcagggtgctggaggaggaaaccggcggagcagcttccccactctcagttgcgcttctggcgatggcgatcagaggtcctgctgcgctctccgccgcgctctacctccattagccgcgctgcgcggtgctgcgccctcgccggtgcctctctcctgggtcccaggatcggcccccaccatccaggcacgacccccttccccggcccctcggcctttcccccaactcggccatctccgacccggggcgcgtgttccccccggcccggcgccttctctccctccgggggcacccgctccctagccccggcccggccctccccgcggcgcagcacggagtctcggcgtcccatggcgcaacctacggcctcggcccagaagctggtgcggccgatccgcgccgtgtgccgcatcctgcagatcccggagtccgacccctccaacctgcggccctagagcgcccccgccgccccgggggaaggagagcgcgagcgcgctgagcagacagagcgggagaacgcgtcctcgcccgccggccgggaggccccggagctggcccatggggagcaggcgcccggtgccggccacgacgaccgccaccgcccgcgccgcgaccggccggtgaagcccagggacccccctctgggagagccccatgagggcaggagagtgatggagagtacgcccagcttcctgaagggcaccccaacctgggagaagacggccccagagaacggcatcgtgagacaggagcccggcagcccgcctcgagatggactgcaccatgggccgctgtgcctgggagagcctgctcccttttggaggggcgtcctgagcaccccagactcctggcttccccctggcttcccccagggccccaaggacatgctcccacttgtggagggcgagggcccccagaatggggagaggaaggtcaactggctgggcagcaaagagggactgcgctggaaggaggccatgcttacccatccgctggcattctgcgggccagcgtgcccacctcgctgtggccccctgatgcctgagcatagtggtggccatctcaagagtgaccctgtggccttccggccctggcactgccctttccttctggagaccaagatcctggagcgagctcccttctgggtgcccacctgcttgccaccctacctagtgtctggcctgcccccagagcatccatgtgactggcccctgaccccgcacccctgggtatactccgggggccagcccaaagtgccctctgccttcagcttaggcagcaagggcttttactacaaggatccgagcattcccaggttggcaaaggagcccttggcagctgcggaacctgggttgtttggcttaaactctggtgggcacctgcagagagccggggaggccgaacgcccttcactgcaccagagggatggagagatgggagctggccggcagcagaatccttgcccgctcttcctggggcagccagacactgtgccctggacctcctggcccgcttgtcccccaggccttgttcatactcttggcaacgtctgggctgggccaggcgatgggaaccttgggtaccagctggggccaccagcaacaccaaggtgcccctctcctgagccgcctgtcacccagcggggctgctgttcatcctacccacccactaaaggtgggggtcttggcccttgtgggaagtgccaggagggcctggaggggggtgccagtggagccagcgaacccagcgaggaagtgaacaaggcctctggccccagggcctgtccccccagccaccacaccaagctgaagaagacatggctcacacggcactcggagcagtttgaatgtccacgcggctgccctgaggtcgaggagaggccggttgctcggctccgggccctcaaaagggcaggcagccccgaggtccagggagcaatgggcagtccagcccccaagcggccaccggacccttttccaggcactgcagaacagggggctgggggttggcaggaggtgcgggacacatcgatagggaacaaggatgtggactcgggacagcatgatgagcagaaaggaccccaagatggccaggccagtctccaggacccgggacttcaggacataccatgcctggctctccctgcaaaactggctcaatgccaaagttgtgcccaggcagctggagagggaggagggcacgcctgccactctcagcaagtgcggagatcgcctctgggaggggagctgcagcaggaggaagacacagccaccaactccagctctgaggaaggcccagggtccggccctgacagccggctcagcacaggcctcgccaagcacctgctcagtggtttgggggaccgactgtgccgcctgctgcggagggagcgggaggccctggcttgggcccagcgggaaggccaagggccagccgtgacagaggacagcccaggcattccacgctgctgcagccgttgccaccatggactcttcaacacccactggcgatgtccccgctgcagccaccggctgtgtgtggcctgtggtcgtgtggcaggcactgggcgggccagggagaaagcaggctttcaggagcagtccgcggaggagtgcacgcaggaggccgggcacgctgcctgttccctgatgctgacccagtttgtctccagccaggctttggcagagctgagcactgcaatgcaccaggtctgggtcaagtttgatatccgggggcactgcccctgccaagctgatgcccgggtatgggcccccggggatgcaggccagcagaaggaatcaacacagaaaacgcccccaactccacaaccttcctgcaatggcgacacccacaggaccaagagcatcaaagaggagacccccgattccgctgagaccccagcagaggaccgtgctggccgagggcccctgccttgtccttctctctgcgaactgctggcttctaccgcggtcaaactctgcttgggccatgagcgaatacacatggccttcgcccccgtcactccggccctgcccagtgatgaccgcatcaccaacatcctggacagcattatcgcacaggtggtggaacggaagatccaggagaaagccctggggccggggcttcgagctggcccgggtctgcgcaagggcctgggcctgcccctctctccagtgcggccccggctgcctcccccaggggctttgctgtggctgcaggagccccagccttgccctcggcgtggcttccacctcttccaggagcactggaggcagggccagcctgtgttggtgtcagggatccaaaggacattgcagggcaacctgtgggggacagaagctcttggggcacttggaggccaggtgcaggcgctgagccccctcggacctccccagcccagcagcctgggcagcacaacattctgggagggcttctcctggcctgagcttcgcccaaagtcagacgagggctctgtcctcctgctgcaccgagctttgggggatgaggacaccagcagggtggagaacctagctgccagtctgccacttccggagtactgcgccctccatggaaaactcaacctggcttcctacctcccaccgggccttgccctgcgtccactggagccccagctctgggcagcctatggtgtgagcccgcaccggggacacctggggaccaagaacctctgtgtggaggtggccgacctggtcagcatcctggtgcatgccgacacaccactgcctgcctggcaccgggcacagaaagacttcctttcaggcctggacggggaggggctctggtctccgggcagccaggtcagcactgtgtggcacgtgttccgggcacaggacgcccagcgcatccgccgctttctccagatggtgtgcccggccggggcaggcgccctggagcctggcgccccaggcagctgctacctggatgcagggctgcggcggcgcctgcgggaggagtggggcgtgagctgctggaccctgctccaggcccccggagaggccgtgctggtgcctgcaggggctccccaccaggtgcagggcctggtgagcacagtcagcgtcactcagcacttcctctcccctgagacctctgccctctctgctcagctctgccaccagggacccagccttccccctgactgccacctgctttatgcccagatggactgggctgtgttccaagcagtgaaggtggccgtggggacattacaggaggccaaatagagggatgctaggtgtctgggatcggggtggggacaggtagaccaggtgctcagcccaggcacaacttcagcaggggatggcgctaggggacttggggatttctggtcaaccccacaagcaccactctgggcacaagcagggcactctgttcccctcccccttaagccaacaaccacagtgccaccaagctcacacctgtccttctcaggctggcatctcccccaccctgtgccccttttcatggtaccaggcccgcactgggggcaattgacttcctccaatccccactcctccgagacccaggagacaaacagcccttccttggggaaacttgggaatcattctggcttaaacaacacctcctcctgctgctcactcccgctgagcccactctactgccccagctccgtttctaccaccgcatcctcactgggctcactgcaggcatgctgaacaaggggcctccaaccttctgccctcctgccaaaagatctggggagtgtgaggagagggtggcatcaggagctgctcaggcttggcggagggagcggcatgggcgatgtcactcagccccttcccggtccgcccgcttccctccttcatgatttccattaaagtctgttgttttgtgactgctgccagtgtggttggccctgcccctgcaggccacatggtccagggagggagggggacatggaaatctgccttagagacaaatggagtagggcagcccggagctggggcccaagggacaggacaccactgcctgctcttcgtctggggcctggggccttgcctcccactgaggagactttgggtggggtggggggctgtcccccaaagatgctcctgagtgcaagagcaggcaaggcagagtcctggggcacagccacgaggtgacctccctgtgcagagactcccgagccctactccacccagcaagctccagtccgccccatctctcccgtctaccctgacctggagatccagaagtatggcccagaagagcccttgccccgcctgtctgcccttggtggcagtggccatggccgacgccaggcccagccaccctgggactgagcctgactgcttcagacagccgacccctccttgtccccgctccacgcccgcagcctcctggtggcgctccgccctctcccgcttcctttgtgtatctcagccctacaaagaaaaacactcccactcttgtcatacctaattgttcctgctgtggtttggggaattttttttattaaataaagttttttattataagggtaatata

SEQ ID NO: 13190 - DNA, 1578 bp, Homo sapiens
  source 1..1578: mol_type = unassigned DNA
atcacacaggatccggagctggtgctgataacagcggaatcccccgtctacctctctccttggtcctggaacagcgctactgatcaccaagtagccacaaaatataataaaccctcagcacttgctcagtagttttgtgaaagtctcaagtaaaagagacacaaacaaaaaattctttttcgtgaagaactccaaaaataaaattctctagagataaaaaaaaaaaaaaaaggaaaatgccagctgatataatggagaaaaattcctcgtccccggtggctgctaccccagccagtgtcaacacgacaccggataaaccaaagacagcatctgagcacagaaagtcatcaaagcctattatggagaaaagacgaagagcaagaataaatgaaagtctgagccagctgaaaacactgattttggatgctctgaagaaagatagctcgcggcattccaagctggagaaggcggacattctggaaatgacagtgaagcacctccggaacctgcagcgggcgcagatgacggctgcgctgagcacagacccaagtgtgctggggaagtaccgagccggcttcagcgagtgcatgaacgaggtgacccgcttcctgtccacgtgcgagggcgttaataccgaggtgcgcactcggctgctcggccacctggccaactgcatgacccagatcaatgccatgacctaccccgggcagccgcaccccgccttgcaggcgccgccaccgcccccaccgggacccggcggcccccagcacgcgccgttcgcgccgccgccgccactcgtgcccatccccgggggcgcggcgccccctcccggcggcgccccctgcaagctgggcagccaggctggagaggcggctaaggtgtttggaggcttccaggtggtaccggctcccgatggccagtttgctttcctcattcccaacggggccttcgcgcacagcggccctgtcatccccgtctacaccagcaacagcggcacctccgtgggccccaacgcagtgtcaccttccagcggcccctcgcttacggcggactccatgtggaggccgtggcggaactgagggggctcaggccacccctcctcctaaactccccaacccacctctcttccctccggactctaaacaggaacttgaatactgggagagaagaggacttttttgattaagtggttactttgtgtttttttaatttctaagaagttactttttgtagagagagctgtattaagtgactgaccatgcactatatttgtatatattttatatgttcatattggattgcgcctttgtattataaaagctcagatgacatttcgttttttacacgagatttcttttttatgtgatgccaaagatgtttgaaaatgctcttaaaatatcttcctttggggaagtttatttgagaaaatataataaaagaaaaaagtaaaggcttttatgtcttcgaactgattcttccagaatatgtaaaaaggcttttggtggaatttgaattacatgtaattggtaattcaggaattgactcttttgttattaaaagaacatttgtaaaaatcca

SEQ ID NO: 13191 - DNA, 4262 bp, Homo sapiens
  source 1..4262: mol_type = unassigned DNA
actcgtctggcaccagcccgggccgcgcccgggacctcatttcggacctcggtttccctttgcgtggggctcgcagctgccaccgcttccccgcggagcatggggctgcctcgccgggcaggggacgcggcggagctgcgcaagagcctgaagccgctgctggagaagcgccggcgcgcgcgcatcaaccagagcctgagccagcttaaggggctcatcctgccgctgctgggccgggagaactccaactgctcgaagctagagaaggcagacgtcctggaaatgaccgtgcgcttcctgcaggagctgcctgcgtcctcatggcccacggcagcgcccctgccttgcgacagctaccgcgagggctacagcgcctgtgtggcgcgcctggcccgcgtgctgcccgcctgccgtgtcctggagcccgccgtgagcgcgcgcctgctggagcacctgtggcggagagcggccagcgccaccctggacggcgggcgcgctggggattccagtggcccgtctgcccccgccccagcgcccgcgtctgccccagagcccgcatccgctccggtgccctcgccgccctcgcctccctgcggccctggcctctggcggccgtggtagcccctcggccgatccacagaccctgccgactgcttgggaccttggggcactggacaggttgaagctcttggtggcggctgctgttcccatcattaggggccagcccagtacccacacccaggccggaagccggctgtttgtgactggcgtggcagactgaaagccctggggctggggctcggctcagggaataaaaggagcgtccctgcttcacccccaacttggctggagaagaaaggacaagaggcagcagggtgaagaagaagccccccatcccagctggtggagatagttctggaactggaccccgcagctgcgtgggcagccgacacacccaccccagcactggcaccagaccagagccagagccaggacctgggcaaagtgcagccgtgcaccctgcctggtcactgctctcccagccctgcctgggcctacctcctgcccagctctgcttgggaccctctgggcatgcagcagcagtagcctaagggctctggtcacttccagggctctacagggcagcagagcagagcaaaagggtgcatatgctgggagctgtcacctccactcctaggcttttctgcctagagcagaattataggggcagtatacatccaggggtctgtgcggtggggctgggggattccttaagtgactttgggaaggatttgttttcccgagcatcaatttcacacctgggcattgcaccccaggctatgcagtctttcagtgtgaggaaggggcagaacaagaatgaggcggccccgtggcctcaaggaagcttgtggctttggaggatctgactccagcagagtctgtgccaatgtggggtgagcagggcccctgccatggagcagcaggaatttgagggatggagcaggttaaagaatgggaaacatcttcacttgtttttttttcttgcaaactactccctgctactcattgagactggttactggaagcaacttgttaagatttttctttctgggcgggcgcggtggctcacgcctgtaatcccagcactttgggaggccaaggcgggtggatcacctgaggtcaggagttcgagaccagcttagccaatatggtgaaaccccgtctctactaaaaatacaaaaattagccgggtgtggtggcatgtgccagctactcgggaggctgaggcaagagaatcacttgaacctcggaggctgaagttgcagtgagccaagattgagccattgctctccagcctgggtgacacagcaagactctgtctcaaaaaaaattttttatttctttcttttccatggaggcctagagtccctgtgaaggctaggaaggggctgctgatcccaggagtgcccacgaggagtggggggcactgttggcccataatcaggcaaacacccatcatttcatgggggattcatgaaatcatagtcaggcaaacacccgtcatttcatggctaagcatttgcagaaggtggaggattctcccccgagtccccaaatcagcagcctgtgctagggaccagagcaccgggggcaagaagacagaaccaatgtgggagtggggatggtcactaaatctgactgtgccacacaagcccatgatgaccttggcactggtttgggtggcaggatatgaaggaagctgtaggcattattgaaaaaatcattgttcagccaacagggtgaggctcccagcaaggccgtgccatcttcccacctccctgtgcccagagggttagactgtaagctcccggagggcgaggctggggctgagcgtgcctccacgtccccaaggcacagggtgcacagtgggtgctcactgaatatagtggactagtgagcagaggatgagaggactaccctgtaatgagccttggacagtctggcatttgccttaactcccactcccatgccctgggatcactgttggatatttactccatgaggacaaatactggggaggtgtggagaggagggagggcaggttcctcttactttcacccattgctgagaatgagcgcctgttggcactgcctttgtgagcctccgggagcaggtaacctgcggcccaagcccgcctaggactccacatcaggcaggcacaggactggccccttgtcctcataaaaactctcagtacagcttaaactctgtaagatctaaccagccaggaggaccctcgcttcctctccgccatgcttgccacctcttgcttctgagagtccatctcagttcgcagttctgtgacttgcattgacctggctccaatcaagctacaactcaagcagtcacggggagaaggattgtagatgggccagtgactcacagggtcaggcactcgggggagcctgagtcaggaggtcagtgggccctggaagggagggggcaagcctgggtgggtaaggttctgggccccaggcaagaaggcagagtttctccgcaggggtgtgtgcaagagctagctgcgcagaaggtctccgctggctctccaagccgggcttgtgaaataggaacgccaacatcctcctccacaggcagtggcaggcacctcctcctcaggtgccccccaagccctatctgatgggcaaaggtgaacgcagggcggtgggcttttcctgtgcagagggagactgattcaaagggtcatttatgacctttcacaagtcccacatcctgcccaatggccaggtcttgggatgctgttgcaagatggttctgtgactccatgtgactgtctgatgattgccccagctggggaaaaggctcccatgtctctttctcataaaaccagtgggcaaggccgggcgcagtggctcacgtctgtaatgccagcacttcgggagaccaaggtgggcggatcacctgaggtcaggagttcaagaccagcctgaccaacatggtgaaaccccgtctctacaaaaatatggaaattagctgggcatgacggcgggtgcctgtaaccccagctacttgggaggctgaggagggataatcagttgaacccaggaggtggaggttgcagtgagccgagatcgcgccactgcactccagcctgggtgacagagcaagactccatctcaaaaacaaacaaacaaaaaactagcgggtgaaatgattcagtgacctaaggacagccagagcactaagctgctgggaacccatctgtgctgaaatgtagatttcccaggaaactcaggcttgggacaggcgcctacctgctcctcgggcaccaggtgattaggagaggtcgaatctcatttccacgtgagtgaggataaagactgggctgccaaggaggactcctcataaacattgacaaattgctctgccccgcctgtgatcccagacgactcctgcagtctgggatcctgagtgtcctgtgggttcatctcggatgggcgctgcataaacagcctgcagggaacgtctgggagaaccagcttcacaacagatataataaggaagaagtttgaaatattgcaagaattgcgaaagtgtgacacacagatacaaagtgggcacatgctcgtgggaaaatgttgccaatagacttgcttgactctggagttaccccgaaccttcaatttgtttaaaaaaaaaaaaaggcaatatcttgacgtgcaataaagtgaactgcaataaaa

SEQ ID NO: 13192 - DNA, 507 bp, Homo sapiens
  source 1..507: mol_type = unassigned DNA
cccgggccgcgcccgggacctcatttcggacctcggtttccctttgcgtggggctcgcagctgccaccgcttccccgcggagcatggggctgcctcgccgggcaggggacgcggcggagctgcgcaagagcctgaagccgctgctggagaagcgccggcgcgcgcgcatcaaccagagcctgagccagcttaaggggctcatcctgccgctgctgggccgggaggatgcttctggctggcacacctggcttcccctccatgctcagaactgcttcctactctacatccaggctcctgagcagcccccagcttaagcttcagcagctccagggtaaatccatctccgcccagagctgactccggatctgccccagtgacaataacaagataaatgccttccattctcttcgtacttacaggatgtaatccacatatttacacagtgtttcatttgcggtaatgtttgttttgtttcttgttccttcgtacctatctgggaagcctgtg

SEQ ID NO: 13193 - DNA, 1222 bp, Homo sapiens
  source 1..1222: mol_type = unassigned DNA
cgcggggacactcgtgcgactggggcaaggtgcccaggggcttctctcctaatttgcctcacgtaacagttgagaccccagagggcagcaaaactgggttcgaattggagagccgtccaggcacagacaaattcattcatctgcccagtgcccgctaactgcggttccaggcgccggcgacgcaattccagagctgccaccgcttccccgcggagcatggggctgcctcgccgggcaggggacgcggcggagctgcgcaagagcctgaagccgctgctggagaagcgccggcgcgcgcgcatcaaccagagcctgagccagcttaaggggctcatcctgccgctgctgggccgggaggatgcttctggctggcacacctggcttcccctccatgctcagaactgcttcctactctacatccaggctcctgagcagcccccagcttaagcttcagcagctccagggtaaatccatctccgcccagagctgactccggatctgccccagtgacaataacaagataaatgccttccattctcttcgtacttacaggatgtaatccacatatttacacagtgtttcatttgcggtaatgtttgttttgtttcttgttccttcgtacctatctgggaagcctgtgcaattcagatgtccaggcccacttccagaagttctcattccctgtgcttgagtcaatggccgcagaccatacacctgagagcaagttaatctgctctaacaaagatatcacatctaagaatggtggttggcaggggctggggggtgggaagaatggggagttggtgcttcatgggtacagagattcagttttgcaagaggaaaagagctctggagatggatgctgctgatggctacaccgcaatgtgaatgtgcatgatgcttaaatatggttaagatgggccgggcgcggtggctcacgcctgtaatcccagcactttgggaggccgaggcgggcagatcacgaggtcaggagatcgagaccatcttggctaacacggtgaaaccccatctctactataaatacaaaaaattagccgggcgtgggggcgggcacctgtggtcccagctactcgggaggctgaggcaggagaatggcatgaacctgggaggtggagcttgcagtgagccgagatcacgccactgcactccaggctgggcgacagagcgagactccgtctcaaaaaaaaaaaaaaaaaaaaaa

SEQ ID NO: 13194 - DNA, 697 bp, Homo sapiens
  source 1..697: mol_type = unassigned DNA
tgggcacggagcctgctgcccggggcagcctccccggcaacttccgaaagatttccaagccgctgatggagaaaaagcgccgggcacgcatcaatgtgtcactggagcagctcaagtcgctgctggagaaacactactcgcaccagatccggaagcgcaaattggagaaggccgacatcctggagttgagcgtgaagtacatgagaagccttcagaactccttgcaagggctctggcctgtgcccaggggagccgagcaaccgtcgggcttccgcagctgcctgcccggcgtgagccagctccttcggcgcggagatgaggtcggcagcggcctgcgctgccccctggtgcccgagagcgccgccggcagcaccatggacagcgccgggttgggccaggaggcgcccgcgctgttccgcccttgcacccctgccgtctgggctcctgctccggccgccggcggcccgcggtccccaccacccctgctcctcctccccgaaagtctccctggctcgtccgccagcgtccccccgccgcagccagcgtcgagtcgctgcgccgagagtcccgggctgggcctgcgcgtgtggcggccctggggaagccccggggatgacctgaactgaaggcgctccctatttggtctcgcgacacagggactattttcagcacgcccacagtgactgccaggaccccc

SEQ ID NO: 13195 - DNA, 899 bp, Homo sapiens
  source 1..899: mol_type = unassigned DNA
ggcctgaggcgcgcgcgggcctggagccgggatccgccctaggggctcggatcgccgcgcgctcgccgctcgcccgccagcccgcccgtggtccgtggcggcgcgctccacccggcacggggaggcgcggggcgcaccatggccgcagacacgccggggaaaccgagcgcctcgccgatggcaggagcgccggccagcgccagccggaccccagacaagccccggagcgcggccgagcaccgcaagtcctccaagccggtcatggagaagcggcgccgagcgcgtattaacgagagcctcgctcagctcaaaaccctcatcctggacgccctcagaaaagagagctcccgccactcgaagctggagaaggcggacatcctggagatgaccgtgagacacctgcggagcctgcgtcgcgtgcaggtgacggccgcgctcagcgccgaccccgccgttctgggcaagtaccgcgccggcttccacgagtgtctggcggaggtgaaccgcttcctggccggctgcgagggcgtcccggccgacgtgcgctcccgcctgctgggccacctggcagcctgcctgcgccagctgggaccctcccgccgcccggcctcgctgtccccggctgcccccgcagaggccccagcgcccgaggtctacgcgggccgcccgctgctgccatcgctcggcggccccttccctctgctcgcgccgccgctgctgccgggtctgacccgggcgctgcccgccgcccccagggcggggccgcagggcccgggtgggccctggaggccgtggctgcgctgaggctgtggccctgagactgcatcggaggcggcgccccgttctagggccgtggcctttgccgagactgtagcagagaaaacgtatttattattcca

SEQ ID NO: 13196 - DNA, 1040 bp, Homo sapiens
  source 1..1040: mol_type = unassigned DNA
gggaaagaatgcggagccgggttcacacaccccgcggcggcgaggccttaaatagggaaacggcctgaggcgcgcgcgggcctggagccgggatccgccctaggggctcggatcgccgcgcgctcgccgctcgcccgccagcccgcccgtggtccgtggcggcgcgctccacccggcacggggaggcgcggggcgcaccatggccgcagacacgccggggaaaccgagcgcctcgccgatggcaggagcgccggccagcgccagccggaccccagacaagccccggagcgcggccgagcaccgcaaggtggggtcccggccgggcgtgaggggggcgaccggggggcgggagggacgcgggactcagccggtgcccgacccgcagtcctccaagccggtcatggagaagcggcgccgagcgcgtattaacgagagcctcgctcagctcaaaaccctcatcctggacgccctcagaaaagagagctcccgccactcgaagctggagaaggcggacatcctggagatgaccgtgagacacctgcggagcctgcgtcgcgtgcaggtgacggccgcgctcagcgccgaccccgccgttctgggcaagtaccgcgccggcttccacgagtgtctggcggaggtgaaccgcttcctggccggctgcgagggcgtcccggccgacgtgcgctcccgcctgctgggccacctggcagcctgcctgcgccagctgggaccctcccgccgcccggcctcgctgtccccggctgcccccgcagaggccccagcgcccgaggtctacgcgggccgcccgctgctgccatcgctcggcggccccttccctctgctcgcgccgccgctgctgccgggtctgacccgggcgctgcccgccgcccccagggcggggccgcagggcccgggtgggccctggaggccgtggctgcgctgaggctgtggccctgagactgcatcggaggcggcgccccgttctagggccgtggcctttgccgagactgtagcagagaaaacgtatttattattccaga

SEQ ID NO: 13197 - DNA, 1306 bp, Homo sapiens
  source 1..1306: mol_type = unassigned DNA
cgcgcttggccttgcccgcgcccgctcgcctcgtctcgcccggcctccccgcgtcgcctcgtcgcctgttccgcgccaggcatggcccccagcactgtggccgtggagctgctcagccccaaagagaaaaaccgactgcggaagccggtggtggagaagatgcgccgcgaccgcatcaacagcagcatcgagcagctgaagctgctgctggagcaggagttcgcgcggcaccagcccaactccaagctggagaaggccgacatcctggagatggctgtcagctacctgaagcacagcaaagccttcgtcgccgccgccggccccaagagcctgcaccaggactacagcgaaggctactcgtggtgcctgcaggaggccgtgcagttcctgacgctccacgccgccagcgacacgcagatgaagctgctgtaccacttccagcggcccccggccgcgcccgccgcgcccgccaaggagcccaaggcgccgggcgccgcgcccccgcccgcgctctccgccaaggccaccgccgccgccgccgccgcgcaccagcccgcctgcggcctctggcggccctggtgacccggcgggacctgcgggcgcgcggcccgacgaccagagggcgagcctgctcctctcgcctgtagggaagcgccttcccgccgtcgtccgccccgggcttggacgcgcccttctccggaaggctctggccccaagctggccggcccgcaggagccccattctcagagaatgtgtgtgcagagtccctgccgttttaggacaatcagggcccatcttctgccaagtgtctgaccccatggggttgttctgtgtttgcatttaagcaagtgacttctgggaagtccccggccgcccggggttctatgatatttgtagtgccggggctcgcacactgctgcccccagcctgtagaggactttcttcagggcccgtagctgctgggcgtacccctggcaggcgggctgtgccgcgggcacatttgccttttgtgaaggccgaactcgagctgtatcctcataggaaacagtgatcaccccggacgggcgtccaggaccctgagggccatggccaaaaggctcctgagtgtgcctggtggtctggctggggctcacggtgggctgtctggggagggtgggtgcctccactatgatccttaaaggattcctctgtgtgggtggatgcgtgtgggcacgactttgtactcagaaattgaactctcagtcacgtggaagccacgggactgctccgaagccgccataataaaatctgattgttcagcccccaa

SEQ ID NO: 13198 - DNA, 1454 bp, Homo sapiens
  source 1..1454: mol_type = unassigned DNA
gtcggccgccccgggcccgcgcggccaatcggcgcattgagatgcaaataagcggctataaaaggggcgggaccgcggcgggccggaagccgcgaggagcgcggacggctgggctgctgctgggcggccgcggggcagcggagggcgccggcactccggtccccgccgctccccgtccccgctgctcctagcccctgccgcgtccccggcggagcgggcatggcgccacccgcggcgcctggccgggaccgtgtgggccgtgaggatgaggacggctgggagacgcgaggggaccgcaaggcccggaagcccctggtggagaagaagcggcgcgcgcggatcaacgagagcctgcaggagctgcggctgctgctggcgggcgccgaggtgcaggccaagctggagaacgccgaagtgctggagctgacggtgcggcgggtccagggtgtgctgcggggccgggcgcgcgagcgcgagcagctgcaggcggaagcgagcgagcgcttcgctgccggctacatccagtgcatgcacgaggtgcacacgttcgtgtccacgtgccaggccatcgacgctaccgtcgctgccgagctcctgaaccatctgctcgagtccatgccgctgcgtgagggcagcagcttccaggatctgctgggggacgccctggcggggccacctagagcccctggacggagtggctggcctgcggggggcgctccgggatccccaatacccagccccccgggtcctggggacgacctgtgctccgacctggaggaggcccctgaggctgaactgagtcaggctcctgctgaggggcccgacttggtgcccgcagccctgggcagcctgaccacagcccaaattgcccggagtgtctggaggccttggtgaccaatgccagccagagtcctgcgggggtgggcccggccctccctggatctcctccctcctcccaggggttcagatgtggtggggtagggccctggaagtctcccaggtcttccctccctcctctgatggatggcttgcagggcagcccctggtaaccagcccagtcaggccccagccccgtttcttaagaaacttttagggaccctgcagctctggagtgggtggagggagggagctacgggcaggaggaagaattttgtagagctgccagcgctctcccaggttcacccacccaggcttcaccagccctgtgcgggctctgggggcagaggtggcagaaatggtgctgggcactagtgttccaggcagccctgggctaaacaaaagcttgaacttgccacttcagcggggagatgagaggcaggtgcactgagctgcactgcccagagctgtgatgctctgtacatcttgtttgtagcacacttgagtttgtgtattccattgacatcaaatgtgacaattttactaaataaagaattttggagttagttacccttgaa

SEQ ID NO: 13199 - DNA, 1600 bp, Homo sapiens
  source 1..1600: mol_type = unassigned DNA
aagccgcgaggagcgcggacggctgggctgctgctgggcggccgcggggcagcggagggcgccggcactccggtccccgccgctccccgtccccgctgctcctagcccctgccgcgtccccggcggagcgggcatggcgccacccgcggcgcctggccgggaccgtgtgggccgtgaggatgaggacggctgggagacgcgaggggaccgcaaggcccggaagcccctggtggagaagaagcggcgcgcgcggatcaacgagagcctgcaggagctgcggctgctgctggcgggcgccgaggtgcaggccaagctggagaacgccgaagtgctggagctgacggtgcggcgggtccagggtgtgctgcggggccgggcgcgcggtgagtggcggcggggcgggcgggggcgccggccgcgggcgcctgtaacccctgccagacggaggacttccctcccggcgcccctgtcctgtcggcggcgagggctcccaccggagcagggtgcgcccccgcgtctcctgggtgagccgcgtccccgcgggccgggtgggctgggccacgcagtcgccgctcaccgcgcgggacgcggctctctccctcccaccctcgggcccagagcgcgagcagctgcaggcggaagcgagcgagcgcttcgctgccggctacatccagtgcatgcacgaggtgcacacgttcgtgtccacgtgccaggccatcgacgctaccgtcgctgccgagctcctgaaccatctgctcgagtccatgccgctgcgtgagggcagcagcttccaggatctgctgggggacgccctggcggggccacctagagcccctggacggagtggctggcctgcggggggcgctccgggatccccaatacccagccccccgggtcctggggacgacctgtgctccgacctggaggaggcccctgaggctgaactgagtcaggctcctgctgaggggcccgacttggtgcccgcagccctgggcagcctgaccacagcccaaattgcccggagtgtctggaggccttggtgaccaatgccagccagagtcctgcgggggtgggcccggccctccctggatctcctccctcctcccaggggttcagatgtggtggggtagggccctggaagtctcccaggtcttccctccctcctctgatggatggcttgcagggcagcccctggtaaccagcccagtcaggccccagccccgtttcttaagaaacttttagggaccctgcagctctggagtgggtggagggagggagctacgggcaggaggaagaattttgtagagctgccagcgctctcccaggttcacccacccaggcttcaccagccctgtgcgggctctgggggcagaggtggcagaaatggtgctgggcactagtgttccaggcagccctgggctaaacaaaagcttgaacttgccacttcagcggggagatgagaggcaggtgcactgagctgcactgcccagagctgtgatgctctgtacatcttgtttgtagcacacttgagtttgtgtattccattgacatcaaatgtgacaattttactaaataaagaattttggagttagttaccctt

SEQ ID NO: 13200 - DNA, 1286 bp, Homo sapiens
  source 1..1286: mol_type = unassigned DNA
ctccggtccccgccgctccccgtccccgctgctcctagcccctgccgcgtccccggcggagcgggcatggcgccacccgcggcgcctggccgggaccgtgtgggccgtgaggatgaggacggctgggagacgcgaggggaccgcaaggcccggaagcccctggtggagaagaagcggcgcgcgcggatcaacgagagcctgcaggagctgcggctgctgctggcgggcgccgaggccaagctggagaacgccgaagtgctggagctgacggtgcggcgggtccagggtgtgctgcggggccgggcgcgcgagcgcgagcagctgcaggcggaagcgagcgagcgcttcgctgccggctacatccagtgcatgcacgaggtgcacacgttcgtgtccacgtgccaggccatcgacgctaccgtcgctgccgagctcctgaaccatctgctcgagtccatgccgctgcgtgagggcagcagcttccaggatctgctgggggacgccctggcggggccacctagagcccctggacggagtggctggcctgcggggggcgctccgggatccccaatacccagccccccgggtcctggggacgacctgtgctccgacctggaggaggcccctgaggctgaactgagtcaggctcctgctgaggggcccgacttggtgcccgcagccctgggcagcctgaccacagcccaaattgcccggagtgtctggaggccttggtgaccaatgccagccagagtcctgcgggggtgggcccggccctccctggatctcctccctcctcccaggggttcagatgtggtggggtagggccctggaagtctcccaggtcttccctccctcctctgatggatggcttgcagggcagcccctggtaaccagcccagtcaggccccagccccgtttcttaagaaacttttagggaccctgcagctctggagtgggtggagggagggagctacgggcaggaggaagaattttgtagagctgccagcgctctcccaggttcacccacccaggcttcaccagccctgtgcgggctctgggggcagaggtggcagaaatggtgctgggcactagtgttccaggcagccctgggctaaacaaaagcttgaacttgccacttcagcggggagatgagaggcaggtgcactgagctgcactgcccagagctgtgatgctctgtacatcttgtttgtagcacacttgagtttgtgtattccattgacatcaaatgtgacaattttactaaataaagaattttggagttagtt

SEQ ID NO: 13201 - DNA, 1667 bp, Homo sapiens
  source 1..1667: mol_type = unassigned DNA
gaggagcaatggtcacccgggatcgagctgagaatagggacggccccaagatgctcaagccgcttgtggagaagcggcgccgggaccgcatcaaccgcagcctggaagagctgaggctgctgctgctggagcggacccgggaccagaacctccggaacccgaagctggagaaagcggagatattggagttcgccgtgggctacttgagggagcgaagccgggtggagcccccgggggttccccggtccccagtccaggacgccgaggcgctcgccagctgctacttgtccggtttccgcgagtgcctgcttcgcttggcggccttcgcgcacgacgccagcccggccgcccgcgcccagctcttctccgcgctgcacggctatctgcgccccaaaccgccccggcccaagccggtagatccgaggcctccagcgccgcgcccatccctggaccccgccgcaccggcccttggccctgcgctgcaccagcgccccccagtgcaccagggccaccctagcccgcgctgcgcatggtccccatccctctgctccccgcgcgccggggattctggcgcgccggcgcccctcaccggactgctgccgccgccaccgccgcctcacagacaagacggggcgcccaaggccccgctgcccccgccgcccgctttctggagaccttggccctgagccttggggggtggtgggggcggggtctaggggtggggtagagactccagcccgagggcagcagagggacccgggcgtccgggcgagcaggtgttggggagggcagtggggcgcgcgggctcagcgcgcgggtgagatgtggtctatattagagtatctatataaatatatatttccctggttcctgtcccttttccctgccccaacttctcccttgcgtctaggattgtactctctctgcccctcagcccagtcccagtcccttcccgagtccctagtgcatggaataaagtggttattaaatccccgtgtgtccccgagccaggggcctgcctttatctcgacgtccacgcccactttcccttcccttctgtctcccaccctcagtcctgctctccatggcccaagccccggggcagacaggtaagtaaagaagagagcagagcgggaactgagatcgaaattgaaaccaggtggaaagagagagatagggtagggggagaagggatgggggcctttaagaaaaaaacggataaaaaggaaaaattgaaataaaatcgactctggtgggattcgaacccacaacctttgaattgctctattcgtcactagaagtccaatgcgctatccattgcgccacagagccacccgacgaacggcggcgtcttgtagcttacgggtactagagtgggaatggggcagggttggggagcggggctaagggacttgggcgggacatgccaggagggcgcggtttggatctcagaggccaagccaggtagaggtagcgggcgcaaagcatgttagccaggtgagagagagggcgcacatgggtcgaaaaaacagggagggagagcaaccgaaaatggctgagcgagcgagtgcagagctccggctgcccgcttggggggtgtttccggctcaggcgctccccactcccagatatagtcccacccaaataaactagttttgttgtaaatt

SEQ ID NO: 13202 - DNA, 1682 bp, Homo sapiens
  source 1..1682: mol_type = unassigned DNA
gaggagcaatggtcacccgggatcgagctgagaatagggacggccccaagatgctcaagccgcttgtggagaagcggcgccgggaccgcatcaaccgcagcctggaagagctgaggctgctgctgctggagcggacccgggaccagaacctccggaacccgaagctggagaaagcggagatattggagttcgccgtgggctacttgagggagcgaagccgggtggagcccccggccgccgcggctccaggggttccccggtccccagtccaggacgccgaggcgctcgccagctgctacttgtccggtttccgcgagtgcctgcttcgcttggcggccttcgcgcacgacgccagcccggccgcccgcgcccagctcttctccgcgctgcacggctatctgcgccccaaaccgccccggcccaagccggtagatccgaggcctccagcgccgcgcccatccctggaccccgccgcaccggcccttggccctgcgctgcaccagcgccccccagtgcaccagggccaccctagcccgcgctgcgcatggtccccatccctctgctccccgcgcgccggggattctggcgcgccggcgcccctcaccggactgctgccgccgccaccgccgcctcacagacaagacggggcgcccaaggccccgctgcccccgccgcccgctttctggagaccttggccctgagccttggggggtggtgggggcggggtctaggggtggggtagagactccagcccgagggcagcagagggacccgggcgtccgggcgagcaggtgttggggagggcagtggggcgcgcgggctcagcgcgcgggtgagatgtggtctatattagagtatctatataaatatatatttccctggttcctgtcccttttccctgccccaacttctcccttgcgtctaggattgtactctctctgcccctcagcccagtcccagtcccttcccgagtccctagtgcatggaataaagtggttattaaatccccgtgtgtccccgagccaggggcctgcctttatctcgacgtccacgcccactttcccttcccttctgtctcccaccctcagtcctgctctccatggcccaagccccggggcagacaggtaagtaaagaagagagcagagcgggaactgagatcgaaattgaaaccaggtggaaagagagagatagggtagggggagaagggatgggggcctttaagaaaaaaacggataaaaaggaaaaattgaaataaaatcgactctggtgggattcgaacccacaacctttgaattgctctattcgtcactagaagtccaatgcgctatccattgcgccacagagccacccgacgaacggcggcgtcttgtagcttacgggtactagagtgggaatggggcagggttggggagcggggctaagggacttgggcgggacatgccaggagggcgcggtttggatctcagaggccaagccaggtagaggtagcgggcgcaaagcatgttagccaggtgagagagagggcgcacatgggtcgaaaaaacagggagggagagcaaccgaaaatggctgagcgagcgagtgcagagctccggctgcccgcttggggggtgtttccggctcaggcgctccccactcccagatatagtcccacccaaataaactagttttgttgtaaatt

SEQ ID NO: 13203 - DNA, 2678 bp, Homo sapiens
  source 1..2678: mol_type = unassigned DNA
gggggggcgtggccggcgccggctcttgcggccgagcagagttgcggcgtgggaaagagccgctaggagcagaccgcgccgccgccggagccgcgcctgcccaggcccggggagggaggaggcgggcgtcagggtgctgcgccccgctcggcgtccgagcttccggccgggctgtgccccgcgcggtcttcgccgggatgaagcgcccctgcgaggagacgacctccgagagcgacatggacgagaccatcgacgtggggagcgagaacaattactcggggcaaagtactagctctgtgattagattgaattctccaacaacaacatctcagattatggcaagaaagaaaaggagagggattatagagaaaaggcgtcgggatcggataaataacagtttatctgagttgagaagacttgtgccaactgcttttgaaaaacaaggatctgcaaagttagaaaaagctgaaatattgcaaatgacagtggatcatttgaagatgcttcaggcaacagggggtaaaggctactttgacgcacacgctcttgccatggacttcatgagcataggattccgagagtgcctaacagaagttgcgcggtacctgagctccgtggaaggcctggactcctcggatccgctgcgggtgcggcttgtgtctcatctcagcacttgcgccacccagcgggaggcggcggccatgacatcctccatggcccaccaccatcatccgctccacccgcatcactgggccgccgccttccaccacctgcccgcagccctgctccagcccaacggcctccatgcctcagagtcaaccccttgtcgcctctccacaacttcagaagtgcctcctgcccacggctctgctctcctcacggccacgtttgcccatgcggattcagccctccgaatgccatccacgggcagcgtcgccccctgcgtgccacctctctccacctctctcttgtccctctctgccaccgtccacgccgcagccgcagcagccaccgcggctgcacacagcttccctctgtccttcgcgggggcattccccatgcttcccccaaacgcagcagcagcagtggccgcggccacagccatcagcccgcccttgtcagtatcagccacgtccagtcctcagcagaccagcagtggaacaaacaataaaccttaccgaccctgggggacagaagttggagctttttaaatttttcttgaacttcttgcaatagtaactgaatgtcctccatttcagagtcagcttaaaacctctgcaccctgaaggtagccatacagatgccgacagatccacaaaggaacaataaagctatttgagacacaaacctcacgagtggaaatgtggtattctcttttttttctctcccttttttgtttggttcaaggcagctcggtaactgacatcagcaacttttgaaaacttcacacttgttaccatttagaagtttcctggaaaatatatggaccgtaccatccagcagtgcatcagtatgtctgaattggggaagtaaaatgccctgactgaattctcttgagactagatgggacatacatatatagagagagagtgagagagtcgtgtttcgtaagtgcctgagcttaggaagttttcttctggatatataacattgcacaagggaagacgagtgtggaggataggttaagaaaggaaagggacagaagtcttgcaataggctgcagacattttaataccatgccagagaagagtattctgctgaaaccaacaggttttactggtcaaaatgactgctgaaaataattttcaagttgaaagatctagttttatcttagtttgccttctttgtacagacatgccaagaggtgacatttagcagtgcattggtataagcaattatttcatcagttctcagattaacaagcatttctgctctgcctgcaggcccccaggcacttttttttttggatggctcaaaatatggtgctgctttatataaaccttacatttatatagtgcacctatgagcagttgcctaccatgtgtccaccagaggctatttaattcatgccaacttgaaaactctccagtttgtaggagtttggtttaatttattcagtttcattaggactatttttatatatttatcctcttcattttctcctaatgatgcaacatctattcttgtcaccctttgggagaagttacatttctggaggtgatgaagcaaggagggagcactaggaagagaaaagctacaatttttaaagctctttgtcaagttagtgattgcatttgatcccaaaacaagatgaatgtatgcaatgggatgtacataagttatttttgcccatgcctaaactagtgctatgtaatggggttgtggttttgtttttttcgatttcgtttaatgacaaaataatctcttaatatgctgaaatcaagcacgtgagagtttttgtttaaaagataagagacacagcatgtattatgcacttcatttctctactgtgtggagaaagcaataaacattatgagaatgttaaacgttatgcaaaattatacttttaaatatttgttttgaaattactgtacctagtcttttttgcattactttgtaacctttttctatgcaagagtctttacataccactaattaaatgaagtcctttttgacta

SEQ ID NO: 13204 - DNA, 2461 bp, Homo sapiens
  source 1..2461: mol_type = unassigned DNA
ggaaagttgtgacggtcgagcttgagcctggcgggccgcggagcgttcacctgcggccgggaggcaaagtactagctctgtgattagattgaattctccaacaacaacatctcagattatggcaagaaagaaaaggagagggattatagagaaaaggcgtcgggatcggataaataacagtttatctgagttgagaagacttgtgccaactgcttttgaaaaacaaggatctgcaaagttagaaaaagctgaaatattgcaaatgacagtggatcatttgaagatgcttcaggcaacagggggtaaaggctactttgacgcacacgctcttgccatggacttcatgagcataggattccgagagtgcctaacagaagttgcgcggtacctgagctccgtggaaggcctggactcctcggatccgctgcgggtgcggcttgtgtctcatctcagcacttgcgccacccagcgggaggcggcggccatgacatcctccatggcccaccaccatcatccgctccacccgcatcactgggccgccgccttccaccacctgcccgcagccctgctccagcccaacggcctccatgcctcagagtcaaccccttgtcgcctctccacaacttcagaagtgcctcctgcccacggctctgctctcctcacggccacgtttgcccatgcggattcagccctccgaatgccatccacgggcagcgtcgccccctgcgtgccacctctctccacctctctcttgtccctctctgccaccgtccacgccgcagccgcagcagccaccgcggctgcacacagcttccctctgtccttcgcgggggcattccccatgcttcccccaaacgcagcagcagcagtggccgcggccacagccatcagcccgcccttgtcagtatcagccacgtccagtcctcagcagaccagcagtggaacaaacaataaaccttaccgaccctgggggacagaagttggagctttttaaatttttcttgaacttcttgcaatagtaactgaatgtcctccatttcagagtcagcttaaaacctctgcaccctgaaggtagccatacagatgccgacagatccacaaaggaacaataaagctatttgagacacaaacctcacgagtggaaatgtggtattctcttttttttctctcccttttttgtttggttcaaggcagctcggtaactgacatcagcaacttttgaaaacttcacacttgttaccatttagaagtttcctggaaaatatatggaccgtaccatccagcagtgcatcagtatgtctgaattggggaagtaaaatgccctgactgaattctcttgagactagatgggacatacatatatagagagagagtgagagagtcgtgtttcgtaagtgcctgagcttaggaagttttcttctggatatataacattgcacaagggaagacgagtgtggaggataggttaagaaaggaaagggacagaagtcttgcaataggctgcagacattttaataccatgccagagaagagtattctgctgaaaccaacaggttttactggtcaaaatgactgctgaaaataattttcaagttgaaagatctagttttatcttagtttgccttctttgtacagacatgccaagaggtgacatttagcagtgcattggtataagcaattatttcatcagttctcagattaacaagcatttctgctctgcctgcaggcccccaggcacttttttttttggatggctcaaaatatggtgctgctttatataaaccttacatttatatagtgcacctatgagcagttgcctaccatgtgtccaccagaggctatttaattcatgccaacttgaaaactctccagtttgtaggagtttggtttaatttattcagtttcattaggactatttttatatatttatcctcttcattttctcctaatgatgcaacatctattcttgtcaccctttgggagaagttacatttctggaggtgatgaagcaaggagggagcactaggaagagaaaagctacaatttttaaagctctttgtcaagttagtgattgcatttgatcccaaaacaagatgaatgtatgcaatgggatgtacataagttatttttgcccatgcctaaactagtgctatgtaatggggttgtggttttgtttttttcgatttcgtttaatgacaaaataatctcttaatatgctgaaatcaagcacgtgagagtttttgtttaaaagataagagacacagcatgtattatgcacttcatttctctactgtgtggagaaagcaataaacattatgagaatgttaaacgttatgcaaaattatacttttaaatatttgttttgaaattactgtacctagtcttttttgcattactttgtaacctttttctatgcaagagtctttacataccactaattaaatgaagtcctttttgacta

SEQ ID NO: 13205 - DNA, 1429 bp, Homo sapiens
  source 1..1429: mol_type = unassigned DNA
agatgccccacagcactgctcttccagaggcaagaccaaccaagatgagtgccctgggagctgtcattgccctcctgctctggggacagctttttgcagtggactcaggcaatgatgtcacggatatcgcagatgacggctgcccgaagccccccgagattgcacatggctatgtggagcactcggttcgctaccagtgtaagaactactacaaactgcgcacagaaggagatggagtatacaccttaaatgataagaagcagtggataaataaggctgttggagataaacttcctgaatgtgaagcagatgacggctgcccgaagccccccgagattgcacatggctatgtggagcactcggttcgctaccagtgtaagaactactacaaactgcgcacagaaggagatggagtgtacaccttaaacaatgagaagcagtggataaataaggctgttggagataaacttcctgaatgtgaagcagtatgtgggaagcccaagaatccggcaaacccagtgcagcggatcctgggtggacacctggatgccaaaggcagctttccctggcaggctaagatggtttcccaccataatctcaccacaggtgccacgctgatcaatgaacaatggctgctgaccacggctaaaaatctcttcctgaaccattcagaaaatgcaacagcgaaagacattgcccctactttaacactctatgtggggaaaaagcagcttgtagagattgagaaggttgttctacaccctaactactcccaggtagatattgggctcatcaaactcaaacagaaggtgtctgttaatgagagagtgatgcccatctgcctaccttcaaaggattatgcagaagtagggcgtgtgggttatgtttctggctgggggcgaaatgccaattttaaatttactgaccatctgaagtatgtcatgctgcctgtggctgaccaagaccaatgcataaggcattatgaaggcagcacagtccccgaaaagaagacaccgaagagccctgtaggggtgcagcccatactgaatgaacacaccttctgtgctggcatgtctaagtaccaagaagacacctgctatggcgatgcgggcagtgcctttgccgttcacgacctggaggaggacacctggtatgcgactgggatcttaagctttgataagagctgtgctgtggctgagtatggtgtgtatgtgaaggtgacttccatccaggactgggttcagaagaccatagctgagaactaatgcaaggctggccggaagcccttgcctgaaagcaagatttcagcctggaagagggcaaagtggacgggagtggacaggagtggatgcgataagatgtggtttgaagctgatgggtgccagccctgcattgctgagtcaatcaataaagagctttcttttgaccc

SEQ ID NO: 13206 - DNA, 1300 bp, Homo sapiens
  source 1..1300: mol_type = unassigned DNA
gtgtatgcatgtgtgtgtgtgtgtgtgtacatgcatgtgtgtgtggatgcatgcatgtgctgtgaagcagggagactagctttccactcctccttgtcttctctctgcagtgccctgggagctgtcattgccctcctgctctggggacagctttttgcagtggactcaggcaatgatgtcacggatatcgcagatgacggctgcccgaagccccccgagattgcacatggctatgtggagcactcggttcgctaccagtgtaagaactactacaaactgcgcacagaaggagatggagtatacaccttaaatgataagaagcagtggataaataaggctgttggagataaacttcctgaatgtgaagcagtatgtgggaagcccaagaatccggcaaacccagtgcagcggatcctgggtggacacctggatgccaaaggcagctttccctggcaggctaagatggtttcccaccataatctcaccacaggtgccacgctgatcaatgaacaatggctgctgaccacggctaaaaatctcttcctgaaccattcagaaaatgcaacagcgaaagacattgcccctactttaacactctatgtggggaaaaagcagcttgtagagattgagaaggttgttctacaccctaactactcccaggtagatattgggctcatcaaactcaaacagaaggtgtctgttaatgagagagtgatgcccatctgcctaccttcaaaggattatgcagaagtagggcgtgtgggttatgtttctggctgggggcgaaatgccaattttaaatttactgaccatctgaagtatgtcatgctgcctgtggctgaccaagaccaatgcataaggcattatgaaggcagcacagtccccgaaaagaagacaccgaagagccctgtaggggtgcagcccatactgaatgaacacaccttctgtgctggcatgtctaagtaccaagaagacacctgctatggcgatgcgggcagtgcctttgccgttcacgacctggaggaggacacctggtatgcgactgggatcttaagctttgataagagctgtgctgtggctgagtatggtgtgtatgtgaaggtgacttccatccaggactgggttcagaagaccatagctgagaactaatgcaaggctggccggaagcccttgcctgaaagcaagatttcagcctggaagagggcaaagtggacgggagtggacaggagtggatgcgataagatgtggtttgaagctgatgggtgccagccctgcattgctgagtcaatcaataaagagc

SEQ ID NO: 13207 - DNA, 1252 bp, Homo sapiens
  source 1..1252: mol_type = unassigned DNA
agatgccccacagcactgctcttccagaggcaagaccaaccaagatgagtgccctgggagctgtcattgccctcctgctctggggacagctttttgcagtggactcaggcaatgatgtcacggatatcgcagatgacggctgcccgaagccccccgagattgcacatggctatgtggagcactcggttcgctaccagtgtaagaactactacaaactgcgcacagaaggagatggagtgtacaccttaaacaatgagaagcagtggataaataaggctgttggagataaacttcctgaatgtgaagcagtatgtgggaagcccaagaatccggcaaacccagtgcagcggatcctgggtggacacctggatgccaaaggcagctttccctggcaggctaagatggtttcccaccataatctcaccacaggtgccacgctgatcaatgaacaatggctgctgaccacggctaaaaatctcttcctgaaccattcagaaaatgcaacagcgaaagacattgcccctactttaacactctatgtggggaaaaagcagcttgtagagattgagaaggttgttctacaccctaactactcccaggtagatattgggctcatcaaactcaaacagaaggtgtctgttaatgagagagtgatgcccatctgcctaccttcaaaggattatgcagaagtagggcgtgtgggttatgtttctggctgggggcgaaatgccaattttaaatttactgaccatctgaagtatgtcatgctgcctgtggctgaccaagaccaatgcataaggcattatgaaggcagcacagtccccgaaaagaagacaccgaagagccctgtaggggtgcagcccatactgaatgaacacaccttctgtgctggcatgtctaagtaccaagaagacacctgctatggcgatgcgggcagtgcctttgccgttcacgacctggaggaggacacctggtatgcgactgggatcttaagctttgataagagctgtgctgtggctgagtatggtgtgtatgtgaaggtgacttccatccaggactgggttcagaagaccatagctgagaactaatgcaaggctggccggaagcccttgcctgaaagcaagatttcagcctggaagagggcaaagtggacgggagtggacaggagtggatgcgataagatgtggtttgaagctgatgggtgccagccctgcattgctgagtcaatcaataaagagctttcttttgaccc

SEQ ID NO: 13208 - DNA, 1107 bp, Homo sapiens
  source 1..1107: mol_type = unassigned DNA
gctcttccagaggcaagaccaaccaagatgagtgccctgggagctgtcattgccctcctgctctggggacagctttttgcagtggactcaggcaatgatgtcacggatatcgcagatgacggctgcccgaagccccccgagattgcacatggctatgtggagcactcggttcgctaccagtgtaagaactaacccagtgcagcggatcctgggtggacacctggatgccaaaggcagctttccctggcaggctaagatggtttcccaccataatctcaccacaggtgccacgctgatcaatgaacaatggctgctgaccacggctaaaaatctcttcctgaaccattcagaaaatgcaacagcgaaagacattgcccctactttaacactctatgtggggaaaaagcagcttgtagagattgagaaggttgttctacaccctaactactcccaggtagatattgggctcatcaaactcaaacagaaggtgtctgttaatgagagagtgatgcccatctgcctaccttcaaaggattatgcagaagtagggcgtgtgggttatgtttctggctgggggcgaaatgccaattttaaatttactgaccatctgaagtatgtcatgctgcctgtggctgaccaagaccaatgcataaggcattatgaaggcagcacagtccccgaaaagaagacaccgaagagccctgtaggggtgcagcccatactgaatgaacacaccttctgtgctggcatgtctaagtaccaagaagacacctgctatggcgatgcgggcagtgcctttgccgttcacgacctggaggaggacacctggtatgcgactgggatcttaagctttgataagagctgtgctgtggctgagtatggtgtgtatgtgaaggtgacttccatccaggactgggttcagaagaccatagctgagaactaatgcaaggctggccggaagcccttgcctgaaagcaagatttcagcctggaagagggcaaagtggacgggagtggacaggagtggatgcgataagatgtggtttgaagctgatgggtgccagccctgcattgctgagtcaatcaataaagagctttcttttgaccc

SEQ ID NO: 13209 - DNA, 1158 bp, Homo sapiens
  source 1..1158: mol_type = unassigned DNA
atgcatgtgtgtgtgtgcgtgtgtgtgtgtgtgtacatgcctgtgtgtgtggatgcatgcatgtgctgtgaagcagggagaccagctttccgctccttcttgttttctctctgcagtgacctgggagctgtcatttccctcctgctctggggacgacagctttttgcactgtactcaggcaatgatgtcacggatatttcagatgaccgcttcccgaagccccctgagattgcaaatggctatgtggagcacttgtttcgctaccagtgtaagaactactacagactgcgcacagaaggagatggagtatacaccttaaatgataagaagcagtggataaataaggctgttggagataaacttcctgaatgtgaagcagtatgtgggaagcccaagaatccggcaaacccagtgcagcggatcctgggtggacacctggatgccaaaggcagctttccctggcaggctaagatggtttcccaccataatctcaccacaggggccacgctgatcaatgaacaatggctgctgaccacggctaaaaatctcttcctgaaccattcagaaaatgcaacagcgaaagacattgcccctactttaacactctatgtggggaaaaagcagcttgtagagattgagaaggtggttctacaccctaactaccaccaggtagatattgggctcatcaaactcaaacagaaggtgcttgttaatgagagagtgatgcccatctgcctaccttcaaagaattatgcagaagtagggcgtgtgggttacgtgtctggctggggacaaagtgacaactttaaacttactgaccatctgaagtatgtcatgctgcctgtggctgaccaatacgattgcataacgcattatgaaggcagcacatgccccaaatggaaggcaccgaagagccctgtaggggtgcagcccatactgaacgaacacaccttctgtgtcggcatgtctaagtaccaggaagacacctgctatggcgatgcgggcagtgcctttgccgttcacgacctggaggaggacacctggtacgcggctgggatcctaagctttgataagagctgtgctgtggctgagtatggtgtgtatgtgaaggtgacttccatccagcactgggttcagaagaccatagctgagaactaa

SEQ ID NO: 13210 - DNA, 1077 bp, Homo sapiens
  source 1..1077: mol_type = unassigned DNA
actgctcttccagaggcaagaccaaccaagatgagtgacctgggagctgtcatttccctcctgctctggggacgacagctttttgcactgtactcaggcaatgatgtcacggatatttcagatgaccgcttcccgaagccccctgagattgcaaatggctatgtggagcacttgtttcgctaccagtgtaagaactactacagactgcgcacagaaggagatggagtatacaccttaaatgataagaagcagtggataaataaggctgttggagataaacttcctgaatgtgaagcagtatgtgggaagcccaagaatccggcaaacccagtgcagcggatcctgggtggacacctggatgccaaaggcagctttccctggcaggctaagatggtttcccaccataatctcaccacaggggccacgctgatcaatgaacaatggctgctgaccacggctaaaaatctcttcctgaaccattcagaaaatgcaacagcgaaagacattgcccctactttaacactctatgtggggaaaaagcagcttgtagagattgagaaggtggttctacaccctaactaccaccaggtagatattgggctcatcaaactcaaacagaaggtgcttgttaatgagagagtgatgcccatctgcctaccttcaaagaattatgcagaagtagggcgtgtgggttacgtgtctggctggggacaaagtgacaactttaaacttactgaccatctgaagtatgtcatgctgcctgtggctgaccaatacgattgcataacgcattatgaaggcagcacatgccccaaatggaaggcaccgaagagccctgtaggggtgcagcccatactgaacgaacacaccttctgtgtcggcatgtctaagtaccaggaagacacctgctatggcgatgcgggcagtgcctttgccgttcacgacctggaggaggacacctggtacgcggctgggatcctaagctttgataagagctgtgctgtggctgagtatggtgtgtatgtgaaggtgacttccatccagcactgggttcagaagaccatagctgagaactaa

SEQ ID NO: 13211 - DNA, 1047 bp, Homo sapiens
  source 1..1047: mol_type = unassigned DNA
atgagtgacctgggagctgtcatttccctcctgctctggggacgacagctttttgcactgtactcaggcaatgatgtcacggatatttcagatgaccgcttcccgaagccccctgagattgcaaatggctatgtggagcacttgtttcgctaccagtgtaagaactactacagactgcgcacagaaggagatggagtatacaccttaaatgataagaagcagtggataaataaggctgttggagataaacttcctgaatgtgaagcagtatgtgggaagcccaagaatccggcaaacccagtgcagcggatcctgggtggacacctggatgccaaaggcagctttccctggcaggctaagatggtttcccaccataatctcaccacaggggccacgctgatcaatgaacaatggctgctgaccacggctaaaaatctcttcctgaaccattcagaaaatgcaacagcgaaagacattgcccctactttaacactctatgtggggaaaaagcagcttgtagagattgagaaggtggttctacaccctaactaccaccaggtagatattgggctcatcaaactcaaacagaaggtgcttgttaatgagagagtgatgcccatctgcctaccttcaaagaattatgcagaagtagggcgtgtgggttacgtgtctggctggggacaaagtgacaactttaaacttactgaccatctgaagtatgtcatgctgcctgtggctgaccaatacgattgcataacgcattatgaaggcagcacatgccccaaatggaaggcaccgaagagccctgtaggggtgcagcccatactgaacgaacacaccttctgtgtcggcatgtctaagtaccaggaagacacctgctatggcgatgcgggcagtgcctttgccgttcacgacctggaggaggacacctggtacgcggctgggatcctaagctttgataagagctgtgctgtggctgagtatggtgtgtatgtgaaggtgacttccatccagcactgggttcagaagaccatagctgagaactaa

SEQ ID NO: 13212 - DNA, 1702 bp, Homo sapiens
  source 1..1702: mol_type = unassigned DNA
gatcccgctcactcttggcgccttcgcggaaggtgcgtccgagccatggccgctgccaacccgtgggacccggcgtccgcgcctaacggcgctgggctagtgctaggccacttcatagcttcggggatggtcaatcagaaaaacctggaaattgaactcctgaaactagaaaaagatacagcagatgttgttcatcctttctttttggctcagaagtgtcatactctgcaaagcatgaataatcatttggaagcagtgctgaaagagaagagatcccttaggcaaagactgttgaaacccatgtgccaggaaaacttacctattgaagctgtttatcacagatatatggtacatttgctggagttggctgtgactttcattgagagattagaaacccaccttgaaacaattagaaatattcctcatttagctgcaaatctaaagaaaatgaaccaggctttagcaaagatggatatattggtgactgagacagaagaactggcagagaatatactcaagtggcgtaaacaacaaaacgaagtttcgtcttgtatccccaaaatattagctgaagaaagttatctttataaacatgatattataatgcctcctttaccttttacttctaaagttcatgtccaaactattaatgccaagtagtcatcaactttatttttgcttaattatgtgtagtcatatgaagtctatttctagttgactgtaacatgggtattaatagtctttgctgctggtaatactgaaagaacctgctttatattggagtatcaagatctcaggttcattaagaccaaactgacttttcctttgtttttcatatatttttattctacctttcagtaaaactagagaagctaaaaaatagccatgacaatttattaatataagtgaattaaccatttctcaggtgggaaattctctttttttaaaaatgtgtgtttatcgtctggtgtggtggctcacacctgtaatcctaacacttggggaggctgaggcgggcagatcacttaaacccaggagttcaagaccagcctgggtaacatggtgaaatcccatatctacaaaataaacaaaaaattagccgaccatggtggtgcatgcctgtagtcccagctattcgggaggctgaggtaagaggatcacctaagcctgtgaggtcatggttgcaatgagtcatgatcacgccactgcgctacagcctgggcgacacagtaagaccctgtctcaaaaaaaagaagtgtgtttctggccaggcacggtggctcacgcctgtaatcccagcactttgggaggcctaggtgggcagatcatgaggtcaggagttcgagaccagcctggccaacatggcgaaacacctgtctctactaaaaatacaaaaattaggccgggcgcagtggctcacacctgtaatcccaacactttgggaggccgacccagatgggtggatcacctgaggtcaggagtttgagaccagccttgacaacatggtgaaaccccatctctggtagaaatataaaaaattaaccgggcatggtggtggacgcctgtaatcccagctacttgggaggctgaggcagaataatcgcttgaacccaggaggcagaggttgcagtaagccaagatcgtgcctctgcactccaacctgggtgatggagcaagactccatctccaaaaaaataaaaaa

SEQ ID NO: 13213 - DNA, 1125 bp, Homo sapiens
  source 1..1125: mol_type = unassigned DNA
ggcgtgtgggcggggcctagggagtgagcggggcgcatctcccgctaggagttcctagtaaagtggcgggagccgcagctatggagccgcaggaggagagagaaacgcaggttgctgcgtggttaaaaaaaatatttggagatcatcctattccacagtatgaggtgaacccacggaccacagagattttacatcacctttcagaacgcaacagggtccgggacagggatgtctacctggtaatagaggacttgaagcagaaagcaagtgaatacgagtcagaagccaagtatcttcaagaccttctcatggagagtgtgaatttttcccccgccaatctctctagcactggttccaggtatctgaatgctttggttgacagtgcggtggcccttgaaacaaaggatacctcgctagctagttttatccctgcagtgaatgatttgacctctgatctctttcgtaccaaatccaaaagtgaagaaatcaagattgaactggaaaaacttgaaaaaaatttaactgcaactttagtattagaaaaatgtctacaagaggatgtcaagaaagcagagttgcatctgtctacagaaagggccaaagttgataatcgtcgtcagaacatggactttctaaaagcaaagtcagaggaattcagatttggaatcaaggctgcagaggagcaactttcagccagaggcatggatgcttctctgtctcatcagtccttagtagcactatcagagaaactggcaagattaaagcaacagactatacctttgaagaaaaaattggagtcctatttagacttaatgccgaatccgtctcttgctcaagtgaaaattgaagaagcaaagcgagaactagatagcattgaagctgaacttacaagaagagtagacatgatggaactgtgacaaaagccaaataaacatccttttccctaacaaagtaaattgaataggactttacagagttctttttcctcttggcatttcctaataacaaaactttctgtgttcttagattacagaatatcataattgatagaatatggtttcttactgtgtgttgcatttttgtgcccaaatacatagttttcatattaaaaagccttttctctta

SEQ ID NO: 13214 - DNA, 3949 bp, Homo sapiens
  source 1..3949: mol_type = unassigned DNA
gccgtgcgttcgccctgcgatcccgctcactcttggcgccttcgcggaaggtgcgtccgagccatggccgctgccaacccgtgggacccggcgtccgcgcctaacggcgctgggctagtgctaggccacttcatagcttcggggatggtcaatcaggagatgttaaacatgtctaagaaaacagtttcttgttttgtgaacttcaccagactacagcagatcacaaatattcaagctgaaatctaccagaaaaacctggaaattgaactcctgaaactagaaaaagatacagcagatgttgttcatcctttctttttggctcagaagtgtcatactctgcaaagcatgaataatcatttggaagcagtgctgaaagagaagagatcccttaggcaaagactgttgaaacccatgtgccaggaaaacttacctattgaagctgtttatcacagatatatggtacatttgctggagttggctgtgactttcattgagagattagaaacccaccttgaaacaattagaaatattcctcatttagctgcaaatctaaagaaaatgaaccaggctttagcaaagatggatatattggtgactgagacagaagaactggcagagaatatactcaagtggcgtaaacaacaaaacgaagtttcgtcttgtatccccaaaatattagctgaagaaagttatctttataaacatgatattataatgcctcctttaccttttacttctaaagttcatgtccaaactattaatgccaagtagtcatcaactttatttttgcttaattatgtgtagtcatatgaagtctatttctagttgactgtaacatgggtattaatagtctttgctgctggtaatactgaaagaacctgctttatattggagtatcaagatctcaggttcattaagaccaaactgacttttcctttgtttttcatatatttttattctacctttcagtaaaactagagaagctaaaaaatagccatgacaatttattaatataagtgaattaaccatttctcaggtgggaaattctctttttttaaaaatgtgtgtttatcgtctggtgtggtggctcacacctgtaatcctaacacttggggaggctgaggcgggcagatcacttaaacccaggagttcaagaccagcctgggtaacatggtgaaatcccatatctacaaaataaacaaaaaattagccgaccatggtggtgcatgcctgtagtcccagctattcgggaggctgaggtaagaggatcacctaagcctgtgaggtcatggttgcaatgagtcatgatcacgccactgcgctacagcctgggcgacacagtaagaccctgtctcaaaaaaaagaagtgtgtttctggccaggcacggtggctcacgcctgtaatcccagcactttgggaggcctaggtgggcagatcatgaggtcaggagttcgagaccagcctggccaacatggcgaaacacctgtctctactaaaaatacaaaaattaggccgggcgcagtggctcacacctgtaatcccaacactttgggaggccgacccagatgggtggatcacctgaggtcaggagtttgagaccagccttgacaacatggtgaaaccccatctctggtagaaatataaaaaattaaccgggcatggtggtggacgcctgtaatcccagctacttgggaggctgaggcagaataatcgcttgaacccaggaggcagaggttgcagtaagccaagatcgtgcctctgcactccaacctgggtgatggagcaagactccatctccaaaaaaataaaaaatacaaaaattagccaggcatggtagcatgtgcctgtaatcccagctactcaggaggctgaggcaggagaatcacttgaacccaggaggcagaggttgcagtgagcccagatcgtgccaccgcactctagcctgggcaacagagcaagactctgtcttaaaaaaaaaaaaaaaaggtgtttctgaattagaagggtcttcttgaatctgaaaatgtctatgatgattattcctgtgggaatgtcactaagtatgcagaaaagagtaacacagccagcctgacttatcctttgaaaggcctgattataaggtttgtcctcagctgttgcatctgggaacttagatatcagaaggtatcttagtctgttctgctgtcataacagaattacacaaactaagtattttataatgaacagaagtttatttggttgacaggtgtggaggctaggcagtccaagaacatggtgccagcatctagtgagggtcttgccatggcagaaggcaccacatggcaagtgagcatgagaaagatatatgggtctaaacttagccttttatcatgagcccactcccaagatagcagcactaattcattaatgagggcaaagccctccttacctaattactttttaaaggtctcataacacttttacaatgtcaattaaatttccaacacttgaactttgggggacatatttaaaccttaacaggagggctccactcactgaaaagagtcgttcatggtagctaacctgtggtttgtgctgaaaacctgctttcttcctgggagtctagaattttggtacatggtaggtagaaggtacctacgtgaccagcccccagtaaaaaccctgggcactgtatctctaacaagtttccctggtaaacaacatttctcacatgttgtcacaattcagttgctggtggaatgaaacaacagatatgtgtgactccactgttagaggactctggaagcttatacctggtttcccccagactttgcctctgtaccttttctctttgctgttttgcttcatatgcttttgctgtaataaatcatagctgtgtgatgatatgctgagtcttgtgaattctcctagcaaatcatggaacctggaggtagtcttggagaccctggcatacaaagcagttcctaagtgtttactggtagctgtaggaataggcaaagaagaaacagcaaagaaaaaggcacactgtggtataactttggaggtttaccttgcaaaatgctcagatattttacctatcagaggttattgtgcatataatagagagtgatatactaacaactgcctcaggatatactctttttaatcagtattgtaactaaccttggcttattttacttttagacttggggttctattttgctttaaaacatgtacatcagttttgttttttgttttgttcttttctttcctttttttttttttttttttaaagacaggatctcactctgtcacccaggttgctgagagtgtggtgtggcccaatcttgacctcactgcagccttgacctctcaggctcaagtgatcctcccacctcagcctcccaagtagctgggactataggcacgcgccaccacgcctggctaatttttgtattttctgtagagacagagttttgccatgttgttgaggctggtcttgaactcctgggttcaaacgaccctcccgcctcagcctccgaaagtgctgggagtacaggtgttagccactgcgcctggcctcattgtactccttaacacaagaagacttcaacaatgataagtagttgtttataaggaagcaggatcattaccaaaataaatcctgctaaaacaacaggaatcatgttttaaagcctagtttgctaatttttgctagtaggataagagtgatcgtaatatctcgaacattacatagacacttaaaacctttagttgtatttcatcaaaaatctgttcataccccacgttggtttcaaaacatactatgctttttcttcgtgttatttcctatattcatttttgtgtgtatgtgtatgtcacaaatattgatatgcctggttgtttatttttgttttctattatgcctttttcaaaatataaaaataaacttgtaatttctaactaaaa

SEQ ID NO: 13215 - DNA, 3849 bp, Homo sapiens
  source 1..3849: mol_type = unassigned DNA
gtgcgttcgccctgcgatcccgctcactcttggcgccttcgcggaaggtgcgtccgagccatggccgctgccaacccgtgggacccggcgtccgcgcctaacggcgctgggctagtgctaggccacttcatagcttcggggatggtcaatcagaaaaacctggaaattgaactcctgaaactagaaaaagatacagcagatgttgttcatcctttctttttggctcagaagtgtcatactctgcaaagcatgaataatcatttggaagcagtgctgaaagagaagagatcccttaggcaaagactgttgaaacccatgtgccaggaaaacttacctattgaagctgtttatcacagatatatggtacatttgctggagttggctgtgactttcattgagagattagaaacccaccttgaaacaattagaaatattcctcatttagctgcaaatctaaagaaaatgaaccaggctttagcaaagatggatatattggtgactgagacagaagaactggcagagaatatactcaagtggcgtaaacaacaaaacgaagtttcgtcttgtatccccaaaatattagctgaagaaagttatctttataaacatgatattataatgcctcctttaccttttacttctaaagttcatgtccaaactattaatgccaagtagtcatcaactttatttttgcttaattatgtgtagtcatatgaagtctatttctagttgactgtaacatgggtattaatagtctttgctgctggtaatactgaaagaacctgctttatattggagtatcaagatctcaggttcattaagaccaaactgacttttcctttgtttttcatatatttttattctacctttcagtaaaactagagaagctaaaaaatagccatgacaatttattaatataagtgaattaaccatttctcaggtgggaaattctctttttttaaaaatgtgtgtttatcgtctggtgtggtggctcacacctgtaatcctaacacttggggaggctgaggcgggcagatcacttaaacccaggagttcaagaccagcctgggtaacatggtgaaatcccatatctacaaaataaacaaaaaattagccgaccatggtggtgcatgcctgtagtcccagctattcgggaggctgaggtaagaggatcacctaagcctgtgaggtcatggttgcaatgagtcatgatcacgccactgcgctacagcctgggcgacacagtaagaccctgtctcaaaaaaaagaagtgtgtttctggccaggcacggtggctcacgcctgtaatcccagcactttgggaggcctaggtgggcagatcatgaggtcaggagttcgagaccagcctggccaacatggcgaaacacctgtctctactaaaaatacaaaaattaggccgggcgcagtggctcacacctgtaatcccaacactttgggaggccgacccagatgggtggatcacctgaggtcaggagtttgagaccagccttgacaacatggtgaaaccccatctctggtagaaatataaaaaattaaccgggcatggtggtggacgcctgtaatcccagctacttgggaggctgaggcagaataatcgcttgaacccaggaggcagaggttgcagtaagccaagatcgtgcctctgcactccaacctgggtgatggagcaagactccatctccaaaaaaataaaaaatacaaaaattagccaggcatggtagcatgtgcctgtaatcccagctactcaggaggctgaggcaggagaatcacttgaacccaggaggcagaggttgcagtgagcccagatcgtgccaccgcactctagcctgggcaacagagcaagactctgtcttaaaaaaaaaaaaaaaaggtgtttctgaattagaagggtcttcttgaatctgaaaatgtctatgatgattattcctgtgggaatgtcactaagtatgcagaaaagagtaacacagccagcctgacttatcctttgaaaggcctgattataaggtttgtcctcagctgttgcatctgggaacttagatatcagaaggtatcttagtctgttctgctgtcataacagaattacacaaactaagtattttataatgaacagaagtttatttggttgacaggtgtggaggctaggcagtccaagaacatggtgccagcatctagtgagggtcttgccatggcagaaggcaccacatggcaagtgagcatgagaaagatatatgggtctaaacttagccttttatcatgagcccactcccaagatagcagcactaattcattaatgagggcaaagccctccttacctaattactttttaaaggtctcataacacttttacaatgtcaattaaatttccaacacttgaactttgggggacatatttaaaccttaacaggagggctccactcactgaaaagagtcgttcatggtagctaacctgtggtttgtgctgaaaacctgctttcttcctgggagtctagaattttggtacatggtaggtagaaggtacctacgtgaccagcccccagtaaaaaccctgggcactgtatctctaacaagtttccctggtaaacaacatttctcacatgttgtcacaattcagttgctggtggaatgaaacaacagatatgtgtgactccactgttagaggactctggaagcttatacctggtttcccccagactttgcctctgtaccttttctctttgctgttttgcttcatatgcttttgctgtaataaatcatagctgtgtgatgatatgctgagtcttgtgaattctcctagcaaatcatggaacctggaggtagtcttggagaccctggcatacaaagcagttcctaagtgtttactggtagctgtaggaataggcaaagaagaaacagcaaagaaaaaggcacactgtggtataactttggaggtttaccttgcaaaatgctcagatattttacctatcagaggttattgtgcatataatagagagtgatatactaacaactgcctcaggatatactctttttaatcagtattgtaactaaccttggcttattttacttttagacttggggttctattttgctttaaaacatgtacatcagttttgttttttgttttgttcttttctttcctttttttttttttttttttaaagacaggatctcactctgtcacccaggttgctgagagtgtggtgtggcccaatcttgacctcactgcagccttgacctctcaggctcaagtgatcctcccacctcagcctcccaagtagctgggactataggcacgcgccaccacgcctggctaatttttgtattttctgtagagacagagttttgccatgttgttgaggctggtcttgaactcctgggttcaaacgaccctcccgcctcagcctccgaaagtgctgggagtacaggtgttagccactgcgcctggcctcattgtactccttaacacaagaagacttcaacaatgataagtagttgtttataaggaagcaggatcattaccaaaataaatcctgctaaaacaacaggaatcatgttttaaagcctagtttgctaatttttgctagtaggataagagtgatcgtaatatctcgaacattacatagacacttaaaacctttagttgtatttcatcaaaaatctgttcataccccacgttggtttcaaaacatactatgctttttcttcgtgttatttcctatattcatttttgtgtgtatgtgtatgtcacaaatattgatatgcctggttgtttatttttgttttctattatgcctttttcaaaatataaaaataaacttgtaatttctaact

SEQ ID NO: 13216 - DNA, 5620 bp, Homo sapiens
  source 1..5620: mol_type = unassigned DNA
ctcccgtgaggcagtgcgaggcgcgcggggcacggagggcggtggcggcgggctcctgcgagaagcaagcggaacttcctgaggaggaatcattatagattctaaaaatatattttcccttctctgtggacttggtataaaacgtagctttttttctgcttggatttattttctaaaaatcaacaccgtaaacccatatcagatacaacaaaattggggtagttaaaaccatgagttgtggaaatgagtttgtggaaacattaaaaaaaattggttatcccaaagctgataatcttaatggagaagactttgactggttgtttgagggcgttgaagatgaatcgtttctgaagtggttttgtgggaatgtgaatgaacagaacgtgttgtctgaaagagaattggaagcttttagcattcttcagaaatcaggcaagcctattctagaaggggcggcattggatgaagctcttaaaacgtgtaaaacttctgatttgaagacacctagactggatgataaagagctggagaaattagaggatgaggttcaaactctactgaaattaaagaacctaaaaattcagcgacgtaataaatgtcaattgatggcttcagtaactagccacaaatctctgaggttaaatgctaaagaagaagaagccactaaaaagctgaagcagagtcaaggaattctaaatgcaatgatcactaagatcagtaatgaacttcaggctcttactgatgaagttacacaattgatgatgttcttcagacattctaatttaggtcaagggacaaatccactggtatttttatcgcaattttccttggaaaaatacctaagtcaggaagagcaaagcacagcagcattaactttgtataccaaaaaacagttctttcagggtatacatgaagtagttgaaagttcaaatgaagacaattttcaacttttagatatacagacaccatctatttgtgataatcaagaaatccttgaggagagacgactagagatggctagactgcagctcgcatacatttgtgctcaacatcagttaattcacttaaaagcaagtaattcgagcatgaagtcaagtataaaatgggcagaggagagtcttcacagcctaaccagcaaggctgtggacaaagaaaatttggatgctaaaatttctagcttgaccagtgagattatgaaacttgaaaaagaggtcactcaaataaaagacagaagtttacctgctgtggtaagagagaatgcccagttattgaatatgccagtggtaaagggagattttgatctgcagattgctaaacaagattattatacagcaagacaagagttagttttaaatcaattaataaaacaaaaggcatcatttgaacttctacagttatcatatgaaattgaattaagaaagcatcgggacatatatcgtcaacttgaaaatttggttcaagaacttagtcaaagtaacatgatgctctacaagcaattagaaatgttaacagatccatcagtttctcaacagataaatccaaggaataccattgatactaaggattattctactcataggctttaccaagttttggagggagagaataagaaaaaagaattgtttctaactcatggaaaccttgaggaagtggctgagaaattgaaacagaatatttctttagtacaagatcagttggcagtatctgctcaagaacattctttctttctgtccaaacggaataaggatgtggacatgctttgtgatactttgtatcaaggaggaaatcagcttttgcttagtgatcaggagttaacagagcagtttcataaagttgaatctcaactgaataagctaaatcatctcctcactgatattcttgctgatgtgaagacaaaaagaaaaactttggcaaataataaattacatcaaatggaaagagaattctatgtatattttttaaaagatgaagattatctgaaagatattgtggagaatttagaaactcaatcaaagattaaggctgttagtcttgaagattgaaaattactgaaaactgaatctttattacgtgtcctcttttatttattagaagactgtgtataataaacactactaaatttttaaaatttgaggtcaatggaacatttaatttgatgaattgaactattatattaatttgtcttttttctcatgtagtacattcagaataccagtgctttttatgacttgagcatgtgtttagtggtacttagtcctggtaattttttacttacagggaaaaagcattattacataatgcaaatattttttaatatagttatctctctcctttttagaaatagaaattttctgccgttaaatttttttttgagatagagtctcactctgtctccaggctggaatgcagtggcacgatcttggctcactgcaacctctgcctcccgggttcaagtgattctcctgcctcagcctcccaagtagctgggactacaggcgcacaccgccacacccagctaatttttttgtattttagtagaaaaggggtttcaccatgttggccaggatggtctcaatctcttgacctcttgatcccctctcccggcctcccaaagtgccggaattacaggcatgagccaccacgctcagccgctattaaatattttaaaatgtgtagaacttctagtcagcatttttaaatctgtagaccttaatatgtgaaatagccaagtcccctcatgtttgactgtcaaataaaattctgctgctcaaattgtattcctccataattccctgctatagacctttaggctgttttaatgtccctacttgtaccacagagtattaggacttccttggcctgcctgcattcattttagagtctgaattctggggactcaaaagtttctacaagacagctgagcagtgctttgactttaatgtgacttacacatcataaatgactttcaaatgaaatttgaatttcaaaattctgtaaaagtggttgctcaaaagatgtatgatactattttaatcagtttaagagcaaaaatgtctaattgtatttaacaatggtatttgggcagccagaaaatattttaagcgttgctctaaaataatttgaagtagctcatctgttattacatcagatgcttcttgagtgcccaatttatacatggcctgtggtaaataccatgtgagctttgtaggaatacctttaagaatattcctcacctgttcgtaatatggaatgccaatctaaaaactacatgttttgggtggtctttatggaattttttagctataaccatcagaaaacaggcatacctagatgacagatgaaccttcttgatttttgaaacccattgaacaaaaatattttgccaattattgtgtttatgttatttaaaattttatgtaaaccttaattttgtagcagtaaattttgtttaagattttgctatcagctccctatcacctgagcaactttttttttgttgtatatgtttttttctattctatttcggaatagagaatttacttaaaatttttattttctccaaaaatgtggaaaatatgtcacctggtttcctggtttatggtagcatattctgtttaaattagtgtcacatatttagatgtgtggccagacgcttgatttattagttaatttttgagacagagtctaactgtgtcactcaggctggagttcagtggaatgatctcggctcactgcaacctccgcctcccaggttcaagtgattctcctgcttcagcctcctgagtagatgggattgtaggcgtgcaccactgcacctggctaatttttgtattttcagtagagacggggtttcaccatgttggtcaggctggtctcaaactcctgacctcaagtgatctacccgccttggccttccatagtgctggcattacaggtgtaagccaccatgcccctgcccagatgcttgatttatactgtccccacccaaaccttgacttgctcagcccagggggccagcagggcagatcaaggcacggatggtagttgtgtgtctgccgtaattacccaagttacttataatcgttgtgttactaggtaggtttatttgaagatttatttatttatttatttattttttattttttgagacggagtttcactcttgttgcccaggctggagtgcagtggcatgatctcagctcactgcaacctctgccttctgggttcacgtgattctcctgcctcaggcctcccgagtagctgggattacaggtgccaccatgcctggttaattttttgtatttttagtagagacggggtttcatcatgttggccaggttggtctcgaactcctgacctcaggtgatccacccgcctcagtctaccaaagtgcagggatcacaggcatgagcttccgcgctcagcctatttgaagatttaataacatttttcaaacctcaggatgtatttgagtagattgcttctaaattggtcacctagaaaataagttatctatttactatgatacctggattaagcctctagctattttgcttttttctttctatctatattattggatgattgatgcctattttctgtggttatgaatatagacattttaaatgaaagttggtatataaatttttgaaaataattgtatttcctgttttatagtcttaggattaatatatgggatttatcttatgttaatcttacatttaggattttgtgaaaatggaaaattatgaggcattggtaggctttgatctctgtaatacaccgctctccagtgttgctcagaagattatgtctgctatgcattcaggtgatttagtggattctaagacttggggaaagagtacagagagtaagtaatttttatgaacctttctttctcttgatactttgaatgttaattgttctaaagactaagaattgaaaatggaatgcatgtagacagatgaagcccagctcccgccccttttacactcattcagtgcagactgagcttctgcttgctaactttcgtgttcccttaaccttcattgctttaaaaatgtaacactctcttccttattccaggtatttctgtcaaacattcccttagaatctggatcaggtattttagtattttcaaaagagatgctttaatcttggttctcaggtcatcaaacctgtacatagtatttgctattttgtgtggtgaacaagagatatgtttttgacaatatgtgtattgtgctgctatagaaatgtaaactcttaggtggcaaggattattggatcagtgtatatggatttatgatgtggtataatagtaaaagcagtggggccgggtgcggtggctcacgcctgtaatcccagcactttgggaggccgaggtcggcgatcatgaggtcaggagatcgagaccatcctggctaacacggtaaaacactgtctctactaaaaatacaaaaaattagctgggagtggtggtaggcgcctgtagtccagctacttgggaggctgaggcaggagaatggcatgaacccaggaggcggggcttgcagtgagctgaggtctccagcgtgggcgacagagtgagactctatctcaaaaaaaaaaaaaaaaaaaa

SEQ ID NO: 13217 - DNA, 2430 bp, Homo sapiens
  source 1..2430: mol_type = unassigned DNA
gtcgccttgtgcgcttgcgcgcgtccaggcgctcccgtgaggcagtgcgaggcgcgcggggcacggagggcggtggcggcgggctcctgcgagaagcaagcggaacttcctgagcgtgcttaggtgtcacagctgggtgaccctccgaaggaaggttttgccgctggcgcgtctggtgtatcgcggccttggggccgcggatccctggggcttgccgctgcctctggggttcgcgcggccctggcgtcggggctgcctcagcgctggctgaaggccggcccgaagcacccttaattgtggccgcgcgcttccctgctgctcctgctgttctccgcgtcgcggtggtggactctggaggtggagccttgcccggcgagacgttgaggaggaatcattatagattctaaaaatatattttcccttctctgtggacttggtataaaacgtagctttttttctgcttggatttattttctaaaaatcaacaccgtaaacccatatcagatacaacaaaattggggtagttaaaaccatgagttgtggaaatgagtttgtggaaacattaaaaaaaattggttatcccaaagctgataatcttaatggagaagactttgactggttgtttgagggcgttgaagatgaatcgtttctgaagtggttttgtgggaatgtgaatgaacagaacgtgttgtctgaaagagaattggaagcttttagcattcttcagaaatcaggcaagcctattctagaaggggcggcattggatgaagctcttaaaacgtgtaaaacttctgatttgaagacacctagactggatgataaagagctggagaaattagaggatgaggttcaaactctactgaaattaaagaacctaaaaattcagcgacgtaataaatgtcaattgatggcttcagtaactagccacaaatctctgaggttaaatgctaaagaagaagaagccactaaaaagctgaagcagagtcaaggaattctaaatgcaatgatcactaagatcagtaatgaacttcaggctcttactgatgaagttacacaattgatgatgttcttcagacattctaatttaggtcaagggacaaatccactggtatttttatcgcaattttccttggaaaaatacctaagtcaggaagagcaaagcacagcagcattaactttgtataccaaaaaacagttctttcagggtatacatgaagtagttgaaagttcaaatgaagacaattttcaacttttagatatacagacaccatctatttgtgataatcaagaaatccttgaggagagacgactagagatggctagactgcagctcgcatacatttgtgctcaacatcagttaattcacttaaaagcaagtaattcgagcatgaagtcaagtataaaatgggcagaggagagtcttcacagcctaaccagcaaggctgtggacaaagaaaatttggatgctaaaatttctagcttgaccagtgagattatgaaacttgaaaaagaggtcactcaaataaaagacagaagtttacctgctgtggtaagagagaatgcccagttattgaatatgccagtggtaaagggagattttgatctgcagattgctaaacaagattattatacagcaagacaagagttagttttaaatcaattaataaaacaaaaggcatcatttgaacttctacagttatcatatgaaattgaattaagaaagcatcgggacatatatcgtcaacttgaaaatttggttcaagaacttagtcaaagtaacatgatgctctacaagcaattagaaatgttaacagatccatcagtttctcaacagataaatccaaggaataccattgatactaaggattattctactcataggctttaccaagttttggagggagagaataagaaaaaagaattgtttctaactcatggaaaccttgaggaagtggctgagaaattgaaacagaatatttctttagtacaagatcagttggcagtatctgctcaagaacattctttctttctgtccaaacggaataaggatgtggacatgctttgtgatactttgtatcaaggaggaaatcagcttttgcttagtgatcaggagttaacagagcagtttcataaagttgaatctcaactgaataagctaaatcatctcctcactgatattcttgctgatgtgaagacaaaaagaaaaactttggcaaataataaattacatcaaatggaaagagaattctatgtatattttttaaaagatgaagattatctgaaagatattgtggagaatttagaaactcaatcaaagattaaggctgttagtcttgaagattgaaaattactgaaaactgaatctttattacgtgtcctcttttatttattagaagactgtgtataataaacactactaaatttttaaaa

SEQ ID NO: 13218 - DNA, 574 bp, Homo sapiens
  source 1..574: mol_type = unassigned DNA
gtgaggcagtgcgaggcgcgcggggcacggagggcggtggcggcgggctcctgcgagaagcaagcggaacttcctgagctcggtgtcgacggcgattcggtgggcttgtgcgtttgttttgtcagcgtgcttaggtgtcacagctgggtgaccctccgaaggaaggttttgccgctggcgcgtctggtgtatcgcggccttggggccgcggatccctggggcttgccgctgcctctggggttcgcgcggccctggcgtcggggctgcctcagcgctggctgaaggccggcccgaagcacccttaattgtggccgcgcgcttccctgctgctcctgctgttctccgcgtcgcggtggtggactctggaggtggagccttgcccggcgagacgttgaggaggaatcattatagattctaaaaatatattttcccttctctgtggacttggtataaaacgtagctttttttctgcttggatttattttctaaaaatcaacaccgtaaacccatatcagatacaacaaaattggggtagttaaaaccatgagttgtggaaatgagtttgtggaaacat

SEQ ID NO: 13219 - DNA, 580 bp, Homo sapiens
  source 1..580: mol_type = unassigned DNA
agtgcgaggcgcgcggggcacggagggcggtggcggcgggctcctgcgagaagcaagcggaacttcctgaggtgtcacagctgggtgaccctccgaaggaaggttttgccgctggcgcgtctggtgtatcgcggccttggggccgcggatccctggggcttgccgctgcctctggggttcgcgcggccctggcgtcggggctgcctcagcgctggctgaaggccggcccgaagcacccttaattgtggccgcgcgcttccctgctgctcctgctgttctccgcgtcgcggtggtggactctggaggtggagccttgcccggcgagacgttgaggaggaatcattatagattctaaaaatatattttcccttctctgtggacttggtataaaacgtagctttttttctgcttggatttattttctaaaaatcaacaccgtaaacccatatcagatacaacaaaattggggtagttaaaaccatgagttgtggaaatgagtttgtggaaacattaaaaaaaattggttatcccaaagctgataatcttaatggagaagactttgactggttgtttgagggcg

SEQ ID NO: 13220 - DNA, 1642 bp, Homo sapiens
  source 1..1642: mol_type = unassigned DNA
gccccgcctccacctccttcgtcgcggcctctagtgcactttcggctccttccccttcccgggcctttcagcttggtctttccgggcctcgcttcccccagcccctgcgcccggcccgaacgagaggttccggagccccggcgcgggcgggttctggggtgtagacgctgctggccagcccgccccagccgaggttctcggcaccgccttgagagcttcagctgccccaggattagaatcccaagaaaatcaaatggcatccggggatttctgctcacctggagaagggatggaaatacttcaacaagtgtgcagcaaacaacttcctccttgtaacctgagtaaagaggacctgttacagaacccatacttcagcaagcttctcctgaatctctcacagcatgtggatgagagtggcttaagcctcaccctagcaaaggagcaggctcaggcatggaaggaagttcgactgcataagacaacatggttgaggtctgagattttacacagagtcattcaagagttgcttgtggactactatgtgaagatacaagacacaaatgtaacttctgaggacaaaaagtttcatgagacccttgaacagcggctgcttgtaactgaactgatgcggctcttaggtcctagccaggagagggagatacctccactgctggggctggagaaagcggaccttctggaactcatgccactctcagaggattttgtgtggatgagggctcggctacagcaagaagtagaggagcagctcaaaaagaaatgtttcactctgctctgctactatgatcccaattcagatgctgacagtgaaaccgtgaaggcagcaaaggtgtggaaactcgcagaggtcctggtgggtgagcagcagcagtgccaggatgccaagagccagcagaaggagcagatgttgctgctggagaagaagagtgctgcttactcccaggtgcttctccgctgcctcactttgctgcagaggcttcttcaagaacaccggctgaagactcaatccgagctagaccgcatcaatgcccagtacctggaagtcaagtgcggtgctatgatccttaagctgaggatggaggagctaaagattttgtccgacacttacactgttgagaaagtggaagttcatcgtctgattagggaccgtttggagggagccattcacctacaggagcaggacatggagaactcaagacaggtcctgaactcctatgaggtccttggggaggagtttgacaggctggtgaaagagtacaccgtactcaagcaggcaacagagaacaagcggtgggccctccaggagttcagcaaggtctaccgttgagctctggcagggccaggagacatggcttctgcatagctgctgcctcctaatcttcctgctagtgggaccaccttcacctggggctgccttcagtacaagggagtgtggaaatgcttacgcttgaaacactgcagtcatttaggcactctcctggtttctctttattttttatgactgggcctcttctggaaaatctagcaaggagatttatataatttttatgcatagctgtgtgtcagtgtcagccctgtattgtatttgattatctcctgaataaagttatgatattatatctta

SEQ ID NO: 13221 - DNA, 1474 bp, Homo sapiens
  source 1..1474: mol_type = unassigned DNA
ggcctctagtgcactttcggctccttccccttcccgggcctttcagcttggtctttccgggcctcgcttcccccagcccctgcgcccggcccgaacgagaggttccggagccccggcgcgggcgggttctggggtgtagacgctgctggccagcccgccccagccgaggttctcggcaccgccttgagagcttcagctgccccaggattagaatcccaagaaaatcaaatggcatccggggatttctgctcacctggagaagggatggaaatacttcaacaagtgtgcagcaaacaacttcctccttgtaacctgagtaaagaggacctgttacagaacccatacttcagcaagcttctcctgaatctctcacagcatgtggatgagagtggcttaagcctcaccctagcaaaggagcaggctcaggcatggaaggaagttcgactgcataagacaacatggttgaggtctgagattttacacagagtcattcaagagttgcttgtggactactatgtgaagatacaagacacaaatgtaacttctgaggacaaaaaggattttgtgtggatgagggctcggctacagcaagaagtagaggagcagctcaaaaagaaatgtttcactctgctctgctactatgatcccaattcagatgctgacagtgaaaccgtgaaggcagcaaaggtgtggaaactcgcagaggtcctggtgggtgagcagcagcagtgccaggatgccaagagccagcagaaggagcagatgttgctgctggagaagaagagtgctgcttactcccaggtgcttctccgctgcctcactttgctgcagaggcttcttcaagaacaccggctgaagactcaatccgagctagaccgcatcaatgcccagtacctggaagtcaagtgcggtgctatgatccttaagctgaggatggaggagctaaagattttgtccgacacttacactgttgagaaagtggaagttcatcgtctgattagggaccgtttggagggagccattcacctacaggagcaggacatggagaactcaagacaggtcctgaactcctatgaggtccttggggaggagtttgacaggctggtgaaagagtacaccgtactcaagcaggcaacagagaacaagcggtgggccctccaggagttcagcaaggtctaccgttgagctctggcagggccaggagacatggcttctgcatagctgctgcctcctaatcttcctgctagtgggaccaccttcacctggggctgccttcagtacaagggagtgtggaaatgcttacgcttgaaacactgcagtcatttaggcactctcctggtttctctttattttttatgactgggcctcttctggaaaatctagcaaggagatttatataatttttatgcatagctgtgtgtcagtgtcagccctgtattgtatttgattatctcctgaataaagttatgatatt

SEQ ID NO: 13222 - DNA, 1428 bp, Homo sapiens
  source 1..1428: mol_type = unassigned DNA
cctccacctccttcgtcgcggcctctagtgcactttcggctccttccccttcccgggcctttcagcttggtctttccgggcctcgcttcccccagcccctgcgcccggcccgaacgagaggttccggagccccggcgcgggcgggttctggggtgtagacgctgctggccagcccgccccagccgaggttctcggcaccgccttgagagcttcagctgccccagggtgtgcaggtttgctttagagggtcggcgggcggagcttcggggaagaggagctctgggagagtcattccggccagtggccggagaccgtcgtcgctcttgggaatccttggccgcccagacagaagggaagtaggcgccggagagcccgttctgcattttgattcatctcgggccctattagaatcccaagaaaatcaaatggcatccggggatttctgctcacctggagaagggatggaaatacttcaacaagtgtgcagcaaacaacttcctccttgtaacctgagtaaagaggacctgttacagaacccatacttcagcaagcttctcctgaatctctcacagcatgtggatgagagtggcttaagcctcaccctagcaaaggagcaggctcaggcatggaaggaagttcgactgcataagacaacatggttgaggtctgagattttacacagagtcattcaagagttgcttgtggactactatgtgaagatacaagacacaaatgtaacttctgaggacaaaaaggtgcttctccgctgcctcactttgctgcagaggcttcttcaagaacaccggctgaagactcaatccgagctagaccgcatcaatgcccagtacctggaagtcaagtgcggtgctatgatccttaagctgaggatggaggagctaaagattttgtccgacacttacactgttgagaaagtggaagttcatcgtctgattagggaccgtttggagggagccattcacctacaggagcaggacatggagaactcaagacaggtcctgaactcctatgaggtccttggggaggagtttgacaggctggtgaaagagtacaccgtactcaagcaggcaacagagaacaagcggtgggccctccaggagttcagcaaggtctaccgttgagctctggcagggccaggagacatggcttctgcatagctgctgcctcctaatcttcctgctagtgggaccaccttcacctggggctgccttcagtacaagggagtgtggaaatgcttacgcttgaaacactgcagtcatttaggcactctcctggtttctctttattttttatgactgggcctcttctggaaaatctagcaaggagatttatataatttttatgcatagctgtgtgtcagtgtcagccctgtattgtatttgattatctcctgaataaagttatgatatt

SEQ ID NO: 13223 - DNA, 1198 bp, Homo sapiens
  source 1..1198: mol_type = unassigned DNA
ttcagcttggtctttccgggcctcgcttcccccagcccctgcgcccggcccgaacgagaggttccggagccccggcgcgggcgggttctggggtgtagacgctgctggccagcccgccccagccgaggttctcggcaccgccttgagagcttcagctgccccagggtgtgcagattagaatcccaagaaaatcaaatggcatccggggatttctgctcacctggagaagggatggaaatacttcaacaagtgtgcagcaaacaacttcctccttgtaacctgagtaaagaggacctgttacagaacccatacttcagcaagcttctcctgaatctctcacagcatgtggatgagagtggcttaagcctcaccctagcaaaggagcaggctcaggcatggaaggaagttcgactgcataagacaacatggttgaggtctgagattttacacagagtcattcaagagttgcttgtggactactatgtgaagatacaagacacaaatgtaacttctgaggacaaaaaggtgcttctccgctgcctcactttgctgcagaggcttcttcaagaacaccggctgaagactcaatccgagctagaccgcatcaatgcccagtacctggaagtcaagtgcggtgctatgatccttaagctgaggatggaggagctaaagattttgtccgacacttacactgttgagaaagtggaagttcatcgtctgattagggaccgtttggagggagccattcacctacaggagcaggacatggagaactcaagacaggtcctgaactcctatgaggtccttggggaggagtttgacaggctggtgaaagagtacaccgtactcaagcaggcaacagagaacaagcggtgggccctccaggagttcagcaaggtctaccgttgagctctggcagggccaggagacatggcttctgcatagctgctgcctcctaatcttcctgctagtgggaccaccttcacctggggctgccttcagtacaagggagtgtggaaatgcttacgcttgaaacactgcagtcatttaggcactctcctggtttctctttattttttatgactgggcctcttctggaaaatctagcaaggagatttatataatttttatgcatagctgtgtgtcagtgtcagccctgtattgtatttgattatctcctgaataaagttatgatatt

SEQ ID NO: 13224 - DNA, 1447 bp, Homo sapiens
  source 1..1447: mol_type = unassigned DNA
gggcctttcagcttggtctttccgggcctcgcttcccccagcccctgcgcccggcccgaacgagaggttccggagccccggcgcgggcgggttctggggtgtagacgctgctggccagcccgccccagccgaggttctcggcaccgccttgagagcttcagctgccccagggtgtgcagattagaatcccaagaaaatcaaatggcatccggggatttctgctcacctggagaagggatggaaatacttcaacaaggcatggaaggaagttcgactgcataagacaacatggttgaggtctgagattttacacagagtcattcaagagttgcttgtggactactatgtgaagatacaagacacaaatgtaacttctgaggacaaaaagtttcatgagacccttgaacagcggctgcttgtaactgaactgatgcggctcttaggtcctagccaggagagggagatacctccactgctggggctggagaaagcggaccttctggaactcatgccactctcagaggattttgtgtggatgagggctcggctacagcaagaagtagaggagcagctcaaaaagaaatgtttcactctgctctgctactatgatcccaattcagatgctgacagtgaaaccgtgaaggcagcaaaggtgtggaaactcgcagaggtcctggtgggtgagcagcagcagtgccaggatgccaagagccagcagaaggagcagatgttgctgctggagaagaagagtgctgcttactcccaggtgcttctccgctgcctcactttgctgcagaggcttcttcaagaacaccggctgaagactcaatccgagctagaccgcatcaatgcccagtacctggaagtcaagtgcggtgctatgatccttaagctgaggatggaggagctaaagattttgtccgacacttacactgttgagaaagtggaagttcatcgtctgattagggaccgtttggagggagccattcacctacaggagcaggacatggagaactcaagacaggtcctgaactcctatgaggtccttggggaggagtttgacaggctggtgaaagagtacaccgtactcaagcaggcaacagagaacaagcggtgggccctccaggagttcagcaaggtctaccgttgagctctggcagggccaggagacatggcttctgcatagctgctgcctcctaatcttcctgctagtgggaccaccttcacctggggctgccttcagtacaagggagtgtggaaatgcttacgcttgaaacactgcagtcatttaggcactctcctggtttctctttattttttatgactgggcctcttctggaaaatctagcaaggagatttatataatttttatgcatagctgtgtgtcagtgtcagccctgtattgtatttgattatctcctgaataaagttatgatattatatctta

SEQ ID NO: 13225 - DNA, 1637 bp, Homo sapiens
  source 1..1637: mol_type = unassigned DNA
cctccttcgtcgcggcctctagtgcactttcggctccttccccttcccgggcctttcagcttggtctttccgggcctcgcttcccccagcccctgcgcccggcccgaacgagaggttccggagccccggcgcgggcgggttctggggtgtagacgctgctggccagcccgccccagccgaggttctcggcaccgccttgagagcttcagctgccccagggtgtgcagattagaatcccaagaaaatcaaatggcatccggggatttctgctcacctggagaagggatggaaatacttcaacaagtgtgcagcaaacaacttcctccttgtaacctgagtaaagaggacctgttacagaacccatacttcagcaagcttctcctgaatctctcacagcatgtggatgagagtggcttaagcctcaccctagcaaaggagcaggctcaggcatggaaggaagttcgactgcataagacaacatggttgaggtctgagattttacacagagtcattcaagagttgcttgtggactactatgtgaagatacaagacacaaatgtaacttctgaggacaaaaagtttcatgagacccttgaacagcggctgcttgtaactgaactgatgcggctcttaggtcctagccaggagagggagatacctccactgctggggctggagaaagcggaccttctggaactcatgccactctcagaggattttgtgtggatgagggctcggctacagcaagaagtagaggagcagctcaaaaagaaatgtttcactctgctctgctactatgatcccaattcagatgctgacagtgaaaccgtgaaggcagcaaaggtgtggaaactcgcagaggtcctggtgggtgagcagcagcagtgccaggatgccaagagccagcagaaggagcagatgttgctgctggagaagaagagtgctgcttactcccaggtgcttctccgctgcctcactttgctgcagaggcttcttcaagaacaccggctgaagactcaatccgagctagaccgcatcaatgcccagtacctggaagtcaagtgcggtgctatgatccttaagctgaggatggaggagctaaagattttgtccgacacttacactgttgagaaagtggaagttcatcgtctgattagggaccgtttggagggagccattcacctacaggagcaggacatggagaactcaagacaggtcctgaactcctatgaggtccttggggaggagtttgacaggctggtgaaagagtacaccgtactcaagcaggcaacagagaacaagcggtgggccctccaggagttcagcaaggtctaccgttgagctctggcagggccaggagacatggcttctgcatagctgctgcctcctaatcttcctgctagtgggaccaccttcacctggggctgccttcagtacaagggagtgtggaaatgcttacgcttgaaacactgcagtcatttaggcactctcctggtttctctttattttttatgactgggcctcttctggaaaatctagcaaggagatttatataatttttatgcatagctgtgtgtcagtgtcagccctgtattgtatttgattatctcctgaataaagttatgatattatatctt

SEQ ID NO: 13226 - DNA, 652 bp, Homo sapiens
  source 1..652: mol_type = unassigned DNA
gggcctttcagcttggtctttccgggcctcgcttcccccagcccctgcgcccggcccgaacgagaggttccggagccccggcgcgggcgggttctggggtgtagacgctgctggccagcccgccccagccgaggttctcggcaccgccttgagagcttcagctgccccagggtgtgcaggtttgctttagagggtcggcgggcggagcttcggggaagaggagctctgggagagtcattccggccagtggccggagaccgtcgtcgctcttgggaatccttggccgcccagacagaagggaagtaggcgccggagagcccgttctgcattttgattcatctcgggccctattagaatcccaagaaaatcaaatggcatccggggatttctgctcacctggagaagggatggaaatacttcaacaaggcatggaaggaagttcgactgcataagacaacatggttgaggtctgagattttacacagagtcattcaagagttgcttgtggactactatgtgaagatacaagacacaaatgtaacttctgaggacaaaaagtttcatgagacccttgaacagcggctgcttgtaactgaactgatgcggctcttaggtcctagccaggagagggagatacctccactgctggggc

SEQ ID NO: 13227 - DNA, 983 bp, Homo sapiens
  source 1..983: mol_type = unassigned DNA
cacctccttcgtcgcggcctctagtgcactttcggctccttccccttcccgggcctttcagcttggtctttccgggcctcgcttcccccagcccctgcgcccggcccgaacgagaggttccggagccccggcgcgggcgggttctggggtgtagacgctgctggccagcccgccccagccgaggttctcggcaccgccttgagagcttcagctgccccagggtgtgcaggtttgctttagagggtcggcgggcggagcttcggggaagaggagctctgggagagtcattccggccagtggccggagaccgtcgtcgctcttgggaatccttggccgcccagacagaagggaagtaggcgccggagagcccgttctgcattttgattcatctcgggccctattagaatcccaagaaaatcaaatggcatccggggatttctgctcacctggagaagggatggaaatacttcaacaagtgtgcagcaaacaacttcctccttgtaacctgagtaaagaggacctgttacagaacccatacttcagcaagcttctcctgaatctctcacagcatgtggatgagagtggcttaagcctcaccctagcaaaggagcaggctcaggcatggaaggaagttcgactgcataagacaacatggttgaggtctgagattttacacagagtcattcaagagttgcttgtggactactatgtgaagatacaagacacaaatgtaacttctgaggacaaaaagtttcatgagacccttgaacagcggctgcttgtaactgaactgatgcggctcttaggtcctagccaggagagggagatacctccactgctggggctggagaaagcggaccttctggaactcatgccactctcagaggattttgtgtggatgagggctcggctacagcaagaagtagaggagcagctcaaaaagaaatgtttcactctgctctgctactatgatcccaattcag

SEQ ID NO: 13228 - DNA, 1107 bp, Homo sapiens
  source 1..1107: mol_type = unassigned DNA
gagtgtggccccgcctccacctccttcgtcgcggcctctagtgcactttcggctccttccccttcccgggcctttcagcttggtctttccgggcctcgcttcccccagcccctgcgcccggcccgaacgagaggttccggagccccggcgcgggcgggttctggggtgtagacgctgctggccagcccgccccagccgaggttctcggcaccgccttgagagcttcagctgccccagggtgtgcagattagaatcccaagaaaatcaaatggcatccggggatttctgctcacctggagaagggatggaaatacttcaacaagtgtgcagcaaacaacttcctccttgtaacctgagtaaagaggacctgttacagaacccatacttcagcaagcttctcctgaatctctcacagcatgtggatgagagtggcttaagcctcaccctagcaaaggagcaggctcaggcatggaaggaagttcgactgcataagacaacatggttgaggtctgagattttacacagagtcattcaagagttgcttgtggactactatgtgaagatacaagacacaaatgtaacttctgaggacaaaaagtttcatgagacccttgaacagcggctgcttgtaactgaactgatgcggctcttaggtcctagccaggagagggagatacctccactgctggggctggagaaagcggaccttctggaactcatgccactctcagaggattttgtgtggatgagggctcggctacagcaagaagtagaggagcagctcaaaaagaaatgtttcactctgctctgctactatgatcccaattcagatgctgacagtgaaaccgtgaaggcagcaaaggtgtggaaactcgcagaggtcctggtgggtgagcagcagcagtgccaggatgccaagagccagcagaaggagcagatgttgctgctggagaagaagagtgctgcttactcccaggtgcttctccgctgcctcactttgctgcagaggcttcttcaagaacaccggctgaagactcaatccgagctagaccgcatcaatgcccagtacctggaagtcaagtgcggtgctatgatccttaagctgag

SEQ ID NO: 13229 - DNA, 1454 bp, Homo sapiens
  source 1..1454: mol_type = unassigned DNA
ctctagtgcactttcggctccttccccttcccgggcctttcagcttggtctttccgggcctcgcttcccccagcccctgcgcccggcccgaacgagaggttccggagccccggcgcgggcgggttctggggtgtagacgctgctggccagcccgccccagccgaggttctcggcaccgccttgagagcttcagctgccccagggtgtgcagattagaatcccaagaaaatcaaatggcatccggggatttctgctcacctggagaagggatggaaatacttcaacaagtgtgcagcaaacaacttcctccttgtaacctgagtaaagaggacctgttacagaacccatacttcagcaagcttctcctgaatctctcacagcatgtggatgagagtggcttaagcctcaccctagcaaaggagcaggctcaggcatggaaggaagttcgactgcataagacaacatggttgaggtctgagattttacacagagtcattcaagagttgcttgtggactactatgtgaagatacaagacacaaatgtaacttctgaggacaaaaaggattttgtgtggatgagggctcggctacagcaagaagtagaggagcagctcaaaaagaaatgtttcactctgctctgctactatgatcccaattcagatgctgacagtgaaaccgtgaaggcagcaaaggtgtggaaactcgcagaggtcctggtgggtgagcagcagcagtgccaggatgccaagagccagcagaaggagcagatgttgctgctggagaagaagagtgctgcttactcccaggtgcttctccgctgcctcactttgctgcagaggcttcttcaagaacaccggctgaagactcaatccgagctagaccgcatcaatgcccagtacctggaagtcaagtgcggtgctatgatccttaagctgaggatggaggagctaaagattttgtccgacacttacactgttgagaaagtggaagttcatcgtctgattagggaccgtttggagggagccattcacctacaggagcaggacatggagaactcaagacaggtcctgaactcctatgaggtccttggggaggagtttgacaggctggtgaaagagtacaccgtactcaagcaggcaacagagaacaagcggtgggccctccaggagttcagcaaggtctaccgttgagctctggcagggccaggagacatggcttctgcatagctgctgcctcctaatcttcctgctagtgggaccaccttcacctggggctgccttcagtacaagggagtgtggaaatgcttacgcttgaaacactgcagtcatttaggcactctcctggtttctctttattttttatgactgggcctcttctggaaaatctagcaaggagatttatataatttttatgcatagctgtgtgtcagtgtcagccctgtattgtatttgatt

SEQ ID NO: 13230 - DNA, 1626 bp, Homo sapiens
  source 1..1626: mol_type = unassigned DNA
ttcgtcgcggcctctagtgcactttcggctccttccccttcccgggcctttcagcttggtctttccgggcctcgcttcccccagcccctgcgcccggcccgaacgagaggttccggagccccggcgcgggcgggttctggggtgtagacgctgctggccagcccgccccagccgaggttctcggcaccgccttgagagcttcagctgccccagggtgtgcaggtttgctttagagggtcggcgggcggagcttcggggaagaggagctctgggagagtcattccggccagtggccggagaccgtcgtcgctcttgggaatccttggccgcccagacagaagggaagtaggcgccggagagcccgttctgcattttgattcatctcgggccctattagaatcccaagaaaatcaaatggcatccggggatttctgctcacctggagaagggatggaaatacttcaacaagtgtgcagcaaacaacttcctccttgtaacctgagtaaagaggacctgttacagaacccatacttcagcaagcttctcctgaatctctcacagcatgtggatgagagtggcttaagcctcaccctagcaaaggagcaggctcaggcatggaaggaagttcgactgcataagacaacatggttgaggtctgagattttacacagagtcattcaagagttgcttgtggactactatgtgaagatacaagacacaaatgtaacttctgaggacaaaaaggattttgtgtggatgagggctcggctacagcaagaagtagaggagcagctcaaaaagaaatgtttcactctgctctgctactatgatcccaattcagatgctgacagtgaaaccgtgaaggcagcaaaggtgtggaaactcgcagaggtcctggtgggtgagcagcagcagtgccaggatgccaagagccagcagaaggagcagatgttgctgctggagaagaagagtgctgcttactcccaggtgcttctccgctgcctcactttgctgcagaggcttcttcaagaacaccggctgaagactcaatccgagctagaccgcatcaatgcccagtacctggaagtcaagtgcggtgctatgatccttaagctgaggatggaggagctaaagattttgtccgacacttacactgttgagaaagtggaagttcatcgtctgattagggaccgtttggagggagccattcacctacaggagcaggacatggagaactcaagacaggtcctgaactcctatgaggtccttggggaggagtttgacaggctggtgaaagagtacaccgtactcaagcaggcaacagagaacaagcggtgggccctccaggagttcagcaaggtctaccgttgagctctggcagggccaggagacatggcttctgcatagctgctgcctcctaatcttcctgctagtgggaccaccttcacctggggctgccttcagtacaagggagtgtggaaatgcttacgcttgaaacactgcagtcatttaggcactctcctggtttctctttattttttatgactgggcctcttctggaaaatctagcaaggagatttatataatttttatgcatagctgtgtgtcagtgtcagccctgtattg

SEQ ID NO: 13231 - DNA, 582 bp, Homo sapiens
  source 1..582: mol_type = unassigned DNA
tcccccagcccctgcgcccggcccgaacgagaggttctcggcaccgccttgagagcttcagctgccccagggtgtgcagattagaatcccaagaaaatcaaatggcatccggggatttctgctcacctggagaagggatggaaatacttcaacaagtgtgcagcaaacaacttcctccttgtaacctgagtaaagaggacctgttacagaacccatacttcagcaagcttctcctgaatctctcacagcatgtggatgagagtggcttaagcctcaccctagcaaaggagcaggctcaggcatggaaggaagttcgactgcataagacaacatggttgaggtctgagattttacacagagtcattcaagagttgcttgtggactactatgtgaagatacaagacacaaatgtaacttctgaggacaaaaagtttcatgagacccttgaacagcggctgcttgtaactgaactgatgcggctcttaggtcctagccaggagagggagatacctccactgctggggctggagaaagcggaccttctggaactcatgccactctcagaggattttgtgtggatga

SEQ ID NO: 13232 - DNA, 4309 bp, Homo sapiens
  source 1..4309: mol_type = unassigned DNA
cgccacacttgaagaggctgagggaggcggtgtcgccgccgcggcgctgtcatggagctagcgcaggaagcgcgggaactgggttgctgggcggtcgaagagatgggggtgcccgtggcggcccgggccccggaatcgacgctgcgcaggctgtgtctgggccagggggctgacatctgggcctacatcttgcagcatgtgcacagtcagaggactgtcaagaagatccggggaaacctactctggtatggccaccaggacagtccacaggtccgtcggaagttagagctggaagctgctgtgacccgcctgcgggcagaaatccaggaactcgaccagagcctggagctgatggagcgagacactgaggctcaggacacggccatggagcaggcacgtcagcacactcaagacacccagcgtcgagctctcctcctccgggcccaagctggggccatgcgaagacagcagcatacgctccgagatcccatgcagcggctgcagaatcaactgaggcgcctgcaggacatggagaggaaagccaaagtagatgtgacctttggatccctcacgtcggcagctctgggcctggagcccgtggtcctgcgtgatgtccgaacagcctgcaccctccgggcccagttcctgcagaacctcctgcttccccaggccaagaggggcagcctcccaacccctcatgatgaccactttggcacttcgtaccagcagtggctgagctcagtggagacgctgctgacaaaccaccccccaggccacgtcctggctgccttggagcacctggctgcagagcgggaggcagagattcggtccctgtgcagtggggatgggcttggcgacacagagatatccagaccccaggccccggaccagtcagactccagccagaccctgccgtccatggttcatctcatccaggagggctggcggactgtgggtgtgctggtctcccagcggagcaccctcctgaaggagcggcaagtcttgacccagcgcctccagggcctggtggaggaggtggagagacgcgtcctgggatccagtgagaggcaggtgctgatactggggcttcggcgctgttgcctgtggacggagctcaaggccctgcacgatcagagccaggagctgcaggatgcagctgggcatcggcagctcctgctgagggagctacaggccaaacagcagcggatcctgcactggcgccagctggtggaggagacccaggaacaggtccgcctgctcatcaagggaaactcggccagcaagacccgcctgtgccggagcccgggggaggtgctagctctggtccagcgaaaggtggtccctacatttgaggcagtggcaccacagagccgggagctgctgcgctgtctggaggaggaagtccggcatttgccccacattctgttgggcacgctgctgcggcacaggccgggagagttgaagcccctgcccacggtcctcccatccatccaccagctgcaccccgcgtccccaaggggctccagcttcatagcgctgagccacaagctggggctgcctccagggaaggcctcggagctgctcctgccggcggctgcctctcttcgccaggaccttctgctcctgcaggaccagcggagcctctggtgctgggatctactccacatgaagaccagcctgccgccaggccttcccacccaggagctgctgcagatccaggcatcccaggaaaaacagcagaaagagaacctggggcaggctctgaagaggctggagaagctactgaaacaggcactggagcgaatccctgagctgcaggggatcgtgggggactggtgggagcagccaggccaggccgccctctctgaggagctctgccagggcctgtccctgccccagtggcggctgcgctgggttcaggcccagggggccctgcagaagctgtgcagctgaagagagggttcaaacggaagccgagaacttgacactgttcaccccaacacctcacctcccccaggacatttggaagaaagcagcgccaggattcctcggcagtcgtccccacccgcacctgcagtcccctcatgtgctgttctgctgccccactcagctcctggaccctgtcctttcatcccgctaaagcaccccctaaaaccccttcatcactttcattctcagcaaaaagtaattgagcacctcctctaggcgctggggagtccacactgaacaaaagaaacagaaaaccctgtcttccagcagttgagttctagggcagggagacagagtttacaagataaggaaaatatatatgtagtatgctgcaagttaactgctgtgtgggaaatccagcagggggtgggatgtgtgatttgaattgagggccacactgcccaggtcgtgctccgtcaaggggtgagcaggagcaacaggggtggctgagtaagggcttgcagctggaggcaacagcacatgcaaaggccctgagccaggatgtgctgcaataagggccactgagggggacagtgtaggttgggggtgaggaatgtattaaaagatgagattgccttctagtttgtatagtttctttttttacatgtaaatcagccatttggaatttatcctagcacatggatccaattttgtcttattttacatatatcctagtagcacttactgaaattcccagtcagagtggcagttgcctctgagggaaggtgggtggcagggatcaactgaggaggagacacagaaatgtcctagctgatgggaatgtgctgtgtcaagagcagcggcggtgacgcaggtgtagagatttgtcagagctcatgtagttgtagtcttaaggcctgtgcatttcactgcgtgggttactcaatttataaagcaaagcccttacacttttgagatgccacctttttatgcactaaatttccatgtttaattgggttatatctggcttctctccagacctgctttgtatttaactctccatgtgtcattcctacagtagcttaatagaaaggcttgtgacacattgtcatatctgttcttgttttcttttgttttttttttttttttttttgagatgcagtctcattctgttgcccaagttggagtgcagtggcatgatctcagctcactgcaacctccgcctcccaggttcaagccattctcatgcctcagcttccccagtagctaggattacaggtacgcaccaccacgcccagctcatttttgtacttttagtagggacggggtttcatcatgttggccagactggtctcgaactcctgacctcaagtgatctgcctgcctcggcctcccaaagtgctgggattacaggcatgagccaccgcgcctgaccacattgccatatctgaaatggctggattctcttaggtgcttttctttttctttctttctttctttttttgagacagaatctggctgtttcccaggctgaagtgcagtggcatgaactcagctcactgcaacctctgcctcctggattcaaacaattctcatgtctcagcctcctgaatagctgggattacaggcacccaccaccatatctggctaatatttgtattttttgtagagtcggagctttaccatgttggtcaggctgctctccaactcctggcctcaagtgattctatcgcctctgcctcccaaatcttcacctgctgggattagtttcccctgtctcagtaaattttttttcccaaactaagtgaacattagatttaatttggctggccccagaagaaaaacatgcacagatggtagttttactggtgttgcagtaagttttcaaatttggaagtttggcagctttatgatcttgaaccttgctgtccatctctcacacaactcctctcttggcctccagagtccctttactctcccagctttcctcctgcccctggctgctgtttcccagcctttccacattggctttcccatgtagtccttagtgtgtctgctcctcctctctctcctcatcacagttcccagcccccaccttcaactgaactcaacaaaatcttcaacttcatacagtagtcacattgttagtaataacactggcatttttattttgataaaatagaccgtttaaatttttgagattctaccttatattttttgaattatatactaaagcaaataagtagtgatgtaatgtcattggggaccaagatttttagtgtaaatgaaaaaagataacaaatataaactcaagtaaacaccctgtagtctttcacatgaattggaaatatcagaataaagtcatgatttttctctttct

SEQ ID NO: 13233 - DNA, 2477 bp, Homo sapiens
  source 1..2477: mol_type = unassigned DNA
ggtgtcgccgccgcggcgctgtcatggagctagcgcaggaagcgcgggaactgggttgctgggcggtcgaagagatgggggtgcccgtggcggcccgggccccggaatcgacgctgcgcaggctgtgtctgggccagggggctgacatctgggcctacatcttgcagcatgtgcacagtcagaggactgtcaagaagatccggggaaacctactctggtatggccaccaggacagtccacaggtccgtcggaagttagagctggaagctgctgtgacccgcctgcgggcagaaatccaggaactcgaccagagcctggagctgatggagcgagacactgaggctcaggacacggccatggagcaggcacgtcagcacactcaagacacccagcgtcgagctctcctcctccgggcccaagctggggccatgcgaagacagcagcatacgctccgagatcccatgcagcggctgcagaatcaactgaggcgcctgcaggacatggagaggaaagccaaagtagatgtgacctttggatccctcacgtcggcagctctgggcctggagcccgtggtcctgcgtgatgtccgaacagcctgcaccctccgggcccagttcctgcagaacctcctgcttccccaggccaagaggggcagcctcccaacccctcatgatgaccactttggcacttcgtaccagcagtggctgagctcagtggagacgctgctgacaaaccaccccccaggccacgtcctggctgccttggagcacctggctgcagagcgggaggcagagattcggtccctgtgcagtggggatgggcttggcgacacagagatatccaggagggctggcggactgtgggtgtgctggtctcccagcggagcaccctcctgaaggagcggcaagtcttgacccagcgcctccagggcctggtggaggaggtggagagacgcgtcctgggatccagtgagaggcaggtgctgatactggggcttcggcgctgttgcctgtggacggagctcaaggccctgcacgatcagagccaggagctgcaggatgcagctgggcatcggcagctcctgctgagggagctacaggccaaacagcagcggatcctgcactggcgccagctggtggaggagacccaggaacaggtccgcctgctcatcaagggaaactcggccagcaagacccgcctgtgccggagcccgggggaggtgctagctctggtccagcgaaaggtggtccctacatttgaggcagtggcaccacagagccgggagctgctgcgctgtctggaggaggaagtccggcatttgccccacattctgttgggcacgctgctgcggcacaggccgggagagttgaagcccctgcccacggtcctcccatccatccaccagctgcaccccgcgtccccaaggggctccagcttcatagcgctgagccacaagctggggctgcctccagggaaggcctcggagctgctcctgccggcggctgcctctcttcgccaggaccttctgctcctgcaggaccagcggagcctctggtgctgggatctactccacatgaagaccagcctgccgccaggccttcccacccaggagctgctgcagatccaggcatcccaggaaaaacagcagaaagagaacctggggcaggctctgaagaggctggagaagctactgaaacaggcactggagcgaatccctgagctgcaggggatcgtgggggactggtgggagcagccaggccaggccgccctctctgaggagctctgccagggcctgtccctgccccagtggcggctgcgctgggttcaggcccagggggccctgcagaagctgtgcagctgaagagagggttcaaacggaagccgagaacttgacactgttcaccccaacacctcacctcccccaggacatttggaagaaagcagcgccaggattcctcggcagtcgtccccacccgcacctgcagtcccctcatgtgctgttctgctgccccactcagctcctggaccctgtcctttcatcccgctaaagcaccccctaaaaccccttcatcactttcattctcagcaaaaagtaattgagcacctcctctaggcgctggggagtccacactgaacaaaagaaacagaaaaccctgtcttccagcagttgagttctagggcagggagacagagtttacaagataaggaaaatatatatgtagtatgctgcaagttaactgctgtgtgggaaatccagcagggggtgggatgtgtgatttgaattgagggccacactgcccaggtcgtgctccgtcaaggggtgagcaggagcaacaggggtggctgagtaagggcttgcagctggaggcaacagcacatgcaaaggccctgagccaggatgtgctgcaataagggccactgagggggacagtgtaggttgggggtgaggaatgtattaaaagatgagattgccttct

SEQ ID NO: 13234 - DNA, 3756 bp, Homo sapiens
  source 1..3756: mol_type = unassigned DNA
gcaagatttgttgcaatgaaatatattaaatccaattctaaaaattcttctcatcattttgtagagacatttaacataaaaccacaggacttgcacaaatgcattgccagatgccatttcgcacgtagcagatttttacaaattttgcaaagacaagattgtgttacccaaaaatatcaggaaaatgcacaattatcagttaagcaggtacgaaacttgagatctgaatgtataggattggaaaaccaaataaagaaaatggaaccctatgatgaccacagtaatatggaagaaaaaattcaaaaggttcggtctttgtgggcttcagtgaatgaaacgctcatgtttttggaaaaagagagagaagttgttagttcggtccttagtcttgttaaccaatatgctttagatggaactaatgttgctattaatattccaaggctcttacttgacaaaattgagaaacaaatgtttcagttgcacataggaaatgtttatgaggctggaaaactgaacctcttaacagttattcagttattaaatgaagtcttgaaggtgatgaaatatgaacgttgtcaggctgatcaagcaagattgacggtagaccttcactaccttgaaaaagagaccaaatttcagaaggaaagattatcagatctgaaacatatgaggtatagaataaaagatgatctcacaactataagacattctgttgttgaaaagcaaggagaatggcataaaaagtggaaagaatttcttggtttgtctcctttcagtctaattaaaggttggactccatctgtagatcttttaccaccaatgtctcccctttcgtttgatcctgcctcagaagaagtgtatgcaaagagtattctttgtcagtatcctgcttcacttccagatgcacataagcaacataaccaagaaaatggttgcagaggagacagtgataccttgggagcgctacatgatctagccaacagccctgcctctttcttgtcgcagtcagtttcatcatcagatagaaacagtgttacagtacttgaaaaggacacaaagatgggaactcccaaagaaaaaaatgaagcaatttctaagaaaataccagaatttgaagtggaaaattctccattatcagatgttgcaaagaatacagagagtagtgcatttggagggtctttgccagctaaaaaaagtgatccatttcaaaaagagcaagatcatctggtagaagaggttgccagagcagttttatctgattcaccacagctctctgaaggaaaagaaataaaattagaggaactaattgactctctgggttctaaccccttcttaacaaggaatcagattccccgtactccagaaaacttgataactgaaattaggagctcatggagaaaagctattgaaatggaagaaaacagaactaaagaaccaattcaaatggatgctgaacatagagaagtattgccagaatcattacctgtgttgcacaatcaaagagaatttagcatggctgattttctcttagaaaccactgtatcagattttggccagtctcatttgactgaagagaaagttatttcagattgcgagtgtgtgcctcagaaacatgtgctgaccagtcacatagatgaaccaccaacacaaaatcagtcagatttgttaaataagaaagtaatttgcaagcaagatttggaatgtttagccttcaccaagctttcagaaactagccgaatggagacattctcccctgctgtcggcaataggatagatgtgatgggtggcagtgaagaggagtttatgaaaatattggaccacttagaagtttcttgtaacaaaccttccacaaataaaactatgttgtggaattcttttcagatatcaagtggaattagttctaagagttttaaagataatgattttggcatattacacgaaactctcccggaagaagttggtcatctaagttttaatagttccagtagttcagaggccaattttaaactggagccaaatagtcctatgcatggtggcactcttctagaagatgttgtgggagggagacagactactccagaatcagactttaatttacaggctcttcgcagtagatacgaggctctgaagaaatctctttccaagaaaagggaagaatcttacctctcgaattcccaaacacccgaaagacacaaaccagaattgagccctactccccaaaatgtacaaacagatgatacgcttaactttttggacacctgtgatttgcatactgagcatataaagccatctttacgcacgtccatcggtgaaagaaaacggtctctttcaccactaattaagttttctccagtggaacaaagattgagaaccacaatagcatgtagtcttggagaactacctaatttaaagggtaaggtttaaatagacctatgcatattcacctgttgaagttttctctcaacttttgataaaaccagtacacaaagaatgctgcatgacctttattgttaatgtgctcccccttccttcatttaggatgaggggaatgatccctcactggacaggtcctttcagaatctctgtttatgtatatatagttacaattgatttgagacaggggtgggaaaaaaaagcccccccaatctgaagcttacaggttttataatacaaatgactgaaaagtaaatgtcatcaaaatcttgcccagtggaaggtggtttttaaacacttgagaaacccaattttaaatatcatcactataatggtgtaatatctgggggtggggtgtagaaataaaagaagccaggtcagtgtattagtttcctagggctgccataacaaagcaccatcaagtgggtggcttagaacagcagaaatttattgtctctggagacagtaagttctagaggctagatgtccaaaatcaaggtgttgacagggccatgttccctctgaagccactagaagaggatccttctttgcctcttctagcctctggtagcaccaggcattccttggcttgtggcagtgtaattctaatctttgcctccattgtcacatggtattcttcccttgtgtgtgtattgtcttataaggacacagtcatattagctaattaatgggtcaccctactccagtatgacctcatcttacttagctaattatatctgtaatgaccacatttccaaataaggtcacattctgaggtactggggttagaacttcaacatatgtttttgggggtattcagttcataacagttagtattaataattattgaagctaggtgatggatatattgagttaatcacagttctcttcacttttgtatgtttgaatgttttcctcataaaaggttaaaaaaattgctcttgtagctcattaagagagataaggatctggtgatacagattcattacatactctgatttgcccataatagttatacactgccatattgaaaagtatttggctgggcacagtggctcacacctgcaatcccagcactttgggagtccgagatgggaggatcacttgaacccaggagttcgagactagcctcagcaacacagggagactatgtctctacaaaaaattaaacaattagctgggcacgttggcgcatgcctgtgatcccaggtacacaggaggctgaggtgggaggattgcttgggcctgggagtttgaggctgaagtgagctgcgatcgtgccactgcactccagcctgggtgacagagcaagaccctgtcgca

SEQ ID NO: 13235 - DNA, 6536 bp, Homo sapiens
  source 1..6536: mol_type = unassigned DNA
agaaacccgaaggcccgaggatctgggcacgacagcggttaagcaagcgcagagcaagtcgctggccgcgcaatgcccggtgggtcttgcagtttcttggctgggcatggccggaagggaggagagaaggacgcattgcatggcgggagatatagtctttgccggaagtccctcctccctcggacgcctggcggcgccggcgcacactgctcttccttaagggcgggagtctcggtttgtggtggcttcgctgaggcagtggtggccgcactataccgttagaaactcaatttcccggaggttgtgaggccctttgaggcgaaatcgctctgggcgtgaaaggagcaggcgttggcaatggaaggaccaccgcgacctcaggctgaccgtagggagggatcttgagggccctccgagtcccctgggcttgcgctttctttctttgcagccaccgtgcctaccgcgaggatgagctcggcctcggtcaccgctttcgagaaggagcatctctggatgtatctgcaggcgctcggcttcgagccaggcccggcaaccattgcctgcggaaagatcgtgtcgcacacgcacctcggagtgaacatgtttgacaagctgaaccgtgatgcctttcatataatttcttattttttgtttcaagttctggaccagtctctcaccaaagaagttttcaaattttgttggcccccatttgaccaaaaaagtgacactgaattccgaaaacattgctgtgaatggataaaaaggatttctggtgaatgtggaagtagctttcctcaagttgttggttcactatttctttctcctggtggtcctaagtttattcatctgatgtatcattttgcaagatttgttgcaatgaaatatattaaatccaattctaaaaattcttctcatcattttgtagagacatttaacataaaaccacaggacttgcacaaatgcattgccagatgccatttcgcacgtagcagatttttacaaattttgcaaagacaagattgtgttacccaaaaatatcaggaaaatgcacaattatcagttaagcaggtacgaaacttgagatctgaatgtataggattggaaaaccaaataaagaaaatggaaccctatgatgaccacagtaatatggaagaaaaaattcaaaaggttcggtctttgtgggcttcagtgaatgaaacgctcatgtttttggaaaaagagagagaagttgttagttcggtccttagtcttgttaaccaatatgctttagatggaactaatgttgctattaatattccaaggctcttacttgacaaaattgagaaacaaatgtttcagttgcacataggaaatgtttatgaggctggaaaactgaacctcttaacagttattcagttattaaatgaagtcttgaaggtgatgaaatatgaacgttgtcaggctgatcaagcaagattgacggtagaccttcactaccttgaaaaagagaccaaatttcagaaggaaagattatcagatctgaaacatatgaggtatagaataaaagatgatctcacaactataagacattctgttgttgaaaagcaaggagaatggcataaaaagtggaaagaatttcttggtttgtctcctttcagtctaattaaaggttggactccatctgtagatcttttaccaccaatgtctcccctttcgtttgatcctgcctcagaagaagtgtatgcaaagagtattctttgtcagtatcctgcttcacttccagatgcacataagcaacataaccaagaaaatggttgcagaggagacagtgataccttgggagcgctacatgatctagccaacagccctgcctctttcttgtcgcagtcagtttcatcatcagatagaaacagtgttacagtacttgaaaaggacacaaagatgggaactcccaaagaaaaaaatgaagcaatttctaagaaaataccagaatttgaagtggaaaattctccattatcagatgttgcaaagaatacagagagtagtgcatttggagggtctttgccagctaaaaaaagtgatccatttcaaaaagagcaagatcatctggtagaagaggttgccagagcagttttatctgattcaccacagctctctgaaggaaaagaaataaaattagaggaactaattgactctctgggttctaaccccttcttaacaaggaatcagattccccgtactccagaaaacttgataactgaaattaggagctcatggagaaaagctattgaaatggaagaaaacagaactaaagaaccaattcaaatggatgctgaacatagagaagtattgccagaatcattacctgtgttgcacaatcaaagagaatttagcatggctgattttctcttagaaaccactgtatcagattttggccagtctcatttgactgaagagaaagttatttcagattgcgagtgtgtgcctcagaaacatgtgctgaccagtcacatagatgaaccaccaacacaaaatcagtcagatttgttaaataagaaagtaatttgcaagcaagatttggaatgtttagccttcaccaagctttcagaaactagccgaatggagacattctcccctgctgtcggcaataggatagatgtgatgggtggcagtgaagaggagtttatgaaaatattggaccacttagaagtttcttgtaacaaaccttccacaaataaaactatgttgtggaattcttttcagatatcaagtggaattagttctaagagttttaaagataatgattttggcatattacacgaaactctcccggaagaagttggtcatctaagttttaatagttccagtagttcagaggccaattttaaactggagccaaatagtcctatgcatggtggcactcttctagaagatgttgtgggagggagacagactactccagaatcagactttaatttacaggctcttcgcagtagatacgaggctctgaagaaatctctttccaagaaaagggaagaatcttacctctcgaattcccaaacacccgaaagacacaaaccagaattgagccctactccccaaaatgtacaaacagatgatacgcttaactttttggacacctgtgatttgcatactgagcatataaagccatctttacgcacgtccatcggtgaaagaaaacggtctctttcaccactaattaagttttctccagtggaacaaagattgagaaccacaatagcatgtagtcttggagaactacctaatttaaaggaagaagacattttgaataagagccttgatgcaaaagaaccaccgtctgacttgacaagatgaagacgtacccatttaatataactatgatgcacttaaattgaagctatgccacaggatagaaaatgaattacaacttaaatacatgttggaagtgtaacactgtttttcaaggtttaaaaaaattcctaatgccttttagccttctttaatatttttaggtaaggaaagtatgtttggattttttcctctttgtaggtatatgagattgaaatgtgaagtatttggacaacaaacgtcaagcaatgggaagccattttgatttcttgagtaatcttgtaagcattaagtgaatgacaaagtagtagtgtaacttatttcttatgttataacttcagtcaattaatataaggatagtttttgttgtatgttcactaaatggttaatataatagccattgaatatactaatctttcatcttagagaactatacaacttttattgtttcttaatggaacattctggctaaccagaaaaagtgagaaaagtagtaccttgggatgtgtagtcaagatgacaaattttaagactggaaaagctctaaacaggcttaatgattcttcaggtagaatgatcctgagaagtgatgtttgatggaataaagtgcatgtgatgattaagtgaagactggggcagaatgatttaaaaaaaggaaaaagatggaagatgagtagacacttgcaaggaacactgtcaaactataaatccattcagtgggttgtataacatttatatttagtctaatttagactttgataatttaatgctacttttatattttaacaaaaatataaattaaaattttcattagtctgttttgttgttgggtttttttgtgaggtactccctgttgggggaaaggaacaaggaacaaccatcagaatcccccagtccctacagaatagcctcacagtaacttgagaaaactgaacttggggttaaataacttgtcacacttgcagtctcctgcctcactccttcaggtgccctgcctagaaaaagacttgtgtctagcatccaagtgaacacatactattgccctctgtgaaccaggaggaatggaacaggcaatggaagggtgatagtacctacaataccctttgtagaccccatctcactaccatcaaaatcttgtccactagcccccaaaaaactggcaaggaaagaaggtggaggggaaatttatggaagtagatggcttaatagttatttcttttatcttgggctgcctttctctaagttggttgtcctgtcccagtgtgaagacccatctttttgtgagaaaagacaaaagaaagcacatgtaactaccttctttgcaatggaaaaggagaaagaaaaaatcttctcctaagttgctgttttcttttattagttaataaaacaaatcagggactatgcaggtctatggggaaacctttagtctgctttaagaaaactcagtatctgaaaatcttaacttagcatgtgatactgtcttatcagcatctgcagaagtgccaaagccactgctagacacttaatgtgtattatttcatttaattatattttaaatgtgcttccttggtaattcttaagctcgagaaagagtttgagaactgctgctaggaaatagagattcacatttaaccctgtggtacttttaagaagcaggtacgttgttgcatatatacttgggtagagattggtaactatctgatagggaagctcaagttggccacccaagtctgagaaacccttaattactgagaatcaaaagagcagaatgtctgtagacattttggatttgtaaaaatcacattgttgagttatacctgtgatgggctgaaagtttttggcattctttcctgttcttcatatgccagtaccataaacaaaaagtatctcagatctgtcactttcttctcctaaaccaatgtgatggcagctttttgccttcagccttttccctatccagtatctcctacatagttaccttttgatcttaaggaactgttttgattgggtcacttccttgcctaaaattccattgattgttcattgttaattctaaaatagagttcaaatttaaaggcatgtaagttcccctgtaacggatttcctctactcccccttccgctgtaatctcccatttttttactgaaatgcttcagtgagcatgggtctttagaggtcttgatatacaattttcctgaagcaggaataccttgctttcctctactagtttaccacaattacagctctcttttaagcctcagaaaaaaatctcacttccgtcttgaagtcttaatccacgctttttatatccatgtgcctactccttctctgaaatctcctatggtttatctttttattcatttaatatcccacgaattgattttattatatattttttatggttgcatgtggtctttctagttatagcaatatacacatacatgcataaatacatatacacctatgtaaatgtgtgttgggagtatgtattcacacacatacatataccccaaggccatgtgtcatctttatcaatatttaagttttggaattgttttgtttgcctcctatatcatggaataaatggtaaagagggctaatttattactctaagtggatttcttattacattaatatcagacatatagaatgtactttgttttactatttgtaagatacaaaggtatataaactgacatacatcagcttgaaacctgagataatgctaaaatgttctaattattttaaatgtttaaagaggacaaccatgtaatgttgctaaacatgaaaaatgtcatcaagtggaataaagaatagctgaagttaacatttgggggaaattgagctgaaaacaaaaatatgagtattttgataccttttctttaccatgagactcttgactatgaagtcaaatttatctaaaggaaaaacaggaattctggagacctgtgtaaaagcagactattatcttcctactgtgagagtactaaaattaaaatacgtttaatgacgttttcctcaatgtaaaagcattgaagtaaatgtttcttttatgttgcagatacatagttgctctagagatcacctttttctttatgcattgtgaatagcagtctgcatcctaagtttaaaatatttgagaatcctctatgggactctctgtaaatgttttaaatactgttgttttcaataaatattttatacta

SEQ ID NO: 13236 - DNA, 680 bp, Homo sapiens
  source 1..680: mol_type = unassigned DNA
ttctcaagtggcatttactcatcgattccatcaatccatcaaatagttaacatccctgcctctttcttgtcgcagtcagtttcatcatcagatagaaacagtgttacagtacttgaaaaggacacaaagatgggaactcccaaagaaaaaaatgaagcaatttctaagaaaataccagaatttgaagtggaaaattctccattatcagatgttgcaaagaatacagagagtagtgcatttggagggtctttgccagctaaaaaaagtgatccatttcaaaaagagcaagatcatctggtagaagaggttgccagagcagttttatctgattcaccacagctctctgaaggaaaagaaataaaattagaggaactaattgactctctgggttctaaccccttcttaacaaggaatcagattccccgtactccagaaaacttgataactgaaattaggagctcatggagaaaagctattgaaatggaagaaaacagaactaaagaaccaattcaaatggatgctgaacatagagaagtattgccagaatcattacctgtgttgcacaatcaaagagaatttagcatggctgattttctcttagaaaccactgtatcagattttggccagtctcatttgactgaagagaaagttatttcagattgcgagtgtgtgcctcagaa

SEQ ID NO: 13237 - DNA, 1363 bp, Homo sapiens
  source 1..1363: mol_type = unassigned DNA
gctggaggttgattggcggtcttgccggccagtgaagccagggcatgggcggggcgcggctcggagcgcgaaacatggcggggcaggacgctggctgcggccgtggcggcgacgactactcagaggacgagggcgacagcagcgtgtccagggcggctgtggaggtgttcgggaagctgaaggacctaaactgccccttcctcgagggtctgtatatcacagagccaaagacaattcaggaactgctgtgcagcccctcagagtaccgcttggagatcctagagtggatgtgtacccgggtctggccctcactgcaggacaggttcagctcactgaaaggggtcccaacagaggtgaagatccaagaaatgacgaagctgggccacgagctgatgctgtgtgcgccagatgaccaggagctcctcaagggctgtgcctgcgcccagaagcagctacacttcatggaccagttgctcgataccatccggagcctgaccattgggtgctccagttgctcgagcctgatggagcacttcgaggacaccagggagaagaacgaggccttgctgggggagctcttctctagcccccacctgcagatgctcctgaatccagagtgcgacccgtggcccctggacatgcagcccctcctcaacaagcagagtgatgactggcagtgggccagtgcctctgccaagtccgaggaggaggagaagctggcggagcttgccaggcagctgcaggagagtgctgccaagttgcacgcgcttagaacggagtactttgcacagcatgagcaaggggctgctgcgggcgcagccgacatcagcaccctagaccagaagctgcgtctggtcacttccgacttccaccagctaatcttggcttttctccaagtctacgacgacgagctgggcgagtgctgccagcgcccaggccctgacctccacccgtgcggccccatcatccaggccacgcaccagaatctgacttcctacagccaactgctgcaagtggtcatggcagttgctgacacctctgcgaaggccgtggagaccgtgaagaagcagcaaggcgagcagatctgctggggtggcagcagctccgtcatgagtctagctaccaagatgaatgaactaatggagaaatagaaagtcttcagtgatggcctacgccaaagcacaggatggggcgggcaggaagccctctcccaagatcgagttggccgaggatggatgattgtggcagcagaagccgttgcagccccacgttgtgctctaggcagggacctttggcccctttggggagggagagacagacgggcggtttgacttggacacaaagaaagccttggtttctaagc

SEQ ID NO: 13238 - DNA, 1284 bp, Homo sapiens
  source 1..1284: mol_type = unassigned DNA
atgggcggggcgcggctcggagcgcgaaacatggcggggcaggacgctggctgcggccgtggcggcgacgactactcagaggacgagggcgacagcagcgtgtccagggcggctgtggaggtgttcgggaagctgaaggacctaaactgccccttcctcgagggtctgtatatcacagagccaaagacaattcaggaactgctgtgcagcccctcagagtaccgcttggagatcctagagtggatgtgtacccgggtctggccctcactgcaggacaggttcagctcactgaaaggggtcccaacagaggtgaagatccaagaaatgacgaagctgggccacgagctgatgctgtgtgcgccagatgaccaggagctcctcaagggctgtgcctgcgcccagaagcagctacacttcatggaccagttgctcgataccatccggagcctgaccattgggtgctccagttgctcgagcctgatggagcacttcgaggacaccagggagaagaacgaggccttgctgggggagctcttctctagcccccacctgcagatgctcctgaatccagagtgcgacccgtggcccctggacatgcagcccctcctcaacaagcagagtgatgactggcagtgggccagtgcctctgccaagtccgaggaggaggagaagctggcggagcttgccaggcagctgcaggagagtgctgccaagttgcacgcgcttagaacggagtactttgcacagcatgagcaaggggctgctgcgggcgcagccgacatcagcaccctagaccagaagctgcgtctggtcacttccgacttccaccagctaatcttggcttttctccaagtctacgacgacgagctgggcgagtgctgccagcgcccaggccctgacctccacccgtgcggccccatcatccaggccacgcaccagaatctgacttcctacagccaaatccccagaggccaacctaaaaagccggctttagttacgatgactacagttcccacgtgcgcaactctgcccttggctcaaggattccgtgatgttcattttggttttctaagcgagaggctccgagccttccaacctctgactggctggtcctgtgagacccctcgatcagggatgctgctgcaagtggtcatggcagttgctgacacctctgcgaaggccgtggagaccgtgaagaagcagcaaggcgagcagatctgctggggtggcagcagctccgtcatgagtctagctaccaagatgaatgaactaatggagaaatag

SEQ ID NO: 13239 - DNA, 1877 bp, Homo sapiens
  source 1..1877: mol_type = unassigned DNA
cgtgagcatggtgaagagaagacggagccccgcgctgggagaggaacgcttcagtccgagttccattctgcacccaaggctccccttggtcctcctgggaaccagggtgccccttagtggtggtggcccaggagaacccgaccaaggcaggagcgccccctcctggaagagcctcgcttcaacgcatcatcattcccggccggcagcaggggcgacgccagcaaggcctgcgactcagagccagcttggcccgttcgccccgccccttcccggtgtccgccccgcccctttcccggtgtccgccccgcctccttcccggtgtccgccccgcccccttccctgtgtccgccccgcccccttccctgtgtccgccctgcccgcttcactgtggtcctgcctctgggtggtgccggggcggggggtgggagcccggggcccgcgcaggcggagatgtcgcccaatgggaagggtcggtcgggaagggggtgggcgcaggcgggtgggcgggaagaacgctggaggttgattggcggtcttgccggccagtgaagccagggcatgggcggggcgcggctcggagcgcgaaacatggcggggcaggacgctggctgcggccgtggcggcgacgactactcagaggacgagggcgacagcagcgtgtccagggcggctgtggaggtgttcgggaagctgaaggacctaaactgccccttcctcgagggtctgtatatcacagagccaaagacaattcaggaactgctgtgcagcccctcagagtaccgcttggagatcctagagtggatgtgtacccgggtctggccctcactgcaggacaggttcagctcactgaaaggggtcccaacagaggtgaagatccaagaaatgacgaagctgggccacgagctgatgctgtgtgcgccagatgaccaggagctcctcaagggctgtgcctgcgcccagaagcagctacacttcatggaccagttgctcgataccatccggagcctgaccattgggtgctccagttgctcgagcctgatggagcacttcgaggacaccagggagaagaacgaggccttgctgggggagctcttctctagcccccacctgcagatgctcctgaatccagagtgcgacccgtggcccctggacatgcagcccctcctcaacaagcagagtgatgactggcagtgggccagtgcctctgccaagtccgaggaggaggagaagctggcggagcttgccaggcagctgcaggagagtgctgccaagttgcacgcgcttagaacggagtactttgcacagcatgagcaaggggctgctgcgggcgcagccgacatcagcaccctagaccagaagctgcgtctggtcacttccgacttccaccagctaatcttggcttttctccaagtctacgacgacgagctgggcgagtgctgccagcgcccaggccctgacctccacccgtgcggccccatcatccaggccacgcaccagaatctgacttcctacagccaactgctgcaagtggtcatggcagttgctgacacctctgcgaaggccgtggagaccgtgaagaagcagcaaggcgagcagatctgctggggtggcagcagctccgtcatgagtctagctaccaagatgaatgaactaatggagaaatagaaagtcttcagtgatggcctacgccaaagcacaggatggggcgggcaggaagccctctcccaagatcgagttggccgaggatggatgattgtggcagcagaagccgttgcagccccacgttgtgctctaggcagggacctttggcccctttggggagggagagacagacgggcggtttgacttggacacaaagaaagccttggtttctaagc

SEQ ID NO: 13240 - DNA, 2124 bp, Homo sapiens
  source 1..2124: mol_type = unassigned DNA
gagcatgcgcctgggacttgcaatgatgaaacagggccattggcaaagctggggtaccagtcacccagccacgctctagggtggtagccaagaagacggaccccgagcgggaggcagagagacaagaggtggatgaagcagagcaagcgtgagcatggtgaagagaagacggagccccgcgctgggagaggaacgcttcagtccgagttccattctgcacccaaggctccccttggtcctcctgggaaccagggtgccccttagtggtggtggcccaggagaacccgaccaaggcaggagcgccccctcctggaagagcctcgcttcaacgcatcatcattcccggccggcagcaggggcgacgccagcaaggcctgcgactcagagccagcttggcccgttcgccccgccccttcccggtgtccgccccgcccctttcccggtgtccgccccgcctccttcccggtgtccgccccgcccccttccctgtgtccgccccgcccccttccctgtgtccgccctgcccgcttcactgtggtcctgcctctgggtggtgccggggcggggggtgggagcccggggcccgcgcaggcggagatgtcgcccaatgggaagggtcggtcgggaagggggtgggcgcaggcgggtgggcgggaagaacgctggaggttgattggcggtcttgccggccagtgaagccagggcatgggcggggcgcggctcggagcgcgaaacatggcggggcaggacgctggctgcggccgtggcggcgacgactactcagaggacgagggcgacagcagcgtgtccagggcggctgtggaggtgttcgggaagctgaaggacctaaactgccccttcctcgagggtctgtatatcacagagccaaagacaattcaggaactgctgtgcagcccctcagagtaccgcttggagatcctagagtggatgtgtacccgaaatgacgaagctgggccacgagctgatgctgtgtgcgccagatgaccaggagctcctcaagcccttgtggcccgagagtttctcccgaggtccctcatctaccctgcgagatttattcacgtgaccaatggcctatgacacagccccaggaggtcctgagaacatgtgcacaagggctgtgcctgcgcccagaagcagctacacttcatggaccagttgctcgataccatccggagcctgaccattgggtgctccagttgctcgagcctgatggagcacttcgaggacaccagggagaagaacgaggccttgctgggggagctcttctctagcccccacctgcagatgctcctgaatccagagtgcgacccgtggcccctggacatgcagcccctcctcaacaagcagagtgatgactggcagtgggccagtgcctctgccaagtccgaggaggaggagaagctggcggagcttgccaggcagctgcaggagagtgctgccaagttgcacgcgcttagaacggagtctacgacgacgagctgggcgagtgctgccagcgcccaggccctgacctccacccgtgcggccccatcatccaggccacgcaccagaatctgacttcctacagccaaatccccagaggccaacctaaaaagccggctttagttacgatgactacagttcccacgtgcgcaactctgcccttggctcaaggattccgtgatgttcattttggttttctaagcgagaggctccgagccttccaacctctgactggctggtcctgtgagacccctcgatcagggatgctgctgcaagtggtcatggcagttgctgacacctctgcgaaggccgtggagaccgtgaagaagcagcaaggcgagcagatctgctggggtggcagcagctccgtcatgagtctagctaccaagatgaatgaactaatggagaaatagaaagtcttcagtgatggcctacgccaaagcacaggatggggcgggcaggaagccctctcccaagatcgagttggccgaggatggatgattgtggcagcagaagccgttgcagccccacgttgtgctctaggcagggacctttggcccctttggggagggagagacagacgggcggtttgacttggacacaaagaaagccttggtttct

SEQ ID NO: 13241 - DNA, 1043 bp, Homo sapiens
  source 1..1043: mol_type = unassigned DNA
attggcaaagctggggtaccagtcacccagccacgctctagggtggtagccaagaagacggaccccgagcgggaggcagagagacaagaggtggatgaagcagagcaagcgtgagcatggtgaagagaagacggagccccgcgctgggagaggaacgcttcagtccgagttccattctgcacccaaggctccccttggtcctcctgggaaccagggtgccccttagtggtggtggcccaggagaacccgaccaaggcaggagcgccccctcctggaagagcctcgcttcaacgcatcatcattcccggccggcagcaggggcgacgccagcaaggcctgcgactcagagccagcttggcccgttcgccccgccccttcccggtgtccgccccgcccctttcccggctgtggaggtgttcgggaagctgaaggacctaaactgccccttcctcgagggtctgtatatcacagagccaaagacaattcaggaactgctgtgcagcccctcagagtaccgcttggagatcctagagtggatgtgtacccgggtctggccctcactgcaggacaggttcagctcactgaaaggggtcccaacagaggtgaagatccaagggctgctggcagggtgatagcagatgatggcacgaaggtcctttaggacatggccagatgggagcgaaatgacgaagctgggccacgagctgatgctgtgtgcgccagatgaccaggagctcctcaagggctgtgcctgcgcccagaagcagctacacttcatggaccagttgctcgataccatccggagcctgaccattgggtgctccagttgctcgagggagaagaacgaggccttgctgggggagctcttctctagcccccacctgcagatgctcctgaatccagagtgcgacccgtggcccctggacatgcagcccctcctcaacaagcagagtgatgactggcagtgggccagtgcctctgccaagtccgaggaggaggagaagctggcggagcttgccaggcagctgcaggagagtgctgcc

SEQ ID NO: 13242 - DNA, 1454 bp, Homo sapiens
  source 1..1454: mol_type = unassigned DNA
gcctcgcagccacccctcctgcgtctccacaaatggtccgacccgcaagcaagggggcgggtccggctttgaaaagccggcgggtcgggccttgaggtggaaggcgggaaaatggcggattcctcggggcgaggcgctgggaagcctgcaaccggccccacaaattctagcagtgccaagaagaaggataaaagagttcaaggtggaagagtgattgagtcccggtatctgcagtatgaaaagaagacaacccaaaaggctcctgcaggagatgggtcacagacccgagggaagatgtctgaaggtggaaggaaatccagcctgctccagaaaagcaaagcagatagcagtggggtcggaaagggtgacctgcagtccacgttgctggaagggcatggcacagctccacctgacctggatctctctgctattaatgacaaaagcatcgtcaaaaagacgccacagttagcaaaaacaatatcaaagaaacctgagtcaacatcattttctgcccctcggaaaaagagcccggatttatctgaagcaatggaaatgatggagtctcagacactactgctgacgctactatccgtaaagatggagaacaatcttgctgagtttgaaagaagggcagaaaagaatttattaataatgtgtaaggagaaggagaagctacagaaaaaggcccacgagctgaagcgcaggcttctcctctctcagaggaagcgggagctggcagatgtcctggatgcccagatcgagatgctcagccccttcgaggcagtggccacacgcttcaaggagcaatacaggacattcgccacggccctggacactaccaggcacgagctgcccgtgaggtccatccacctggagggagatgggcagcagctcttagacgccctgcagcatgaactggtgaccactcagcgcctcctgggagaacttgatgttggtgattcggaagaaaatgtgcaggtgctggacttactgagcgaactcaaggacgtgacggcgaaaaaggaccttgagctccgaaggagctttgcccaggtgctggaactctccgcagaggcaagcaaagaggcagccttggcaaaccaggaagtctgggaagagacccagggcatggcgccccccagccggtggtatttcaatcaagacagtgcctgcagagaatctgggggagcacccaagaacacgcccctgtctgaggacgacaacccgggtgcctcgtcagcccccgctcaggccacgttcatcagcccaagcgaagatttttcttcaagcagccaggcagaagtcccgccctctctctctcgttcagggagggacttgtcatgactcatggttacattcaggatacttgagcactttatatactaccgtagcactgtagctattttttatgtgataatcttgtttgataaaaaagtaaacctgttttgcaattg

SEQ ID NO: 13243 - DNA, 1451 bp, Homo sapiens
  source 1..1451: mol_type = unassigned DNA
gcctcgcagccacccctcctgcgtctccacaaatggtccgacccgcaagcaagggggcgggtccggctttgaaaagccggcgggtcgggccttgaggtggaaggcgggaaaatggcggattcctcggggcgaggcgctgggaagcctgcaaccggccccacaaattctagcagtgccaagaagaaggataaaagagttcaaggtggaagagtgattgagtcccggtatctgcagtatgaaaagaagacaacccaaaaggctcctgcaggagatgggtcacagacccgagggaagatgtctgaaggtggaaggaaatccagcctgctccagaaaagcaaagatagcagtggggtcggaaagggtgacctgcagtccacgttgctggaagggcatggcacagctccacctgacctggatctctctgctattaatgacaaaagcatcgtcaaaaagacgccacagttagcaaaaacaatatcaaagaaacctgagtcaacatcattttctgcccctcggaaaaagagcccggatttatctgaagcaatggaaatgatggagtctcagacactactgctgacgctactatccgtaaagatggagaacaatcttgctgagtttgaaagaagggcagaaaagaatttattaataatgtgtaaggagaaggagaagctacagaaaaaggcccacgagctgaagcgcaggcttctcctctctcagaggaagcgggagctggcagatgtcctggatgcccagatcgagatgctcagccccttcgaggcagtggccacacgcttcaaggagcaatacaggacattcgccacggccctggacactaccaggcacgagctgcccgtgaggtccatccacctggagggagatgggcagcagctcttagacgccctgcagcatgaactggtgaccactcagcgcctcctgggagaacttgatgttggtgattcggaagaaaatgtgcaggtgctggacttactgagcgaactcaaggacgtgacggcgaaaaaggaccttgagctccgaaggagctttgcccaggtgctggaactctccgcagaggcaagcaaagaggcagccttggcaaaccaggaagtctgggaagagacccagggcatggcgccccccagccggtggtatttcaatcaagacagtgcctgcagagaatctgggggagcacccaagaacacgcccctgtctgaggacgacaacccgggtgcctcgtcagcccccgctcaggccacgttcatcagcccaagcgaagatttttcttcaagcagccaggcagaagtcccgccctctctctctcgttcagggagggacttgtcatgactcatggttacattcaggatacttgagcactttatatactaccgtagcactgtagctattttttatgtgataatcttgtttgataaaaaagtaaacctgttttgcaattg

SEQ ID NO: 13244 - DNA, 2793 bp, Homo sapiens
  source 1..2793: mol_type = unassigned DNA
tgaccctgaggcattgccgtcgcgcggtgcacagctaagacgtcgcgcttgcgcaggcgctcggcgcagaggcctgcgggaagccaagatggcgcataggggttctccaggctgcagttggcgccttatcagtatctaagcggagtgttttggaaggagttaaggggctgtggcaaacgccctctccgccgtcatggcccggcatcggaatgttcgaggctataactacgatgaagattttgaagatgatgatctctacggccagtctgtagaggatgattattgtatttcgccgtcaacagctgctcagtttatttattcacggcgtgacaaaccttccgttgagcctgtggaagaatatgattatgaagatctgaaagaatcttccaattctgtttcaaaccatcagctcagtggatttgatcaagctcgtctttattcatgccttgatcacatgagagaggtacttggagatgctgtgccagatgaaatattaattgaagcagttctgaagaacaagtttgatgtgcagaaggctttgtcaggggttctggaacaagatagagtgcagagtttgaaggacaagaatgaggcaacagtatctacaggaaagatagcaaaaggagtcttattttcttcttctgaagtttcagctgataatgttcaaagttcttatcctcagtcagcaaatcatttggattatagtagcaaaccctttgattttgctagctcagtaggaaaatacggattatctcataattcttcagttccaactcactgtttactccatagaaaaaagaaacttgacacacgtaaaagtgaaaagaaactagaatcatgtaagttaacaaaagaactttcactagctaacctaattcatgatatgtcaagagattcctgtgaaagtcagccatcagtcagattatcatctacagacagtctggaaagtctgctttcaaagaacctagatgccgatttgttgagacctcatgcatctgaatgcatttccaaagatgattctgcattcaaagaaataccagatttaaagaccataatcataaagggcacaacaccgaataattctttatatattcaaaataattcactgtctgattttcaaaacattccagtacaggacagtttaggaagttcaaataatcctttgtacttaactagctcgttggaaaatatgactgttgataatttaaatgctagtaaagaaactgaagttggaaatgtttctttagttgaacaaagtgccaagaatcacacttttaaaaatgataatttgcagttttctcagtgtgaaagtccatccctaactgaactgtttcaggaacacaaagaaaacaatataagccagtgctttactttatctgacctttgtaaccagtcatctgccagtttcacagatctaagtttgggatcctttcccctgtcacaattagcaaatcgctgtcagtcttcacccggaatatcagaattaacaggatctctgtcgtcattggcatttcataaagcttctcccacaagagaccttgagaatttgtcactttctgaattgattgcagaaacaattgatgtagacaactctcagattaagaaagagtcctttgaggtcagtttatctgaagtgaggtctcctggaatagattcaaatattgatcttagtgtccttataaaaaacccagattttgttccaaagcctgtagtagacccatccattgctccatcatcacgaactaaagttctaagttcaaagctagggaagaattccaattttgctaaggataataagaaaaacaacaaaggctctctgactaggaaaccacctttttctctctcttggaccaaggcccttgctgctagaccttcagcttttgcctcaacactgtgtcttcgttacccactgaaaagctgcaagcgacgcacccttgacctctataagacttttctttatagtagacaagttcaagatgtaaaggacaaagaaataagtccacttgtagcaataacaccatttgacttcaaatcagcatcacctgatgacattgtaaaagctaatcaaaaaaaagcatttactagagaatagtaacaaaaggaaaacttgattgctgttgtagagctttttatttttaattaaagtcttcagaggatcactttatattatgggattcaaattctgatttttatgaaaattgtcgtaggtcagttgattagttgatacgtatttttgcactgattttttttttaactatgtcttctttcagtgataactggctttatttaagttggtaacctatactgagtatatgtttacaaagtggatatggaaacttgatgttgtgaaatcagacctcatatatttttgtttgaagcattcaactttctatgttttttataatgaaatatttttttctatgaaatatttttgtgctttgttcttaaacgaaaatgccagcacttgggattattatagtttagtgtgaagattattcttatgtggcacagcataactgagatgttatattttaaaatatgatataattcctagtttcattatttttctgtaaatactaaaatttttctattagaaaatcttaaaattcctgacttttgagagtactgtggagattgttgaaatacatttttgataataataaaatgaaaatcttttaagggaccatgtaaatatagaagttggattaatatgtgaattatttttatacatttttaaaaaccatttgtcctaagtatacactttaaaataaatatataaaaagtgttttcaag

SEQ ID NO: 13245 - DNA, 2102 bp, Homo sapiens
  source 1..2102: mol_type = unassigned DNA
cagtctgtagaggatgattattgtatttcgccgtcaacaggaaaaccagtagattcccagacatcgcgaagtgaatctgaaattgtgccaaaagttgctaaaatgactgtatctggaaagaagcaaactatgggatttgaagtgcctggagtatcttctgaagaaaatggtcatagtttccacacacctcaaaaaggaccgcccattgaagatgccattgcttcttccgatgttcttgagactgcttctaaatctgctaatccaccccacacgattcaagcatcagaagagcagagttcaaccccagcaccggtgaaaaagtctggcaagctgaggcagcaaatagatgtgaaggcggaactggagaagcggcaaggagggaagcagctactcaacttagtggtcattggtcatgttgatgctgggaaaagtactctgatgggccatatgctttatcttctgggtaatataaacaaaagaactatgcataagtatgaacaggagtctaaaaaggctggcaaagcttcgtttgcatatgcatgggtcttggatgaaactggcgaagaaagggaaaggggagtaaccatggatgttggtatgacaaagtttgaaaccacaaccaaagttattacattaatggatgctccaggccataaggacttcattccaaatatgattacaggagcagcccaggcggatgtagctgttttagttgtagatgccagcaggggagagtttgaagctggatttgagactggaggacaaacacgagagcatggactcttggtccgttctctgggagtgacgcagcttgcagttgcagttaataaaatggatcaggttaattggcaacaagaaaggtttcaagagattactggaaaacttgggcactttcttaagcaagcaggttttaaggagagtgatgtaggttttattcctacaagtggtctcagtggtgaaaatctaatcacaagatctcagtcaagtgaactcacaaaatggtataaaggactatgtttattagaacaaattgattcctttaagcctccccagcgatctattgacaaaccttttagattatgtgtgtccgatgttttcaaagatcaaggatctggattttgcataactggtaaaatagaagctggttatatccaaactggtgaccgactactggcaatgcctcctaatgaaacttgtaccgtgaaaggaatcactctgcatgatgaacctgtcgactgggcggcagcaggcgatcatgttagtcttactttggttgggatggatatcatcaaaatcaatgttggctgcatattttgtggccccaaagtacccattaaagcttgcactcgtttcagagcccgaatcctcatctttaatattgaaattcctatcactaaaggatttcctgtgctgttacactaccaaactgtcagtgaacccgccgttattaaacgattgattagtgtcttaaacaaaagcacgggtgaagtcacaaagaaaaagcctaagtttttgactaaaggccagaatgcattggtagagctacagacacaaagaccaatagctcttgagctatataaagactttaaagagctggggaggttcatgctacgttacggtggttctacaatagctgctggtgttgtcactgagataaaagaatgatgggtcagaatttctaccacgtttctggatacagtgaaatagctaacctctgtttcaagaatgcagttattaagtcaaaggaacaatgtgcaattgatatgtttttagatgagagagaaaaattaaagctaaaattagctgcaaagaagtattaataatcacctctgcaaaaattctaagttgccaactggcaaagaaagtctaatgttaaaaacaactttgcctttgaaacgttaataaatggatttactttgctaagatttatggcaagtgtcaaaaatagtatctgaagatactgaatcatcatgaaatgaactctacttctggccaaagcacaatgtatttgcagttttctcttttgattcaattatactgcacatgttttaaggaaaagtaacttaattgggtttttcaggcagttgatatttgacctaagc

SEQ ID NO: 13246 - DNA, 2703 bp, Homo sapiens
  source 1..2703: mol_type = unassigned DNA
gcagaggcctgcgggaagccaagatggcgcataggggttctccaggctgcagttggcgccttatcagtatctaagcggagtgttttggaaggagttaaggggctgtggcaaacgccctctccgccgtcatggcccggcatcggaatgttcgaggctataactacgatgaagattttgaagatgatgatctctacggccagtctgtagaggatgattattgtatttcgccgtcaacagctcgtctttattcatgccttgatcacatgagagaggtacttggagatgctgtgccagatgaaatattaattgaagcagttctgaagaacaagtttgatgtgcagaaggctttgtcaggggttctggaacaagatagagtgcagagtttgaaggacaagaatgaggcaacagtatctacaggaaagatagcaaaaggaaaaccagtagattcccagacatcgcgaagtgaatctgaaattgtgccaaaagttgctaaaatgactgtatctggaaagaagcaaactatgggatttgaagtgcctggagtatcttctgaagaaaatggtcatagtttccacacacctcaaaaaggaccgcccattgaagatgccattgcttcttccgatgttcttgagactgcttctaaatctgctaatccaccccacacgattcaagcatcagaagagcagagttcaaccccagcaccggtgaaaaagtctggcaagctgaggcagcaaatagatgtgaaggcggaactggagaagcggcaaggagggaagcagctactcaacttagtggtcattggtcatgttgatgctgggaaaagtactctgatgggccatatgctttatcttctgggtaatataaacaaaagaactatgcataagtatgaacaggagtctaaaaaggctggcaaagcttcgtttgcatatgcatgggtcttggatgaaactggcgaagaaagggaaaggggagtaaccatggatgttggtatgacaaagtttgaaaccacaaccaaagttattacattaatggatgctccaggccataaggacttcattccaaatatgattacaggagcagcccaggcggatgtagctgttttagttgtagatgccagcaggggagagtttgaagctggatttgagactggaggacaaacacgagagcatggactcttggtccgttctctgggagtgacgcagcttgcagttgcagttaataaaatggatcaggttaattggcaacaagaaaggtttcaagagattactggaaaacttgggcactttcttaagcaagcaggttttaaggagagtgatgtaggttttattcctacaagtggtctcagtggtgaaaatctaatcacaagatctcagtcaagtgaactcacaaaatggtataaaggactatgtttattagaacaaattgattcctttaagcctccccagcgatctattgacaaaccttttagattatgtgtgtccgatgttttcaaagatcaaggatctggattttgcataactggtaaaatagaagctggttatatccaaactggtgaccgactactggcaatgcctcctaatgaaacttgtaccgtgaaaggaatcactctgcatgatgaacctgtcgactgggcggcagcaggcgatcatgttagtcttactttggttgggatggatatcatcaaaatcaatgttggctgcatattttgtggccccaaagtacccattaaagcttgcactcgtttcagagcccgaatcctcatctttaatattgaaattcctatcactaaaggatttcctgtgctgttacactaccaaactgtcagtgaacccgccgttattaaacgattgattagtgtcttaaacaaaagcacgggtgaagtcacaaagaaaaagcctaagtttttgactaaaggccagaatgcattggtagagctacagacacaaagaccaatagctcttgagctatataaagactttaaagagctggggaggttcatgctacgttacggtggttctacaatagctgctggtgttgtcactgagataaaagaatgatgggtcagaatttctaccacgtttctggatacagtgaaatagctaacctctgtttcaagaatgcagttattaagtcaaaggaacaatgtgcaattgatatgtttttagatgagagagaaaaattaaagctaaaattagctgcaaagaagtattaataatcacctctgcaaaaattctaagttgccaactggcaaagaaagtctaatgttaaaaacaactttgcctttgaaacgttaataaatggatttactttgctaagatttatggcaagtgtcaaaaatagtatctgaagatactgaatcatcatgaaatgaactctacttctggccaaagcacaatgtatttgcagttttctcttttgattcaattatactgcacatgttttaaggaaaagtaacttaattgggtttttcaggcagttgatatttgacctaagctttttttttttttttttttccagttaatgctaagaaaagatttggggaaggttataataaaagtattttgtggtgaccataagaatgtccctccccaaacaagtaaacttgtgaaagtttaatttggaattagtggaagctgttcctttgaaagccaagatattatttaagttgtaaagccagctaataaaatgccttagtttgagcat

SEQ ID NO: 13247 - DNA, 7163 bp, Homo sapiens
  source 1..7163: mol_type = unassigned DNA
agggaggcggacagtgaccctgaggcattgccgtcgcgcggtgcacagctaagacgtcgcgcttgcgcaggcgctcggcgcagaggcctgcgggaagccaagatggcgcataggggttctccaggctgcagttggcgccttatcagtatctaagcggagtgttttggaaggagttaaggggctgtggcaaacgccctctccgccgtcatggcccggcatcggaatgttcgaggctataactacgatgaagattttgaagatgatgatctctacggccagtctgtagaggatgattattgtatttcgccgtcaacagctgctcagtttatttattcacggcgtgacaaaccttccgttgagcctgtggaagaatatgattatgaagatctgaaagaatcttccaattctgtttcaaaccatcagctcagtggatttgatcaagctcgtctttattcatgccttgatcacatgagagaggtacttggagatgctgtgccagatgaaatattaattgaagcagttctgaagaacaagtttgatgtgcagaaggctttgtcaggggttctggaacaagatagagtgcagagtttgaaggacaagaatgaggcaacagtatctacaggaaagatagcaaaaggaaaaccagtagattcccagacatcgcgaagtgaatctgaaattgtgccaaaagttgctaaaatgactgtatctggaaagaagcaaactatgggatttgaagtgcctggagtatcttctgaagaaaatggtcatagtttccacacacctcaaaaaggaccgcccattgaagatgccattgcttcttccgatgttcttgagactgcttctaaatctgctaatccaccccacacgattcaagcatcagaagagcagagttcaaccccagcaccggtgaaaaagtctggcaagctgaggcagcaaatagatgtgaaggcggaactggagaagcggcaaggagggaagcagctactcaacttagtggtcattggtcatgttgatgctgggaaaagtactctgatgggccatatgctttatcttctgggtaatataaacaaaagaactatgcataagtatgaacaggagtctaaaaaggctggcaaagcttcgtttgcatatgcatgggtcttggatgaaactggcgaagaaagggaaaggggagtaaccatggatgttggtatgacaaagtttgaaaccacaaccaaagttattacattaatggatgctccaggccataaggacttcattccaaatatgattacaggagcagcccaggcggatgtagctgttttagttgtagatgccagcaggggagagtttgaagctggatttgagactggaggacaaacacgagagcatggactcttggtccgttctctgggagtgacgcagcttgcagttgcagttaataaaatggatcaggttaattggcaacaagaaaggtttcaagagattactggaaaacttgggcactttcttaagcaagcaggttttaaggagagtgatgtaggttttattcctacaagtggtctcagtggtgaaaatctaatcacaagatctcagtcaagtgaactcacaaaatggtataaaggactatgtttattagaacaaattgattcctttaagcctccccagcgatctattgacaaaccttttagattatgtgtgtccgatgttttcaaagatcaaggatctggattttgcataactggtaaaatagaagctggttatatccaaactggtgaccgactactggcaatgcctcctaatgaaacttgtaccgtgaaaggaatcactctgcatgatgaacctgtcgactgggcggcagcaggcgatcatgttagtcttactttggttgggatggatatcatcaaaatcaatgttggctgcatattttgtggccccaaagtacccattaaagcttgcactcgtttcagagcccgaatcctcatctttaatattgaaattcctatcactaaaggatttcctgtgctgttacactaccaaactgtcagtgaacccgccgttattaaacgattgattagtgtcttaaacaaaagcacgggtgaagtcacaaagaaaaagcctaagtttttgactaaaggccagaatgcattggtagagctacagacacaaagaccaatagctcttgagctatataaagactttaaagagctggggaggttcatgctacgttacggtggttctacaatagctgctggtgttgtcactgagataaaagaatgatgggtcagaatttctaccacgtttctggatacagtgaaatagctaacctctgtttcaagaatgcagttattaagtcaaaggaacaatgtgcaattgatatgtttttagatgagagagaaaaattaaagctaaaattagctgcaaagaagtattaataatcacctctgcaaaaattctaagttgccaactggcaaagaaagtctaatgttaaaaacaactttgcctttgaaacgttaataaatggatttactttgctaagatttatggcaagtgtcaaaaatagtatctgaagatactgaatcatcatgaaatgaactctacttctggccaaagcacaatgtatttgcagttttctcttttgattcaattatactgcacatgttttaaggaaaagtaacttaattgggtttttcaggcagttgatatttgacctaagctttttttttttttttttttccagttaatgctaagaaaagatttggggaaggttataataaaagtattttgtggtgaccataagaatgtccctccccaaacaagtaaacttgtgaaagtttaatttggaattagtggaagctgttcctttgaaagccaagatattatttaagttgtaaagccagctaataaaatgccttagtttgagcataatacaaactgtgttttgttctttagacatttatgagattctctgccactaacagtaaatatgatttaggggttttgtgggatctttttcacctaagagtttcctagctctgtcacatgaattcttttttatcctaatggcagatccaatttcatctcattcatttttttaaccataacttgcttttcccattctcacttttagaattatacctatgatggccctttctttatcttgcttaccttatagattataagtcccctgtgagtaagtaagagtcatgtttttctttaaagtttcaacaacaaaccccaaggtttatttatttaacaacaggtattcgttgaggtgccttctgggtgcaaggagctttagagtagattttgacctcagctgaacctggaactctgatctgatagactgtttatgataagcttttttttttattagcagcgtgatttgtatatcgatggcttaacatatacaacagcatttcttctccctgcaccttttcgtgaacctgacattttgaacataagcaataacatctgtatggtaaagtaggcagattatacatgtgttgcttagtgaatgattaccaagtgaacacacttggtatattgctttaccaaaatacatgtgtagttgtcacttcagattcactgagttaagaaagttttatttaaatattaatattaatcaagaatttaacagatatatgtgacagaaatctaacttcaagtgactgaagcagaaagaaaaatttttgaatgacataactgagaaaattagaggtagctctagctttgattccatttagatcgagcagctcacacaatgttagcaaggactcatctccactctgccttccctggtgctggttttgctctcaaactctatatagaactctcggccgggcgcggtggctcacacctgtaatcaaaacactttgggaggctgagtcgggaggatagcgtgagcccaggagtttgagaccagctaaggcaatatagtgagaccatgtctctacagaaaaaatttaaaaacagatcagctgggtgtggtgccacatgcctgtagtcccagcttctcaggaggctggggtgggaagatcacttgagcccaggaggtcgaggctgcagtgagccatgatcacatcactgcagtccagcctgggtgacagagcaagacctgtcaccctgccacccataaaaaacctcttctgtaatgccaggttcttgacaagatgtgataattccacacttacatcctcagatctcccatccagggcaaggacagactaaaagagcatatcttctccagaagtcctagaaacatctcatcattgactatgattgaattttatttattaatacttccctaggatatcctgtgtttgagtgtgaagttaatatcacacaaagcatgtagctaacagttgtgtgagggttggaaattcagggtgctgttaggaaggggaaatggattggggtttaaggtagggggagtaaaaacaagaaaccatccactctgtatattatataagactgtgatcgaattaagaattttagtttacagtttagcataaacaaatagtagtagaaatgaatgcatttattcattccttccttctccaatagtgtttaagtacaatctttttatttgcattttattgatgattgattgtggttgaaaggagtggtgatattatttcgaggatccactgtgtaagaagactgttggcagtggaaggctcgagttgattaagtgacaaagaggtaaagcagacatgcccaagcttggttatgctctgatttcctaccctgttactttcatccataatttatagtacatccattttgtgtcattttgcttcaggtatttcttgtcctgactgtcttcttttttatgattttactgtttcttcacactaatggctttgtcctctgactttgactctttgtgagattcttctgagcagttaacctctaggataatgtggcttgaacacattacagaactatgttttgacttgttagtattattcacacattcatgacaattgagcctctctactgtgagaaatgttttagaggccagtttctaggcatagctgtttttctcccatgagtatgcaaatcaatagttttaaccattgttaaaatgcaatcatagtgacttcagaaaatttggaaaatacagaaaatatagggaagaataaaattaacccacagttctgtcacctaaaggtaactgctgccaatgttttcatgtatttcttttctgtctctccaatgcatttttttacatagttgtgagcgttagccaagttattttcatgttgttatgtaatcaatatttttcaatagaagtattagaggttttttttattgatataaaaataacaattacagatcctgatatatagaagttattcaaaattatacagttttcaaaaaatcaagacaagtaggcccaatacaaactactgaatcatcttctaatttccctctaaaatatttatagaaatatgtaagtagaaaaacattcatcctttcctcgtctaattatgatcctgccatattccaggcacaagagaaagctctggggcttgagtcttaatagggctgatagtccaaccaggggacagggtatcataaagagataattcaaaactttaagattggagggtaggtgatggtagaaaattctgcggcaaacatttgttgatgctcatcatttgttgatgtcatcaaagatcaccagggcataattataatcaaaattagttttattgatgcttgctgcagcaagagagactgcacaccactggggtctatgggtgcttctcagtgggaaggtgtaaggaggggcttgctaagaatttgagcacatgtagctaattttaaggagggctcaagtgagcaagggtttcttctggattgagtgctgtcagaaagtggattgagtgctgtcagaaagtgggagtgattttgcaactgggtatcttaatttttatgttgtgggtgggaggaaaggaaagaagcaacagtcacccatgttagccacaagaagaggttggctgtttatggtttgcacagtgactttgtttttatctgtgctcaggcatgattacagtatctcattttatccggattacagtgacctcatctgatgttagagatttgagaattgttaaatgttcagcaggagaacgccaccgcctagtgtgaatgctaggtcagaagctgctttttcacactgaaaccatttaagtatgtacaaataagttaatagtgtaaatgtaggtgtaaaatacaatgcaaaacaaaataatgaagtaagtgaattaaattattgcaccaaatatggggatatgaaatagggaaagaaaagcattaagttacttatagtccataaagggactacattattttgttactctgataatcccataaaacaaagttttaagaatgtttacagtaaccatgaatggaattagtgaaactattcatatcaatgcaaaaaaaaaaaaaaaaaaagcaaagaaactaagtctgtacagcaaaagatggaaaggaaacaagaaaattaaatgaagacaaaggttgtgattattacagtaaatgaaaataggtttttatctttaaaatgtagactcaaactgcaaagctaatgatatgctatctgcaaaatattcctattttgtaaataaataaaaccatagatttaaagaagaaagggcacagatgtactggggagacaaaaataactgatccgttgggtgtataccatgtgccaagcaattttcatatactcatttaacatgacatatctataattatatgaggcagatattattaacctcagtctatagatgagaagactaaagctcagagggattgctaaaaactagtaaataaattatggaaccatgatttgaatttagatttaagtctgactgaggcatgttcagagacactacactgcctctccagaaatcaggagtagcaatattaacactggacaaagaatttaaagcaagtaaaaaaaaattaagagaatttcatattaataacaagtataatgcacaataaaactgtaccaaatgacataaaaatgcataatgaaatttattagaaattaaaaattaaagggcatagttacaattattgaggaattctcatagctctgccttatagatcatgtaaacaaacaaggtcatagaggacttaaatagcaaagcagaaaaaaa

SEQ ID NO: 13248 - DNA, 1585 bp, Homo sapiens
  source 1..1585: mol_type = unassigned DNA
ttgaagatgatgatctctacggccagtctgtagaggatgattattgtatttcgccgtcaacagctgctcagtttatttattcacggcgtgacaaaccttccgttgagcctgtggaagaatatgattatgaagatctgaaagaatcttccaattctgtttcaaaccatcagctcagtggatttgatcaagcagctactcaacttagtggtcattggtcatgttgatgctgggaaaagtactctgatgggccatatgctttatcttctgggtaatataaacaaaagaactatgcataagtatgaacaggagtctaaaaaggctggcaaagcttcgtttgcatatgcatgggtcttggatgaaactggcgaagaaagggaaaggggagtaaccatggatgttggtatgacaaagtttgaaaccacaaccaaagttattacattaatggatgctccaggccataaggacttcattccaaatatgattacaggagcagcccaggcggatgtagctgttttagttgtagatgccagcaggggagagtttgaagctggatttgagactggaggacaaacacgagagcatggactcttggtccgttctctgggagtgacgcagcttgcagttgcagttaataaaatggatcaggttaattggcaacaagaaaggtttcaagagattactggaaaacttgggcactttcttaagcaagcaggttttaaggagagtgatgtaggttttattcctacaagtggtctcagtggtgaaaatctaatcacaagatctcagtcaagtgaactcacaaaatggtataaaggactatgtttattagaacaaattgattcctttaagcctccccagcgatctattgacaaaccttttagattatgtgtgtccgatgttttcaaagatcaaggatctggattttgcataactggtaaaatagaagctggttatatccaaactggtgaccgactactggcaatgcctcctaatgaaacttgtaccgtgaaaggaatcactctgcatgatgaacctgtcgactgggcggcagcaggcgatcatgttagtcttactttggttgggatggatatcatcaaaatcaatgttggctgcatattttgtggccccaaagtacccattaaagcttgcactcgtttcagagcccgaatcctcatctttaatattgaaattcctatcactaaaggatttcctgtgctgttacactaccaaactgtcagtgaacccgccgttattaaacgattgattagtgtcttaaacaaaagcacgggtgaagtcacaaagaaaaagcctaagtttttgactaaaggccagaatgcattggtagagctacagacacaaagaccaatagctcttgagctatataaagactttaaagagctggggaggttcatgctacgttacggtggttctacaatagctgctggtgttgtcactgagataaaagaatgatgggtcagaatttctaccacgtttctggatacagtgaaatagctaacctctgtttcaagaatgcagttattaagtcaaaggaacaatgtgcaattgatatgtttttagatgagag

SEQ ID NO: 13249 - DNA, 1227 bp, Homo sapiens
  source 1..1227: mol_type = unassigned DNA
aaagataaagcctttcaaatttgaggaagaccttcggtcccgcctccatttcacgtccggcttaccgtcgtttacgacagtgtcaggatcgcgggcttgctttccggtagcgtgggctgacgcctcgctcaatttctcacagggctgcgcaggtttcccccgtctgcgaatggaccactggaggggttcaaaggttcgcgtcccagtacgggaatgagcctctttgatctcttccggggctttttcggctttcctggacctcggagccacagagatcccttttttggagggatgactcgagatgaagatgatgatgaggaagaagaagaagaagggggctcatggggccgtgggaacccaaggttccatagtcctcagcacccccctgaggaatttggcttcggcttcagcttcagcccaggaggagggatacgtttccacgataacttcggctttgatgacctagtacgagatttcaatagcatcttcagcgatatgggggcctggaccttgccttcccatcctcctgaacttccaggtcctgagtcagagacacctggtgagagactacgggagggacagacacttcgggactcaatgcttaagtatccagatagtcaccagcccaggatctttgggggggtcttggagagtgatgcaagaagtgaatccccccaaccagcaccagactggggctcccagaggccatttcataggtttgatgatgtatggcctatggacccccatcctagaaccagagaggacaatgatcttgattcccaggtttcccaggagggtcttggcccggttctacagccccagcccaaatcctatttcaagagcatctctgtgaccaagatcactaaaccagatgggatagtggaggagcgccggactgtggtggacagtgagggccggacagagactacagtaacccgacacgaagcagatagcagtcctaggggtgatccagaatcaccaagacctccagccctggatgatgccttttccatcctggacttattcctgggacgttggttccggtcccggtagccttgttaaccctcagaggccttcaagtcctttccacctctcacccattgcccaccattaataagcttagcttctcttgccacctcaggggcttggatatgtggaatagtgaactggggccatgtcagtttgtcactcacccaaactgaccaataaaacctttatttatgctaa

SEQ ID NO: 13250 - DNA, 914 bp, Homo sapiens
  source 1..914: mol_type = unassigned DNA
agtgtcaggatcgcgggcttgctttccggtagcgtgggctgacgcctcgctcaatttctcacagggctgcgcaggtttcccccgtctgcgaatggaccactggaggggttcaaaggttcgcgtcccagtacgggaatgagcctctttgatctcttccggggctttttcggctttcctggacctcggagcttcagcccaggaggagggatacgtttccacgataacttcggctttgatgacctagtacgagatttcaatagcatcttcagcgatatgggggcctggaccttgccttcccatcctcctgaacttccaggtcctgagtcagagacacctggtgagagactacgggagggacagacacttcgggactcaatgcttaagtatccagatagtcaccagcccaggatctttgggggggtcttggagagtgatgcaagaagtgaatccccccaaccagcaccagactggggctcccagaggccatttcataggtttgatgatgtatggcctatggacccccatcctagaaccagagaggacaatgatcttgattcccaggtttcccaggagggtcttggcccggttctacagccccagcccaaatcctatttcaagagcatctctgtgaccaagatcactaaaccagatgggatagtggaggagcgccggactgtggtggacagtgagggccggacagagactacagtaacccgacacgaagcagatagcagtcctaggggtgatccagaatcaccaagacctccagccctggatgatgccttttccatcctggacttattcctgggacgttggttccggtcccggtagccttgttaaccctcagaggccttcaagtcctttccacctctcacccattgcccaccattaataagcttagcttctcttgccac

SEQ ID NO: 13251 - DNA, 1151 bp, Homo sapiens
  source 1..1151: mol_type = unassigned DNA
gctttccggtagcgtgggctgacgcctcgctcaatttctcacagggctgcgcaggtttcccccgtctgcgaatggaccactggaggggttcaaaggttcgcgtcccagtacgggaatgagcctctttgatctcttccggggctttttcggctttcctggacctcggagccacagagatcccttttttggagggatgactcgagatgaagatgatgatgaggaagaagaagaagaagggggctcatggggccgtgggaacccaaggttccatagtcctcagcacccccctgaggaatttggcttcggcttcagcttcagcccaggaggagggatacgtttccacgataacttcggctttgatgacctagtacgagatttcaatagcatcttcagcgatatgggggcctggaccttgccttcccatcctcctgcaaacacctgccacctttctgcagaacttccaggtcctgagtcagagacacctggtgagagactacgggagggacagacacttcgggactcaatgcttaagtatccagatagtcaccagcccaggatctttgggggggtcttggagagtgatgcaagaagtgaatccccccaaccagcaccagactggggctcccagaggccatttcataggtttgatgatgtatggcctatggacccccatcctagaaccagagaggacaatgatcttgattcccaggtttcccaggagggtcttggcccggttctacagccccagcccaaatcctatttcaagagcatctctgtgaccaagatcactaaaccagatgggatagtggaggagcgccggactgtggtggacagtgagggccggacagagactacagtaacccgacacgaagcagatagcagtcctaggggtgatccagaatcaccaagacctccagccctggatgatgccttttccatcctggacttattcctgggacgttggttccggtcccggtagccttgttaaccctcagaggccttcaagtcctttccacctctcacccattgcccaccattaataagcttagcttctcttgccacctcaggggcttggatatgtggaatagtgaactggggccatgtcagtttgtcactcacccaaactgaccaataaaacctttatttatgct

SEQ ID NO: 13252 - DNA, 2370 bp, Homo sapiens
  source 1..2370: mol_type = unassigned DNA
ccccgcccggagtccccgccgccgtcatgcagtccccggcggtgctcgtcacctccaggcgacttcagaatgcccacactggcctcgacctgactgtgccccagcaccaggaggtacggggcaagatgatgtctggacacgtggagtaccagatcctggtggtgacccgtctggctgcgttcaagtcggccaagcacaggcccgaggatgtcgtccagttcttggtctccaaaaagtacagcgagattgaggagttttaccagaaactgagcagtcgttatgcagcagccagcctccccccactacccaggaaggtcctgtttgttggggagtctgacatccgggagaggagagccgtgttcaatgagatcctgcgctgtgtctccaaggatgccgagttggcaggcagcccagagctgctagagttcttaggtaccagatccccaggggctgcagggctcaccagcagagattcctctgtcctggatggcacagacagtcagacagggaatgatgaagaggctttcgacttttttgaggagcaagaccaagtggcagaagagggtccgcccgtccagagcctgaagggcgaggatgctgaggaatccttggaggaggaggaggcgctggaccctctgggcattatgcgctccaagaagcccaagaaacatcccaaagtggccgtgaaagccaagccctcgccccggctcaccatctttgacgaggaggtggaccctgatgaggggctctttggcccgggcaggaagctgtctccacaggacccctcggaggacgtgtcatccgtggaccccctgaagctatttgatgatcctgacctcggcggggccatccccctgggtgactccctcctgctgccagccgcctgtgagagtggagggcccacacccagcctcagccacagggacgcctccaaggaactgttcagagttgaagaggacttggaccagattctgaacctgggagctgagcccaaacccaagccccagcttaagcccaagccaccagtggcagctaagccggtgatacccagaaaaccagctgttccccccaaagcgggcccggctgaagctgtggctgggcagcagaagccgcaggagcagatccaagccatggacgagatggacatcttgcagtacatccaggaccacgatacaccagcccaggccgcccccagcctcttctgacccttccatgctggcccctggcccagcaggcctgtctgtggggacatcggtgtgaagggaagggactgggccctgcagggtcagaacctccccacccccaggggaggccaggcagaagcctgggtcacagcacccagaactgcatggttccattttctccggggctgtggggccaaagtagaagcctgcgggctgcgggagcggctctcaccctaggagccagagcccaatgtgtcttattccccgtggacatgaaggggagggagggtgtggggatgccttgccaaccagaagcccagccccaaggatgaagcaagacatgtggggccgtagcgaggtgtcacatggggcagggaagcttcatgcccacgggttctgccagccccagcacagacccaaactggggctgggcctctatccctcctctgcctctgttcgcatagtaagaaggagtgaccggtatcctccccttcccctaccctaagctgtagcctgggtgactgactggcctgggcctggggtggggacgtccccaagccaaattactccagggcctctgctcctcgtggctgccaggggcctgcagggtctgggtgggtctcccaggagaggaatactgagtgggagatcggctgtctggagtgttctgatgcaagtctctctctcctgagcctcctcttgatgcaagctctaaagggagaagtcaggccctgcctctccagggtatagacggccctgctaggccccagttcttcctccttccccctttcccaggaaaggccagcccagtccatggccttcttgggcctctgggcacagagccaatgttcgtcattgcagctctcagcaaactgggtcatagctttccccacagctcagcctggggcctgggcagggctcccagcctgcaccgcctcccactgccagtggggcatgattctctcaggcttctgccccgaggccttcgtcgtcctcagggtctggacttggtcagtggcctttcaccagtggagctgccttcccagggagaaggagccgtgcgccagggcagggcccgtgccttagacttctcccgacccccagagcgctggtacacaggtctaggcaccacacagtgctttggaaattctcagtgaatgatgtttaataaagcaaaaaatgtcaa

SEQ ID NO: 13253 - DNA, 2780 bp, Homo sapiens
  source 1..2780: mol_type = unassigned DNA
agctgtacatggagatcttgctgggaaaatccgcttgctcccctcacgtcgtccagcccaggagaaccaccgccgtcaccccggagcttcctcggccaccgcgcagagccctccgagagcccgagccgcggtcttcgagctccaaggctcattcagggccccagatccttgccccgaaaggagaggatctgagaaaatggatgcactgagacctctctgaaaaccctccgagagagcgcgagaggagcgaggacacgttactcgcagctaaaatcacatttaaggaccaaaacaacaacaaccaaaaatttcattaaaacaataagcgcccaagaacccagatcgggctggtggggggaggggaagaggcgggaaggggagggtcgcacggaggtagctttgcagtgagcagtcgaccccgccgccccccggcacagctggaccggctcctccagccgcggctcagactcgcccctggattccgggttagcttcggtgccaggaccgcggcccgggcttggattcccgagactccgcgtaccagcctcgcgggagccccggcacctttgtatgagcacgagaggattctgcctccgcgcagcagcccgggaagcaggagccgaagcgcgggccgtggagcaaggcgggaaccggaggcggcggcggcggcggccaggggcgcacggtgccaggaccagctcgccgcgccccatggggagccggcggccgcagcgctgctgaggcgggcccggctggccaggcggggggacggggcccgggctgcagcagccccctctgcggctgccgggcgggcccgggcgcccgggggctggggggtggggggtgggggaggacgccgagcgctgaggcaggggcccgggccgagggcgcggcggggctgcgcgcacgctggggcgcgtggaggggcgcggagggcgaaatgagtctggtaggtggttttccccaccacccggtggtgcaccacgagggctacccgtttgccgccgccgccgccgcagctgccgccgccgccgccagccgctgcagccatgaggagaacccctacttccatggctggctcatcggccaccccgagatgtcgccccccgactacagcatggccctgtcctacagccccgagtatgccagcggcgccgccggcctggaccactcccattacgggggggtgccgccgggcgccgggcccccgggcctgggggggccgcgcccggtgaagcgccgaggcaccgccaaccgcaaggagcggcgcaggactcagagcatcaacagcgccttcgccgaactgcgcgagtgcatccccaacgtacccgccgacaccaaactctccaaaatcaagaccctgcgcctggccaccagctacatcgcctacctcatggacctgctggccaaggacgaccagaatggcgaggcggaggccttcaaggcagagatcaagaagaccgacgtgaaagaggagaagaggaagaaggagctgaacgaaatcttgaaaagcacagtgagcagcaacgacaagaaaaccaaaggccggacgggctggccgcagcacgtctgggccctggagctcaagcagtgaggaggaggagaaggaggaggaggagagcgcgagtgagcaggggccaaggcgccagatgcagacccaggactccggaaaagccgtccgcgctccgctctgaggactccttgcatttggaatcatccggtttatttatgtgcaatttccttcccctctctttgaccccctttgaggcatctgctccccgtctccccctccaaaaaaaaagtggatatttgaagaaaagcattccatattttaatacgaagaggacactcccgtgtggtaagggatcccgtcgtctcatagattctgtgtgcgtgaatgttccctcttggctgtgtagacaccagcgttgccccccgccaacctactcaaccccttccagataaagacagtgggcactagtgcgtttgtgaagtgtatctttaatacttggcctttggatataaatattcctgggtattataaagttttatttcaaagcagaaaacagggccgctaacatttccgttggggtcggtatctagtgctatccattcatctgtggtcgttccctctttgaagatgtttccaacagccacttgttttgtgcacttccgtcctctaaaactaaatggaatttaattaatattgaaggtgtaaacgttgtaagtattcaataaaccactgtgttttttttttacaaaaaccttaatcttttaatggctgatacctcaaaagagttttgaaaacaaagctgttatacttgttttcgtaatatttaaaatattcagaagtaaactaaattatcatgattgcctctaactttattttaaagactcagtggttccaaccagtcaccctgacctgcggcctacgcaggaggaggaggtgctcttaaagagaagtgtccttgttacaaatcctgcaaatggtctggggtttgtcggtgtggtgtctccttccctcttcccccagctggagaacgctgagtagtctctagaaggaagatctgggctggagaacccagtccggcagttcgctcagaaggtgtaaaggtgctcttgctttcctgaagtcaatcagaagccatttcttgaggccgtcagtttttgtttggagagtgtttctggtggaggagttgtgaggagaaccccggcattattgctgcaacgggaactagtctggggtgtttaattcaaactatggggctttcatccaagaa

SEQ ID NO: 13254 - DNA, 1337 bp, Homo sapiens
  source 1..1337: mol_type = unassigned DNA
atgagtctggtaggtggttttccccaccacccggtggtgcaccacgagggctacccgtttgccgccgccgccgccgcagctgccgccgccgccgccagccgctgcagccatgaggagaacccctacttccatggctggctcatcggccaccccgagatgtcgccccccgactacagcatggccctgtcctacagccccgagtatgccagcggcaccgccaaccgcaaggagcggcgcaggactcagagcatcaacagcgccttcgccgaactgcgcgagtgcatccccaacgtacccgccgacaccaaactctccaaaatcaagaccctgcgcctggccaccagctacatcgcctacctcatggacctgctggccaaggacgaccagaatggcgaggcggaggccttcaaggcagagatcaagaagaccgacgtgaaagaggagaagaggaagaaggagctgaacgaaatcttgaaaagcacagtgagcagcaacgacaagaaaaccaaaggccggacgggctggccgcagcacgtctgggccctggagctcaagcagtgaggaggaggagaaggaggaggaggagagcgcgagtgagcaggggccaaggcgccagatgcagacccaggactccggaaaagccgtccgcgctccgctctgaggactccttgcatttggaatcatccggtttatttatgtgcaatttccttcccctctctttgaccccctttgaggcatctgctccccgtctccccctccaaaaaaaaagtggatatttgaagaaaagcattccatattttaatacgaagaggacactcccgtgtggtaagggatcccgtcgtctcatagattctgtgtgcgtgaatgttccctcttggctgtgtagacaccagcgttgccccccgccaacctactcaaccccttccagataaagacagtgggcactagtgcgtttgtgaagtgtatctttaatacttggcctttggatataaatattcctgggtattataaagttttatttcaaagcagaaaacagggccgctaacatttccgttggggtcggtatctagtgctatccattcatctgtggtcgttccctctttgaagatgtttccaacagccacttgttttgtgcacttccgtcctctaaaactaaatggaatttaattaatattgaaggtgtaaacgttgtaagtattcaataaaccactgtgttttttttttacaaaaaccttaatcttttaatggctgatacctcaaaagagttttgaaaacaaagctgttatacttgttttcgtaatatttaaaatattcagaagtaaactaaattatcatga

SEQ ID NO: 13255 - DNA, 1652 bp, Homo sapiens
  source 1..1652: mol_type = unassigned DNA
agctgtacatggagatcttgctgggaaaatccgcttgctcccctcacgtcgtccagcccaggagaaccaccgccgtcaccccggagcttcctcggccaccgcgcagagccctccgagagcccgagccgcggtcttcgagctccaaggctcattcagggccccagatccttgccccgaaaggagaggatctgagaaaatggatgcactgagacctctctgaaaaccctccgagagagcgcgagaggagcgaggacacgttactcgcagctaaaatcacatttaaggaccaaaacaacaacaaccaaaaatttcattaaaacaataagcgcccaagaacccagatcgggctggtggggggaggggaagaggcgggaaggggagggtcgcacggaggtagctttgcagtgagcagtcgaccccgccgccgccagccgctgcagccatgaggagaacccctacttccatggctggctcatcggccaccccgagatgtcgccccccgactacagcatggccctgtcctacagccccgagtatgccagcggcgccgccggcctggaccactcccattacgggggggtgccgccgggcgccgggcccccgggcctgggggggccgcgcccggtgaagcgccgaggcaccgccaaccgcaaggagcggcgcaggactcagagcatcaacagcgccttcgccgaactgcgcgagtgcatccccaacgtacccgccgacaccaaactctccaaaatcaagaccctgcgcctggccaccagctacatcgcctacctcatggacctgctggccaaggacgaccagaatggcgaggcggaggccttcaaggcagagatcaagaagaccgacgtgaaagaggagaagaggaagaaggagctgaacgaaatcttgaaaagcacagtgagcagcaacgacaagaaaaccaaaggccggacgggctggccgcagcacgtctgggccctggagctcaagcagtgaggaggaggagaaggaggaggaggagagcgcgagtgagcaggggccaaggcgccagatgcagacccaggactccggaaaagccgtccgcgctccgctctgaggactccttgcatttggaatcatccggtttatttatgtgcaatttccttcccctctctttgaccccctttgaggcatctgctccccgtctccccctccaaaaaaaaagtggatatttgaagaaaagcattccatattttaatacgaagaggacactcccgtgtggtaagggatcccgtcgtctcatagattctgtgtgcgtgaatgttccctcttggctgtgtagacaccagcgttgccccccgccaacctactcaaccccttccagataaagacagtgggcactagtgcgtttgtgaagtgtatctttaatacttggcctttggatataaatattcctgggtattataaagttttatttcaaagcagaaaacagggccgctaacatttccgttggggtcggtatctagtgctatccattcatctgtggtcgttccctctttgaagatgtttccaacagccacttgttttgtgcacttccgtcctctaaaactaaatggaatttaattaatattgaaggtgtaaacgttgtaagtattcaataaaccactgtgttttttttttac

SEQ ID NO: 13256 - DNA, 3612 bp, Homo sapiens
  source 1..3612: mol_type = unassigned DNA
gaggaagtgggacctccccttttgggtcggtagttcagcgccggcgccggtgtgcgagccgcggcagagtgaggcaggcaacccgaggtgcggagcgacctgcggaggctgagccccgctttctcccagggtttcttatcagccagccgccgctgtccccgggggagtaggaggctcctgacaggccgcggctgtctgtgtgtccttctgagtgtcagaggaacggccagaccccgcgggccggagcagaacgcggccagggcagaaagcggcggcaggagaagcaggcagggggccggaggacgcagaccgagacccgaggcggaggcggaccgcgagccggccatgtcggtggtggggttggacgtgggctcgcagagctgctacatcgcggtagcccgggccgggggcatcgagaccatcgccaatgagttcagcgaccggtgcaccccgtcagtcatatcatttggatcaaaaaatagaacaatcggagttgcagccaaaaatcagcaaatcactcatgcaaacaatacggtgtctaacttcaaaagatttcatggccgagcattcaatgaccccttcattcaaaaggagaaggaaaacttgagttacgatttggttccattgaaaaatggtggagttggaataaaggtaatgtacatgggtgaagaacatctatttagtgtggagcagataacagccatgttgttgactaagctgaaggaaactgctgaaaacagcctcaagaaaccagtaacagattgtgttatttcagtcccctccttctttacagatgctgagaggcgatctgtgttagatgctgcacagattgttggcctaaactgtttaagacttatgaatgacatgacagctgttgctttgaattacggaatttataagcaggatctcccaagcctggatgagaaacctcggatagtggtttttgttgatatgggacattcagcttttcaagtgtctgcttgtgcttttaacaagggaaaattgaaggtactgggaacagcttttgatcctttcttaggaggaaaaaacttcgatgaaaagttagtggaacatttttgtgcagaatttaaaactaagtacaagttggatgcaaaatccaaaatacgagcactcctacgtctgtatcaggaatgtgaaaaactgaaaaagctaatgagctctaacagcacagaccttccactgaatatcgaatgctttatgaatgataaagatgtttccggaaagatgaacaggtcacaatttgaagaactctgtgctgaacttctgcaaaagatagaagtacccctttattcactgttggaacaaactcatctcaaagtagaagatgtgagtgcagttgagattgttggaggcgctacacgaattccagctgtgaaggaaagaattgccaaattctttggaaaagatattagcacaacactcaatgcagatgaagcagtagccagaggatgtgcattacagtgtgcaatactttccccggcatttaaagttagagaattttccgtcacagatgcagttccttttccaatatctctgatctggaaccatgattcagaagatactgaaggtgttcatgaagtctttagtcgaaaccatgctgctcctttctccaaagttctcacctttctgagaagggggccttttgagctagaagctttctattctgatccccaaggagttccatatccagaagcaaaaataggccgctttgtagttcagaatgtttctgcacagaaagatggagaaaaatctagagtaaaagtcaaagtgcgagtcaacacccatggcattttcaccatctctacggcatctatggtggagaaagtcccaactgaggagaatgaaatgtcttctgaagctgacatggagtgtctgaatcagagaccaccagaaaacccagacactgataaaaatgtccagcaagacaacagtgaagctggaacacagccccaggtacaaactgatgctcaacaaacctcacagtctcccccttcacctgaacttacctcagaagaaaacaaaatcccagatgctgacaaagcaaatgaaaaaaaagttgaccagcctccagaagctaaaaagcccaaaataaaggtggtgaatgttgagctgcctattgaagccaacttggtctggcagttagggaaagaccttcttaacatgtatattgagacagagggtaagatgataatgcaagataaattggaaaaagaaaggaatgatgctaaaaatgcagttgaggaatatgtgtatgagttcagagacaagctgtgtggaccatatgaaaaatttatatgtgagcaggatcatcaaaattttttgagactcctcacagaaactgaagactggctgtatgaagaaggagaggaccaagctaaacaagcatatgttgacaagttggaagaattaatgaaaattggcactccagttaaagttcggtttcaggaagctgaagaacggccaaaaatgtttgaagaactaggacagaggctgcagcattatgccaagatagcagctgacttcagaaataaggatgagaaatacaaccatattgatgagtctgaaatgaaaaaagtggagaagtctgttaatgaagtgatggaatggatgaataatgtcatgaatgctcaggctaaaaagagtcttgatcaggatccagttgtacgtgctcaggaaattaaaacaaaaatcaaggaattgaacaacacatgtgaacccgttgtaacacaaccgaaaccaaaaattgaatcacccaaactggaaagaactccaaatggcccaaatattgataaaaaggaagaagatttagaagacaaaaacaattttggtgctgaacctccacatcagaatggtgaatgttaccctaatgagaaaaattctgttaatatggacttggactagataaccttaaattggcctattccttcaattaataaaatatttttgccatagtatgtgactctacataacatactgaaactatttatattttcttttttaaggatatttagaaattttgtgtattatatggaaaaagaaaaaaagcttaagtctgtagtctttatgatcctaaaagggaaaattgccttggtaactttcagattcctgtggaattgtgaattcatactaagctttctgtgcagtctcaccatttgcatcactgaggatgaaactgacttttgtcttttggagaaaaaaaactgtactgcttgttcaagagggctgtgattaaaatctttaagcatttgttcctgccaaggtagttttcttgcattttgctctccattcagcatgtgtgtgggtgtggatgtttataaacaagactaagtctgacttcataagggctttctaaaaccatttctgtccaagagaaaatgactttttgctttgatattaaaaattcaatgagtaaaacaaaagctagtcaaatgtgttagcagcatgcagaacaaaaactttaaactttctctctcactatacagtatattgtcatgtgaaagtgtggaatggaagaaatgtcgatcctgttgtaactgattgtgaacacttttatgagctttaaaataaagttcatcttatggtgtcatttct

SEQ ID NO: 13257 - DNA, 2737 bp, Homo sapiens
  source 1..2737: mol_type = unassigned DNA
gttcagcgccggcgccggtgtgcgagccgcggcagagtgaggcaggcaacccgaggtgcggagcgacctgcggaggctgagccccgctttctcccagggtttcttatcagccagccgccgctgtccccgggggagtaggaggctcctgacaggccgcggctgtctgtgtgtccttctgagtgtcagaggaacggccagaccccgcgggccggagcagaacgcggccagggcagaaagcggcggcaggagaagcaggcagggggccggaggacgcagaccgagacccgaggcggaggcggaccgcgagccggccatgtcggtggtggggttggacgtgggctcgcagagctgctacatcgcggtagcccgggccgggggcatcgagaccatcgccaatgagttcagcgaccggtgcaccccgtcagtcatatcatttggatcaaaaaatagaacaatcggagttgcagccaaaaatcagcaaatcactcatgcaaacaatacggtgtctaacttcaaaagatttcatggccgagcattcaatgaccccttcattcaaaaggagaaggaaaacttgagttacgatttggttccattgaaaaatggtggagttggaataaaggtaatgtacatgggtgaagaacatctatttagtgtggagcagataacagccatgttgttgactaagctgaaggaaactgctgaaaacagcctcaagaaaccagtaacagattgtgttatttcagtcccctccttctttacagatgctgagaggcgatctgtgttagatgctgcacagattgttggcctaaactgtttaagacttatgaatgacatgacagctgttgctttgaattacggaatttataagcaggatctcccaagcctggatgagaaacctcggatagtggtttttgttgatatgggacattcagcttttcaagtgtctgcttgtgcttttaacaagggaaaattgaaggtactgggaacagcttttgatcctttcttaggaggaaaaaacttcgatgaaaagttagtggaacatttttgtgcagaatttaaaactaagtacaagttggatgcaaaatccaaaatacgagcactcctacgtctgtatcaggaatgtgaaaaactgaaaaagctaatgagctctaacagcacagaccttccactgaatatcgaatgctttatgaatgataaagatgtttccggaaagatgaacaggtcacaatttgaagaactctgtgctgaacttctgcaaaagatagaagtacccctttattcactgttggaacaaactcatctcaaagtagaagatgtgagtgcagttgagattgttggaggcgctacacgaattccagctgtgaaggaaagaattgccaaattctttggaaaagatattagcacaacactcaatgcagatgaagcagtagccagaggatgtgcattacagtgtgcaatactttccccggcatttaaagttagagaattttccgtcacagatgcagttccttttccaatatctctgatctggaaccatgattcagaagatactgaaggtgttcatgaagtctttagtcgaaaccatgctgctcctttctccaaagttctcacctttctgagaagggggccttttgagctagaagctttctattctgatccccaaggagttccatatccagaagcaaaaataggccgctttgtagttcagaatgtttctgcacagaaagatggagaaaaatctagagtaaaagtcaaagtgcgagtcaacacccatggcattttcaccatctctacggcatctatggtggagaaagtcccaactgaggagaatgaaatgtcttctgaagctgacatggagtgtctgaatcagagaccaccagaaaacccagacactgatgcaaatgaaaaaaaagttgaccagcctccagaagctaaaaagcccaaaataaaggtggtgaatgttgagctgcctattgaagccaacttggtctggcagttagggaaagaccttcttaacatgtatattgagacagagggtaagatgataatgcaagataaattggaaaaagaaaggaatgatgctaaaaatgcagttgaggaatatgtgtatgagttcagagacaagctgtgtggaccatatgaaaaatttatatgtgagcaggatcatcaaaattttttgagactcctcacagaaactgaagactggctgtatgaagaaggagaggaccaagctaaacaagcatatgttgacaagttggaagaattaatgaaaattggcactccagttaaagttcggtttcaggaagctgaagaacggccaaaaatgtttgaagaactaggacagaggctgcagcattatgccaagatagcagctgacttcagaaataaggatgagaaatacaaccatattgatgagtctgaaatgaaaaaagtggagaagtctgttaatgaagtgatggaatggatgaataatgtcatgaatgctcaggctaaaaagagtcttgatcaggatccagttgtacgtgctcaggaaattaaaacaaaaatcaaggaattgaacaacacatgtgaacccgttgtaacacaaccgaaaccaaaaattgaatcacccaaactggaaagaactccaaatggcccaaatattgataaaaaggaagaagatttagaagacaaaaacaattttggtgctgaacctccacatcagaatgattcctgtggaattgtgaattcatactaa

SEQ ID NO: 13258 - DNA, 2346 bp, Homo sapiens
  source 1..2346: mol_type = unassigned DNA
agaaggctcgagaagaaggaagcggaagtggcacgtggaggggccggtggaggcgccggtcagtcatatcatttggatcaaaaaatagaacaatcggagttgcagccaaaaatcagcaaatcactcatgcaaacaatacggtgtctaacttcaaaagatttcatggccgagcattcaatgaccccttcattcaaaaggagaaggaaaacttgagttacgatttggttccattgaaaaatggtggagttggaataaaggtaatgtacatgggtgaagaacatctatttagtgtggagcagataacagccatgttgttgactaagctgaaggaaactgctgaaaacagcctcaagaaaccagtaacagattgtgttatttcagtactgggaacagcttttgatcctttcttaggaggaaaaaacttcgatgaaaagttagtggaacatttttgtgcagaatttaaaactaagtacaagttggatgcaaaatccaaaatacgagcactcctacgtctgtatcaggaatgtgaaaaactgaaaaagctaatgagctctaacagcacagaccttccactgaatatcgaatgctttatgaatgataaagatgtttccggaaagatgaacaggtcacaatttgaagaactctgtgctgaacttctgcaaaagatagaagtacccctttattcactgttggaacaaactcatctcaaagtagaagatgtgagtgcagttgagattgttggaggcgctacacgaattccagctgtgaaggaaagaattgccaaattctttggaaaagatattagcacaacactcaatgcagatgaagcagtagccagaggatgtgcattacagtgtgcaatactttccccggcatttaaagttagagaattttccgtcacagatgcagttccttttccaatatctctgatctggaaccatgattcagaagatactgaaggtgttcatgaagtctttagtcgaaaccatgctgctcctttctccaaagttctcacctttctgagaagggggccttttgagctagaagctttctattctgatccccaaggagttccatatccagaagcaaaaataggccgctttgtagttcagaatgtttctgcacagaaagatggagaaaaatctagagtaaaagtcaaagtgcgagtcaacacccatggcattttcaccatctctacggcatctatggtggagaaagtcccaactgaggagaatgaaatgtcttctgaagctgacatggagtgtctgaatcagagaccaccagaaaacccagacactgataaaaatgtccagcaagacaacagtgaagctggaacacagccccaggtacaaactgatgctcaacaaacctcacagtctcccccttcacctgaacttacctcagaagaaaacaaaatcccagatgctgacaaagcaaatgaaaaaaaagttgaccagcctccagaagctaaaaagcccaaaataaaggtggtgaatgttgagctgcctattgaagccaacttggtctggcagttagggaaagaccttcttaacatgtatattgagacagagggtaagatgataatgcaagataaattggaaaaagaaaggaatgatgctaaaaatgcagttgaggaatatgtgtatgagttcagagacaagctgtgtggaccatatgaaaaatttatatgtgagcaggatcatcaaaattttttgagactcctcacagaaactgaagactggctgtatgaagaaggagaggaccaagctaaacaagcatatgttgacaagttggaagaattaatgaaaattggcactccagttaaagttcggtttcaggaagctgaagaacggccaaaaatgtttgaagaactaggacagaggctgcagcattatgccaagatagcagctgacttcagaaataaggatgagaaatacaaccatattgatgagtctgaaatgaaaaaagtggagaagtctgttaatgaagtgatggaatggatgaataatgtcatgaatgctcaggctaaaaagagtcttgatcaggatccagttgtacgtgctcaggaaattaaaacaaaaatcaaggaattgaacaacacatgtgaacccgttgtaacacaaccgaaaccaaaaattgaatcacccaaactggaaagaactccaaatggcccaaatattgataaaaaggaagaagatttagaagacaaaaacaattttggtgctgaacctccacatcagaatggtgaatgttaccctaatgagaaaaattctgttaatatggacttggactagataaccttaaattggcctattccttcaattaataaaatatttttgccatagt

SEQ ID NO: 13259 - DNA, 2177 bp, Homo sapiens
  source 1..2177: mol_type = unassigned DNA
aacatgctctccggacagctggccggcctccccaccatcccggtgtctggggtctctgcaaaaatggggtctgtctccgcccgcccagcctccctttagcgttaaggatcggacaccacctcccggtagtaaattgtgactattccgagttttggagtcattcttcgttgcctgttttattagggcagcaaaacgcctgtggctagggcgggagtgggcggaggcaggtttgagccaatggcacgggagcggccctgtcgctgccatggcaacggcggccgttctccggggaccggctgcccattgggtagaatctttccagaaggctcgagaagaaggaagcggaagtggcacgtggaggggccggtggaggcgccgaggaacggccagaccccgcgggccggagcagaacgcggccagggcagaaagcggcggcaggagaagcaggcagggggcatcgagaccatcgccaatgagttcagcgaccggtgcaccccgtcagtcatatcatttggatcaaaaaatagaacaatcggagttgcagccaaaaatcagcaaatcactcatgcaaacaatacggtgtctaacttcaaaagatttcatggccgagcattcaatgaccccttcattcaaaaggagaaggaaaacttgagttacgatttggttccattgaaaaatggtggagttggaataaaggtaatgtacatgggtgaagaacatctatttagtgtggagcagataacagccatgttgttgactaagctgaaggaaactgctgaaaacagcctcaagaaaccagtaacagattgtgttatttcagtcccctccttctttacagatgctgagaggcgatctgtgttagatgctgcacagattgttggcctaaactgtttaagacttatgaatgacatgacagctgttgctttgaattacggaatttataagcaggatctcccaagcctggatgagaaacctcggatagtggtttttgttgatatgggacattcagcttttcaagtgtctgcttgtgcttttaacaagggaaaattgaaggtactgggaacagcttttgatcctttcttaggaggaaaaaacttcgatgaaaagttagtggaacatttttgtgcagaatttaaaactaagtacaagttggatgcaaaatccaaaatacgagcactcctacgtctgtatcaggaatgtgaaaaactgaaaaagctaatgagctctaacagcacagaccttccactgaatatcgaatgctttatgaatgataaagatgtttccggaaagatgaacaggtcacaatttgaagaactctgtgctgaacttctgcaaaagatagaagtacccctttattcactgttggaacaaactcatctcaaagtagaagatgtgagtgcagttgagattgttggaggcgctacacgaattccagctgtgaaggaaagaattgccaaattctttggaaaagatattagcacaacactcaatgcagatgaagcagtagccagaggatgtgcattacagtgtgcaatactttccccggcatttaaagttagagaattttccgtcacagatgcagttccttttccaatatctctgatctggaaccatgattcagaagatactgaaggtgttcatgaagtctttagtcgaaaccatgctgctcctttctccaaagttctcacctttctgagaagggggccttttgagctagaagctttctattctgatccccaaggagttccatatccagaagcaaaaataggccgctttgtagttcagaatgtttctgcacagaaagatggagaaaaatctagagtaaaagtcaaagtgcgagtcaacacccatggcattttcaccatctctacggcatctatggtggagaaagtcccaactgaggagaatgaaatgtcttctgaagctgacatggagtgtctgaatcagagaccaccagaaaacccagacactgataaaaatgtccagcaagacaacagtgaagctggaacacagccccaggtacaaactgatgctcaacaaacctcacagtctcccccttcacctgaacttacctcagaagaaaacaaaatcccagatgctgacaagcaaatgaaaaaaaagttgaccagcctccagaagctaaaaagcccaaaataaaggtggtgaatgttgagctg

SEQ ID NO: 13260 - DNA, 3274 bp, Homo sapiens
  source 1..3274: mol_type = unassigned DNA
acacttctcccagcgggactacgattcccaacatgctctccggacagctggccggcctccccaccatcccggtgtctggggtctctgcaaaaatggggtctgtctccgcccgcccagcctccctttagcgttaaggatcggacaccacctcccggtagtaaattgtgactattccgagttttggagtcattcttcgttgcctgttttattagggcagcaaaacgcctgtggctagggcgggagtgggcggaggcaggtttgagccaatggcacgggagcggccctgtcgctgccatggcaacggcggccgttctccggggaccggctgcccattgggtagaatctttccagaaggctcgagaagaaggaagcggaagtggcacgtggaggggccggtggaggcgccggtcagtcatatcatttggatcaaaaaatagaacaatcggagttgcagccaaaaatcagcaaatcactcatgcaaacaatacggtgtctaacttcaaaagatttcatggccgagcattcaatgaccccttcattcaaaaggagaaggaaaacttgagttacgatttggttccattgaaaaatggtggagttggaataaaggtaatgtacatgggtgaagaacatctatttagtgtggagcagataacagccatgttgttgactaagctgaaggaaactgctgaaaacagcctcaagaaaccagtaacagattgtgttatttcagtcccctccttctttacagatgctgagaggcgatctgtgttagatgctgcacagattgttggcctaaactgtttaagacttatgaatgacatgacagctgttgctttgaattacggaatttataagcaggatctcccaagcctggatgagaaacctcggatagtggtttttgttgatatgggacattcagcttttcaagtgtctgcttgtgcttttaacaagggaaaattgaaggtactgggaacagcttttgatcctttcttaggaggaaaaaacttcgatgaaaagttagtggaacatttttgtgcagaatttaaaactaagtacaagttggatgcaaaatccaaaatacgagcactcctacgtctgtatcaggaatgtgaaaaactgaaaaagctaatgagctctaacagcacagaccttccactgaatatcgaatgctttatgaatgataaagatgtttccggaaagatgaacaggtcacaatttgaagaactctgtgctgaacttctgcaaaagatagaagtacccctttattcactgttggaacaaactcatctcaaagtagaagatgtgagtgcagttgagattgttggaggcgctacacgaattccagctgtgaaggaaagaattgccaaattctttggaaaagatattagcacaacactcaatgcagatgaagcagtagccagaggatgtgcattacagtgtgcaatactttccccggcatttaaagttagagaattttccgtcacagatgcagttccttttccaatatctctgatctggaaccatgattcagaagatactgaaggtgttcatgaagtctttagtcgaaaccatgctgctcctttctccaaagttctcacctttctgagaagggggccttttgagctagaagctttctattctgatccccaaggagttccatatccagaagcaaaaataggccgctttgtagttcagaatgtttctgcacagaaagatggagaaaaatctagagtaaaagtcaaagtgcgagtcaacacccatggcattttcaccatctctacggcatctatggtggagaaagtcccaactgaggagaatgaaatgtcttctgaagctgacatggagtgtctgaatcagagaccaccagaaaacccagacactgataaaaatgtccagcaagacaacagtgaagctggaacacagccccaggtacaaactgatgctcaacaaacctcacagtctcccccttcacctgaacttacctcagaagaaaacaaaatcccagatgctgacaaagcaaatgaaaaaaaagttgaccagcctccagaagctaaaaagcccaaaataaaggtggtgaatgttgagctgcctattgaagccaacttggtctggcagttagggaaagaccttcttaacatgtatattgagacagagggtaagatgataatgcaagataaattggaaaaagaaaggaatgatgctaaaaatgcagttgaggaatatgtgtatgagttcagagacaagctgtgtggaccatatgaaaaatttatatgtgagcaggatcatcaaaattttttgagactcctcacagaaactgaagactggctgtatgaagaaggagaggaccaagctaaacaagcatatgttgacaagttggaagaattaatgaaaattggcactccagttaaagttcggtttcaggaagctgaagaacggccaaaaatgtttgaagaactaggacagaggctgcagcattatgccaagatagcagctgacttcagaaataaggatgagaaatacaaccatattgatgagtctgaaatgaaaaaagtggagaagtctgttaatgaagtgatggaatggatgaataatgtcatgaatgctcaggctaaaaagagtcttgatcaggatccagttgtacgtgctcaggaaattaaaacaaaaatcaaggaattgaacaacacatgtgaacccgttgtaacacaaccgaaaccaaaaattgaatcacccaaactggaaagaactccaaatggcccaaatattgataaaaaggaagaagatttagaagacaaaaacaattttggtgctgaacctccacatcagaatggtgaatgttaccctaatgagaaaaattctgttaatatggacttggactagataaccttaaattggcctattccttcaattaataaaatatttttgccatagtatgtgactctacataacatactgaaactatttatattttcttttttaaggatatttagaaattttgtgtattatatggaaaaagaaaaaaagcttaagtctgtagtctttatgatcctaaaagggaaaattgccttggtaactttcagattcctgtggaattgtgaattcatactaagctttctgtgcagtctcaccatttgcatcactgaggatgaaactgacttttgtcttttggagaaaaaaaactgtactgcttgttcaagagggctgtgattaaaatctttaagcatttgttcctgccaaggtagttttcttgcattttgctctccattcagcatgtgtg

SEQ ID NO: 13261 - DNA, 950 bp, Homo sapiens
  source 1..950: mol_type = unassigned DNA
cctacccgcgcagggtgtgctagcgcgctcagccctctccggccggcttagtctagttcccgggcctcgctcggttccagaactttccagaaaatgccgcgctccctacggctcaagggtcaaatcgcgtcatttccgggaggggacgaaggggtagttctttcacctcggctgggcgcctagaaaagcctagaaacagctccttttttcttccgcctccgagtcttcgcgtcagcgtcctgcgcagggcccttggggcgaatcgcggtgcgcgtcggggcgaccgccctccctccctgggaggggcgagggggctagcggcgaccgctggggcgagcgcgcctgcgcgctgggtgattttttcacgtgtcgccagggccggactgcgagtctctttgcggcgctacactagagcagagtacgagtctgaggcggagggagtaatggcaggacaagcgtttagaaagtttcttccactctttgaccgagtattggttgaaaggagtgctgctgaaactgtaaccaaaggaggcattatgcttccagaaaaatctcaaggaaaagtattgcaagcaacagtagtcgctgttggatcgggttctaaaggaaagggtggagagattcaaccagttagcgtgaaagttggagataaagttcttctcccagaatatggaggcaccaaagtagttctagatgacaaggattatttcctatttagagatggtgacattcttggaaagtacgtagactgaaataagtcactattgaaatggcatcaacatgatgctgcccattccactgaagttctgaaatctttcgtcatgtaaataatttccatatttctcttttataataaactaatgataactaatgacatccagtgtctccaaaattgtttccttgtactgatataaacacttccaaataaaaatatgtaaatgagtggttaa

SEQ ID NO: 13262 - DNA, 570 bp, Homo sapiens
  source 1..570: mol_type = unassigned DNA
gcgagtctctttgcggcgctacactagagcagagtacgagtctgaggcggagggagtaatggcaggacaagcgtttagaaagtttcttccactctttgaccgagtattggttgaaaggagtgctgctgaaactgtaaccaaaggaggcattatgcttccagaaaaatctcaaggaaaagtattgcaagcaacagtagtcgctgttggatcgggttctaaaggaaagggtggagagattcaaccagttagcgtgaaagttggagataaagttcttctcccagaatatggaggcaccaaagtagttctagatgacaaggtgtgtaaacttaataattctaaaaagaagtcagatatttgcaattagttgtcttaactaatggtttttttcacttgcaggattatttcctatttagagatggtgacattcttggaaagtacgtagactgaaataagtcactattgaaatggcatcaacatgatgctgcccattccactgaagttctgaaatctttcgtcatgtaaataatttccatatttctcttttataataaactaatgataactaatgac

SEQ ID NO: 13263 - DNA, 478 bp, Homo sapiens
  source 1..478: mol_type = unassigned DNA
cgaaggggtagttctttcacctcggctgggcgcctagaaaagcctagaaacagctccttttttcttccgcctccgagtcttcgcgtcagcgtcctgcgcagggcccttggggcgaatcgcggtgcgcgtcggggcgaccgccctccctccctgggaggggcgagggggctagcggcgaccgctggggcgagcgcgcctgcgcgctgggtgattttttcacgtgtcgccagggccggactgcgagtctctttgcggcgctacactagagcagagtacgagtctgaggcggagggagtaatgggtggagagattcaaccagttagcgtgaaagttggagataaagttcttctcccagaatatggaggcaccaaagtagttctagatgacaaggattatttcctatttagagatggtgacattcttggaaagtacgtagactgaaataagtcactattgaaatggcatcaacatgatgctg

SEQ ID NO: 13264 - DNA, 2150 bp, Homo sapiens
  source 1..2150: mol_type = unassigned DNA
attaatagccaggccttagtgccccgctcggggagggcggctccagctcctggagcaagaggagggcggagctgagcggagtggccaggggaggagagagtgtccggagaggccggctgaacttggacgcggcccctcccagctccccccacagcccagctgttccctccgcggattctccggggctggttcatcacctccgaatattcctgtgacaggagacgcttgcaaaacccgcctccagcctccagcagcaaataaatagaaggcttgcagcccagaaggagccagaagaagtttctaggcgcgcgtgccctgggtttattaagctcctggctccgctctagacctcagcggttctggctgccagcctgggcagcctgggaagcctgggaggacggtggcttgccggtctgtcgtgaggcagtgcggacggggaccctctgggattctgctggatctgccccgggggttacctttgggggctgggaccccagtcgaggggacacaaccgtccctggcagtggttggttctgcttctccctgcagaaaagcagcattttcggaagctgaagaataagctagcccagccacaccaccttgttgtgtgaccttgggcaggtggttctgtctctctgagcctctgtttctctctgagctgagcagccaccatggctgacggtcagatgcccttctcctgccactacccaagccgcctgcgccgagaccccttccgggactctcccctctcctctcgcctgctggatgatggctttggcatggaccccttcccagacgacttgacagcctcttggcccgactgggctctgcctcgtctctcctccgcctggccaggcaccctaaggtcgggcatggtgccccggggccccactgccaccgccaggtttggggtgcctgccgagggcaggacccccccacccttccctggggagccctggaaagtgtgtgtgaatgtgcacagcttcaagccagaggagttgatggtgaagaccaaagatggatacgtggaggtgtctggcaaacatgaagagaaacagcaagaaggtggcattgtttctaagaacttcacaaagaaaatccagcttcctgcagaggtggatcctgtgacagtatttgcctcactttccccagagggtctgctgatcatcgaagctccccaggtccctccttactcaacatttggagagagcagtttcaacaacgagcttccccaggacagccaggaagtcacctgtacctgagatgccagtactggcccatccttgttttgtccccaaccctagggcttctctgattccaggatacattactttagctgaactcagatttagtgcaagtaaaatgttagagggtgcgggggtgaggactgaccacagattccctggatagtgtagtggtagatttctccacaggatagcgcaattggcaaatcatgcttggttgtgttaggccaaaatactagttttgctttctttaccttttctatcttgatgaaaatgttgcacattctatagttgcaaaacacataaaaggggacttaacatttcacgttgtatcttacttgcagtgaatgcaagggttacttttctctggggacctcccccatcacccaggttcctactctgggctcccgattcccatggctcccaaaccatgccgcatggtttggttaatgaaacccagtagctaaccccactgtgcttccacatgcctggcctaaaatgggtgatatacaggtcttatatccccatatggaatttatccatcaaccacataaaaacaaacagtgccttctgccctctgcccagatgtgtccagcacgttctcaaagtttccacattagcactccctaaggacgctgggagcctgtcagtttatgatctgacctaggtcccccctttcttctgtcccctgtgtttaagtcgggatttttacagagggagctgtctccagacagctccatcaggaaccaagcaaaggccagatagcctgacagataggctagtggtattgtgtatatgggcgggacgtgtgtgtcattattatttgagttatgctgttgtttaggggtaaataacagtaaataattaataataataataataataataaaggagctgacgttctta

SEQ ID NO: 13265 - DNA, 763 bp, Homo sapiens
  source 1..763: mol_type = unassigned DNA
gcattccgtgctatgattcaggcctaattaagtgattgcgtctgggcacggctataaaccactagctgcttcaactggtaatccagtcagtaggcaactgcaggggctcgccactgactgaaggcagtggaaggttggcagaaggaggctgttcaaggctgtttttgccttcactatggcaaaaatcattttgaggcacctcatagagattccagtgcgttaccaggaagagtttgaagctcgaggtctagaagactgcaggctggatcatgctttatatgcactgcctgggccaaccatcgtggacctgaggaaaaccagggcagcgcagtctcctccagtggactcagcggcagagacgccaccccgagaaggcaaatcccactttcagatcctgctggacgtggtccagttcctccctgaagacatcatcattcagaccttcgaaggctggctgctgataaaagcacaacacggaaccagaatggatgagcacggttttatctcaagaagcttcacccgacagtacaaactaccagatggtgtggaaatcaaagatttgtctgcagtcctctgtcatgatggaattttggtggtggaagtaaaggatccagttgggactaagtgacatcgtatcggttcctgttcagatgacatggggaagatgatggttcagccactggtactacgagaatgtttgtattacccacatttgaaatgatttgctatgatttttatgaagattaaaaatatatacacagtt

SEQ ID NO: 13266 - DNA, 2892 bp, Homo sapiens
  source 1..2892: mol_type = unassigned DNA
cttttacctctgactgaaatcccacctaaggcgctcgcaggcatcacctctgacacagagatggagcagacagttgccgggaacacaaccttctagacctttaaggagaaagctgccaactttgtcctcttggggctgctgaatgttctgagagtcagagggagtgcaggcacagaatccaggtccccatgggggctggcaggggacagctgcacattttacaccccctggcagggctcaacctttccttagagatgggctgtgaaggttgtctgccttgagggaaggagctcctgacgtcacagagcggtggtgcttccacctaccctgtccccaaggagcctgcacactgatggaggaggtacagccgtggaggagaaccagagtctggaggggaggcacagtcctcaggagcccccaggctgacgggggaaacaaaacacacaataaaccccaaacttgcaaggttctggggcaggcaccgaggtccgagtggcaaggagacaggatccagccctgtgcagtggtgaggaggcccctggggctgctgtgatcagcctggaatgtcaggctgtgagctcagccctctcggcctgcgtgtcgggctgtcagcagggccggcgcacgggagaagatttccagccccctctgggccatggagaggcctaaatttagctagtagacaaggggctggccccaagcccagggacagtcggccttataaagcggccgcagtcggagcctggcacgctcgcccagaggcctgcgcccacaccctctcctgtccagccctcgcccgcctgggcagggcccggcgccgtccgtggatgagccacagaacctcttccaccttccgagcggagagaagtttccattcctcttcctcttcctcctcctcttccacctcctcctcggcctcccgtgctctcccggcccaggacccgcccatggagaaggccctgagcatgttttccgatgactttggcagcttcatgcggccccactcggagcccctggccttcccagcccgccccggtggggcaggcaacatcaagaccctaggagacgcctatgagtttgcggtggacgtgagagacttctcacctgaagacatcattgtcaccacctccaacaaccacatcgaggtgcgggctgagaagctggcggctgacggcactgtcatgaacaccttcgctcacaagtgccagctgccggaggacgtggacccgacgtcggtgacctcggctctgcgggaggacggcagcctcactatccgggcacggcgtcacccgcatacagaacacgtccagcagaccttccggacggagatcaaaatctgagtgcctctcccttccctttccctgtccccccgccccacgcctgccagcaaagcctcgctaaccccattacaacagctccaggacatctcagcccaggttctagcccccacgcaccccagaccccaggtggaccatcctcccaaactagggccctccactctatccagggcaggccagggactccctggcctgacacatgatgcccagatttcagatttggcctccgtcacttaatccagagtacaggggctggggtcagggaaggaagatctaaagaacccactgtgggtcaggggaatgggaccagcaggacatatgggcaagctctgcaggacagacagacagacaaaccctctgatctatgaagtctctgcagggcaaggggaccagggacctggaaccctcttggccaaggggagtgggagggacagagggaaggtcacaggcaagggtgcctatctaagtggaactaattgcccgagggctcagcaaggccaagaggagacagccgtgacggtaaacttcccctctaccagcctccaagccccacgccagcgagcaggctgcctgcccaccccgtgcccccagccagctggctgtgccagggcagagccatgccacatctgtatatagatggggtttttccaatacagctggttcgtgataaactgcatgaaactcctgccgtcctgcgcctgctggggcctccaggcaaggccaagtggggttgggggtggggctggtccttctccctcccacaggcctgtgttcttggggctgctcccatgcagacaggatcacctaacagagatggaagccagggcatggatggggctttgggtcctcgaggttggaccccagcttcttgccaccttcccctccgggcagtcagctctccatccatccccctctttaatctatgaatctataggctcggtgtgtgtaacacacacacccctatcgttgtccttcaaatactcagcattaccattggttgaggccaaattcagagctttctcaaatcagatttacaatctccattttcattaacggggaaacatccccgagccactgagtgctgtgctttgtcactgaaggttagatctgaacccagggtgtcaactgctgctctcaactccccacctctgggcactgaggagtatttcccctcattctacctctctaaggctatgcaaccctccccacgtcttccagctgggggatgggggggagtcataggaaaagcccccatctcccatctgggatagggaccttccatcagccttaaccctgggaaatgcctgctgcccccaatgactcttggtttcgtctcccacatacagaagcagggtggaggggaagggtgggtctcagttagcaggggtccccagggcaagtcagcctcctccctccatgcctctctggtcagtgtgccttagggtggcctctcactcccaccactctgggccccttgggggaggactggggagggggccgtgggagagccctgacgctggaacctgtatacacaataaaggacagtctcacagac

SEQ ID NO: 13267 - DNA, 2905 bp, Homo sapiens
  source 1..2905: mol_type = unassigned DNA
cttttacctctgactgaaatcccacctaaggcgctcgcaggcatcacctctgacacagagatggagcagacagttgccgggaacacaaccttctagacctttaaggagaaagctgccaactttgtcctcttggggctgctgaatgttctgagagtcagagggagtgcaggcacagaatccaggtccccatgggggctggcaggggacagctgcacattttacaccccctggcagggctcaacctttccttagagatgggctgtgaaggttgtctgccttgagggaaggagctcctgacgtcacagagcggtggtgcttccacctaccctgtccccaaggagcctgcacactgatggaggaggtacagccgtggaggagaaccagagtctggaggggaggcacagtcctcaggagcccccaggctgacgggggaaacaaaacacacaataaaccccaaacttgcaaggttctggggcaggcaccgaggtccgagtggcaaggagacaggatccagccctgtgcagtggtgaggaggcccctggggctgctgtgatcagcctggaatgtcaggctgtgagctcagccctctcggcctgcgtgtcgggctgtcagcagggccggcgcacgggagaagatttccagccccctctgggccatggagaggcctaaatttagctagtagacaaggggctggccccaagcccagggacagtcggccttataaagcggccgcagtcggagcctggcacgctcgcccagaggcctgcgcccacaccctctcctgtccagccctcgcccgcctgggcagggcccggcgccgtccgtggatgagccacagaacctcttccaccttccgagcggagagaagtttccattcctcttcctcttcctcctcctcttccacctcctcctcggcctcccgtgctctcccggcccaggacccgcccatggagaaggccctgagcatgttttccgatgactttggcagcttcatgcggccccactcggagcccctggccttcccagcagcccatcccacagcccgccccggtggggcaggcaacatcaagaccctaggagacgcctatgagtttgcggtggacgtgagagacttctcacctgaagacatcattgtcaccacctccaacaaccacatcgaggtgcgggctgagaagctggcggctgacggcactgtcatgaacaccttcgctcacaagtgccagctgccggaggacgtggacccgacgtcggtgacctcggctctgcgggaggacggcagcctcactatccgggcacggcgtcacccgcatacagaacacgtccagcagaccttccggacggagatcaaaatctgagtgcctctcccttccctttccctgtccccccgccccacgcctgccagcaaagcctcgctaaccccattacaacagctccaggacatctcagcccaggttctagcccccacgcaccccagaccccaggtggaccatcctcccaaactagggccctccactctatccagggcaggccagggactccctggcctgacacatgatgcccagatttcagatttggcctccgtcacttaatccagagtacaggggctggggtcagggaaggaagatctaaagaacccactgtgggtcaggggaatgggaccagcaggacatatgggcaagctctgcaggacagacagacagacaaaccctctgatctatgaagtctctgcagggcaaggggaccagggacctggaaccctcttggccaaggggagtgggagggacagagggaaggtcacaggcaagggtgcctatctaagtggaactaattgcccgagggctcagcaaggccaagaggagacagccgtgacggtaaacttcccctctaccagcctccaagccccacgccagcgagcaggctgcctgcccaccccgtgcccccagccagctggctgtgccagggcagagccatgccacatctgtatatagatggggtttttccaatacagctggttcgtgataaactgcatgaaactcctgccgtcctgcgcctgctggggcctccaggcaaggccaagtggggttgggggtggggctggtccttctccctcccacaggcctgtgttcttggggctgctcccatgcagacaggatcacctaacagagatggaagccagggcatggatggggctttgggtcctcgaggttggaccccagcttcttgccaccttcccctccgggcagtcagctctccatccatccccctctttaatctatgaatctataggctcggtgtgtgtaacacacacacccctatcgttgtccttcaaatactcagcattaccattggttgaggccaaattcagagctttctcaaatcagatttacaatctccattttcattaacggggaaacatccccgagccactgagtgctgtgctttgtcactgaaggttagatctgaacccagggtgtcaactgctgctctcaactccccacctctgggcactgaggagtatttcccctcattctacctctctaaggctatgcaaccctccccacgtcttccagctgggggatgggggggagtcataggaaaagcccccatctcccatctgggatagggaccttccatcagccttaaccctgggaaatgcctgctgcccccaatgactcttggtttcgtctcccacatacagaagcagggtggaggggaagggtgggtctcagttagcaggggtccccagggcaagtcagcctcctccctccatgcctctctggtcagtgtgccttagggtggcctctcactcccaccactctgggccccttgggggaggactggggagggggccgtgggagagccctgacgctggaacctgtatacacaataaaggacagtctcacag

SEQ ID NO: 13268 - DNA, 844 bp, Homo sapiens
  source 1..844: mol_type = unassigned DNA
cttataaagcggccgcagtcggagcctggcacgctcgcccagaggcctgcgcccacaccctctcctgtccagccctcgcccgcctgggcagggcccggcgccgtccgtggatgagccacagaacctcttccaccttccgagcggagagaagtttccattcctcttcctcttcctcctcctcttccacctcctcctcggcctcccgtgctctcccggcccaggacccgcccatggagaaggccctgagcatgttttccgatgactttggcagcttcatgcggccccactcggagcccctggccttcccagcagcccatcccacagcccgccccggtggggcaggcaacatcaagaccctaggagacgcctatgagtttgcggtggacgtgagagacttctcacctgaagacatcattgtcaccacctccaacaaccacatcgaggtgcgggctgagaagctggcggctgacggcactgtcatgaacaccttcgctcacaagtgccagctgccggaggacgtggacccgacgtcggtgacctcggctctgcgggaggacggcagcctcactatccgggcacggcgtcacccgcatacagaacacgtccagcagaccttccggacggagatcaaaatctgagtgcctctcccttccctttccctgtccccccgccccacgcctgccagcaaagcctcgctaaccccattacaacagctccaggacatctcagcccaggttctagcccccacgcaccccagaccccaggtggaccatcctcccaaactagggccctccactctatccagggcaggccagggactccctggcctgacacatgatgccca

SEQ ID NO: 13269 - DNA, 485 bp, Homo sapiens
  source 1..485: mol_type = unassigned DNA
acgctcgcccagaggcctgcgcccacaccctctcctgtccagccctcgcccgcctgggcagggcccggcgccgtccgtggatgagccacagaacctcttccaccttccgagcggagagaagtttccattcctcttcctcttcctcctcctcttccacctcctcctcggcctcccgtgctctcccggcccaggacccgcccatggagaaggccctgagcatgttttccgatgactttggcagcttcatgcggccccactcggagcccctggccttcccaggcaagtgatccgggccctgaggggaggggaggtgcacagggaggggacgtctgctccagggcgccaccgaaggcgctgtggctgccggtcggcctggaacaggtgctgcacagcctgcagccatgtgtggccaccaagacagatgtggccacagggacagatgtggccatgaaaacaggtgggctgtaggaatgaggaggagctta

SEQ ID NO: 13270 - DNA, 2299 bp, Homo sapiens
  source 1..2299: mol_type = unassigned DNA
gccccgacgcgcaccgcgattcgccccaagggccctgcgcaggacgctgacgcgaagactcggaggcggaagaaaaaaggagctgtttctaggcttttctaggcgcccagccgagaaatgcttcggttacccacagtctttcgccagatgagaccggtgtccagggtactggctcctcatctcactcgggcttatgccaaagatgtaaaatttggtgcagatgcccgagccttaatgcttcaaggtgtagaccttttagccgatgctgtggccgttacaatggggccaaagggaagaacagtgattattgagcagagttggggaagtcccaaagtaacaaaagatggtgtgactgttgcaaagtcaattgacttaaaagataaatacaaaaacattggagctaaacttgttcaagatgttgccaataacacaaatgaagaagctggggatggcactaccactgctactgtactggcacgctctatagccaaggaaggcttcgagaagattagcaaaggtgctaatccagtggaaatcaggagaggtgtgatgttagctgttgatgctgtaattgctgaacttaaaaagcagtctaaacctgtgaccacccctgaagaaattgcacaggttgctacgatttctgcaaacggagacaaagaaattggcaatatcatctctgatgcaatgaaaaaagttggaagaaagggtgtcatcacagtaaaggatggaaaaacactgaatgatgaattagaaattattgaaggcatgaagtttgatcgaggctatatttctccatactttattaatacatcaaaaggtcagaaatgtgaattccaggatgcctatgttctgttgagtgaaaagaaaatttctagtatccagtccattgtacctgctcttgaaattgccaatgctcaccgtaagcctttggtcataatcgctgaagatgttgatggagaagctctaagtacactcgtcttgaataggctaaaggttggtcttcaggttgtggcagtcaaggctccagggtttggtgacaatagaaagaaccagcttaaagatatggctattgctactggtggtgcagtgtttggagaagagggattgaccctgaatcttgaagacgttcagcctcatgacttaggaaaagttggagaggtcattgtgaccaaagacgatgccatgctcttaaaaggaaaaggtgacaaggctcaaattgaaaaacgtattcaagaaatcattgagcagttagatgtcacaactagtgaatatgaaaaggaaaaactgaatgaacggcttgcaaaactttcagatggagtggctgtgctgaaggttggtgggacaagtgatgttgaagtgaatgaaaagaaagacagagttacagatgcccttaatgctacaagagctgctgttgaagaaggcattgttttgggagggggttgtgccctccttcgatgcattccagccttggactcattgactccagctaatgaagatcaaaaaattggtatagaaattattaaaagaacactcaaaattccagcaatgaccattgctaagaatgcaggtgttgaaggatctttgatagttgagaaaattatgcaaagttcctcagaagttggttatgatgctatggctggagattttgtgaatatggtggaaaaaggaatcattgacccaacaaaggttgtgagaactgctttattggatgctgctggtgtggcctctctgttaactacagcagaagttgtagtcacagaaattcctaaagaagagaaggaccctggaatgggtgcaatgggtggaatgggaggtggtatgggaggtggcatgttctaactcctagactagtgctttacctttattaatgaactgtgacaggaagcccaaggcagtgttcctcaccaataacttcagagaagtcagttggagaaaatgaagaaaaaggctggctgaaaatcactataaccatcagttactggtttcagttgacaaaatatataatggtttactgctgtcattgtccatgcctacagataatttattttgtatttttgaataaaaaacatttgtacattcctgatactgggtacaagagccatgtaccagtgtactgctttcaacttaaatcactgaggcatttttactactattctgttaaaatcaggattttagtgcttgccaccaccagatgagaagttaagcagcctttctgtggagagtgagaataattgtgtacaaagtagagaagtatccaattatgtgacaacctttgtgtaataaaaatttgtttaaagtt

SEQ ID NO: 13271 - DNA, 2455 bp, Homo sapiens
  source 1..2455: mol_type = unassigned DNA
agactaagccggccggagagggctgagcgcgctagcacaccctgcgcgggtagggaggggcggggctcgcgcgcagggtgtgcagattgcagggcccgggctgacgggaagtgggtgggagctgcctgcacacgcggtgccgcggggcgggagtagaggcggagggaggggacacgggctcattgcggtgtgcgccctgcactctgtccctcactcgccgccgacgacctgtctcgccgagcgcacgccttgccgccgccccgcagaaatgcttcggttacccacagtctttcgccagatgagaccggtgtccagggtactggctcctcatctcactcgggcttatgccaaagatgtaaaatttggtgcagatgcccgagccttaatgcttcaaggtgtagaccttttagccgatgctgtggccgttacaatggggccaaagggaagaacagtgattattgagcagagttggggaagtcccaaagtaacaaaagatggtgtgactgttgcaaagtcaattgacttaaaagataaatacaaaaacattggagctaaacttgttcaagatgttgccaataacacaaatgaagaagctggggatggcactaccactgctactgtactggcacgctctatagccaaggaaggcttcgagaagattagcaaaggtgctaatccagtggaaatcaggagaggtgtgatgttagctgttgatgctgtaattgctgaacttaaaaagcagtctaaacctgtgaccacccctgaagaaattgcacaggttgctacgatttctgcaaacggagacaaagaaattggcaatatcatctctgatgcaatgaaaaaagttggaagaaagggtgtcatcacagtaaaggatggaaaaacactgaatgatgaattagaaattattgaaggcatgaagtttgatcgaggctatatttctccatactttattaatacatcaaaaggtcagaaatgtgaattccaggatgcctatgttctgttgagtgaaaagaaaatttctagtatccagtccattgtacctgctcttgaaattgccaatgctcaccgtaagcctttggtcataatcgctgaagatgttgatggagaagctctaagtacactcgtcttgaataggctaaaggttggtcttcaggttgtggcagtcaaggctccagggtttggtgacaatagaaagaaccagcttaaagatatggctattgctactggtggtgcagtgtttggagaagagggattgaccctgaatcttgaagacgttcagcctcatgacttaggaaaagttggagaggtcattgtgaccaaagacgatgccatgctcttaaaaggaaaaggtgacaaggctcaaattgaaaaacgtattcaagaaatcattgagcagttagatgtcacaactagtgaatatgaaaaggaaaaactgaatgaacggcttgcaaaactttcagatggagtggctgtgctgaaggttggtgggacaagtgatgttgaagtgaatgaaaagaaagacagagttacagatgcccttaatgctacaagagctgctgttgaagaaggcattgttttgggagggggttgtgccctccttcgatgcattccagccttggactcattgactccagctaatgaagatcaaaaaattggtatagaaattattaaaagaacactcaaaattccagcaatgaccattgctaagaatgcaggtgttgaaggatctttgatagttgagaaaattatgcaaagttcctcagaagttggttatgatgctatggctggagattttgtgaatatggtggaaaaaggaatcattgacccaacaaaggttgtgagaactgctttattggatgctgctggtgtggcctctctgttaactacagcagaagttgtagtcacagaaattcctaaagaagagaaggaccctggaatgggtgcaatgggtggaatgggaggtggtatgggaggtggcatgttctaactcctagactagtgctttacctttattaatgaactgtgacaggaagcccaaggcagtgttcctcaccaataacttcagagaagtcagttggagaaaatgaagaaaaaggctggctgaaaatcactataaccatcagttactggtttcagttgacaaaatatataatggtttactgctgtcattgtccatgcctacagataatttattttgtatttttgaataaaaaacatttgtacattcctgatactgggtacaagagccatgtaccagtgtactgctttcaacttaaatcactgaggcatttttactactattctgttaaaatcaggattttagtgcttgccaccaccagatgagaagttaagcagcctttctgtggagagtgagaataattgtgtacaaagtagagaagtatccaattatgtgacaacctttgtgtaataaaaatttgtttaaagttaataa

SEQ ID NO: 13272 - DNA, 533 bp, Homo sapiens
  source 1..533: mol_type = unassigned DNA
ccctcactcgccgccgacgacctgtctcgccgagcgcacgccttgccgccgccccgcaggcagctgggataccgcgcctccagtcttgaccttgctgggggcgttcggaaagaaggacacgtgggctcgcgccgagtgggccgggccgccgcccccagcatcgcggccttgctggttgctctgatacagtagccttgggtggatccatggagacactttgctgagcggctttttgcaccgtcaggaatacttttaacttccctggtcacttggatttgtaacttgcctctctccggctgacttggtttctcaggggccacagttggagtgggtctgcccacaaggccgttttcgcgaaatgcttcggttacccacagtctttcgccagatgagaccggtgtccagggtactggctcctcatctcactcgggcttatgccaaagatgtaaaatttggtgcagatgcccgagccttaatgcttcaaggtgtagaccttttagccgatgctgtggccgttacaatggggccaaagg

SEQ ID NO: 13273 - DNA, 549 bp, Homo sapiens
  source 1..549: mol_type = unassigned DNA
attgcggtgtgcgccctgcactctgtccctcactcgccgccgacgacctgtctcgccgagcgcacgccttgccgccgccccgcaggcagctgggataccgcgcctccagtcttgaccttgctgggggcgttcggaaagaaggacacgtgggctcgcgccgagtgggccgggccgccgcccccagcatcgcggccttgctggttgctctgatacagtagccttgggtggatccatggagacactttgctgagcggctttttgcaccaaatgcttcggttacccacagtctttcgccagatgagaccggtgtccagggtactggctcctcatctcactcgggcttatgccaaagatgtaaaatttggtgcagatgcccgagccttaatgcttcaaggtgtagaccttttagccgatgctgtggccgttacaatggggccaaagggaagaacagtgattattgagcagagttggggaagtcccaaagtaacaaaagatggtgtgactgttgcaaagtcaattgacttaaaagataaatacaaaaacattgga

SEQ ID NO: 13274 - DNA, 754 bp, Homo sapiens
  source 1..754: mol_type = unassigned DNA
cggaagaaaaaaggagctgtttctaggcttttctaggcgcccagccgagaaatgcttcggttacccacagtctttcgccagatgagaccggtgtccagggtactggctcctcatctcactcgggcttatgccaaagatgtaaaatttggtgcagatgcccgagccttaatgcttcaaggtgtagaccttttagccgatgctgtggccgttacaatggggccaaagggaagaacagtgattattgagcagagttggggaagtcccaaagtaacaaaagatggtgtgactgttgcaaagtcaattgacttaaaagataaatacaaaaacattggagctaaacttgttcaagatgttgccaataacacaaatgaagaagctggggatggcactaccactgctactgtactggcacgctctatagccaaggaaggcttcgagaagattagcaaaggtgctaatccagtggaaatcaggagaggtgtgatgttagctgttgatgctgtaattgctgaacttaaaaagcagtctaaacctgtgaccacccctgaagaaattgcacaggttgctacgatttctgcaaacggagacaaagaaattggcaatatcatctctgatgcaatgaaaaaagttggaagaaagggtgtcatcacagatggaaaaacactgaatgatgaattagaaattattgaaggcatgaagtttgatcgaggctatatttctccatactttattaatacatcaaaaggtaagaaca

SEQ ID NO: 13275 - DNA, 578 bp, Homo sapiens
  source 1..578: mol_type = unassigned DNA
actcgccgccgacgacctgtctcgccgagcgcacgccttgccgccgccccgcaggcagctgggataccgcgcctccagtcttgaccttgctgggggcgttcggaaagaaggacacgtgggctcgcgccgagtgggccgggccgccgcccccagcatcgcggccttgctggttgctctgatacagtagccttgggtggatccatggagacactttgctgagcggctttttgcaccgtcaggaatacttttaacttccctggtcacttggatttgtaacttgcctctctccggctgacttggtttctcaggggccacagttggagtggaaatgcttcggttacccacagtctttcgccagatgagaccggtgtccagggtactggctcctcatctcactcgggcttatgccaaagatgtaaaatttggtgcagatgcccgagccttaatgcttcaaggtgtagaccttttagccgatgctgtggccgttacaatggggccaaagggaagaacagtgattattgagcagagttggggaagtcccaaagtaacaaaagatggtgtgactgttgcaaagtcaa

SEQ ID NO: 13276 - DNA, 888 bp, Homo sapiens
  source 1..888: mol_type = unassigned DNA
gaagactcggaggcggaagaaaaaaggagctgtttctaggcttttctaggcgcccagccgaggtgaaagaactaccccttcgtcccctcccggaaatgacgcgatttgacccttgagccgtagggagcgcggcattttctggaaagttctggaaccgagcgaggcccgggaactagactaagccggccggagagggctgagcgcgctagcacaccctgcgcggaaatgcttcggttacccacagtctttcgccagatgagaccggtgtccagggtactggctcctcatctcactcgggcttatgccaaagatgtaaaatttggtgcagatgcccgagccttaatgcttcaaggtgtagaccttttagccgatgctgtggccgttacaatggggccaaagggaagaacagtgattattgagcagagttggggaagtcccaaagtaacaaaagatggtgtgactgttgcaaagtcaattgacttaaaagataaatacaaaaacattggagctaaacttgttcaagatgttgccaataacacaaatgaagaagctggggatggcactaccactgctactgtactggcacgctctatagccaaggaaggcttcgagaagattagcaaaggtgctaatccagtggaaatcaggagaggtgtgatgttagctgttgatgctgtaattgctgaacttaaaaagcagtctaaacctgtgaccacccctgaagaaattgcacaggttgctacgatttctgcaaacggagacaaagaaattggcaatatcatctctgatgcaatgaaaaaagttggaagaaagggtgtcatcacagtaaaggatggaaaaacactgaatgatgaattagaaattattgaaggcatgaagtttgatcga

SEQ ID NO: 13277 - DNA, 1306 bp, Homo sapiens
  source 1..1306: mol_type = unassigned DNA
actcgccgccgacgacctgtctcgccgagcgcacgccttgccgccgccccgcagaaatgcttcggttacccacagtctttcgccagatgagaccggtgtccagggtactggctcctcatctcactcgggcttatgccaaagatgtaaaatttggtgcagatgcccgagccttaatgcttcaaggtgtagaccttttagccgatgctgtggccgttacaatggggccaaagggaagaacagtgattattgagcagagttggggaagtcccaaagtaacaaaagatggtgtgatgttagctgttgatgctgtaattgctgaacttaaaaagcagtctaaacctgtgaccacccctgaagaaattgcacaggttgctacgatttctgcaaacggagacaaagaaattggcaatatcatctctgatgcaatgaaaaaagttggaagaaagggtgtcatcacagtaaaggatggaaaaacactgaatgatgaattagaaattattgaaggcatgaagtttgatcgaggctatatttctccatactttattaatacatcaaaaggtcagaaatgtgaattccaggatgcctatgttctgttgagtgaaaagaaaatttctagtatccagtccattgtacctgctcttgaaattgccaatgctcaccgtaagcctttggtcataatcgctgaagatgttgatggagaagctctaagtacactcgtcttgaataggctaaaggttggtcttcaggttgtggcagtcaaggctccagggtttggtgacaatagaaagaaccagcttaaagatatggctattgctactggtggtgcagtgtttggagaagagggattgaccctgaatcttgaagacgttcagcctcatgacttaggaaaagttggagaggtcattgtgaccaaagacgatgccatgctcttaaaaggaaaaggtgacaaggctcaaattgaaaaacgtattcaagaaatcattgagcagttagatgtcacaactagtgaatatgaaaaggaaaactgaatgaacggcttgcaaaactttcagatggagtggctgtgctgaaggttggtgggacaagtgatgttgaagtgaatgaaaagaaagacagagttacagatgcccttaatgctacaagagctgctgttgaagaaggcattgttttgggagggggttgtgccctccttcgatgcattccagccttggactcattgactccagctaatgaagatcaaaaaattggtatagaaattattaaaagaacactcaaaattccagcaatgaccattgctaagaatgca

SEQ ID NO: 13278 - DNA, 748 bp, Homo sapiens
  source 1..748: mol_type = unassigned DNA
attttctggaaagttctggaaccgagcgaggcccgggaactagactaagccggccggagagggctgagcgcgctagcacaccctgcgcggaaatgcttcggttacccacagtctttcgccagatgagaccggtgtccagggtactggctcctcatctcactcgggcttatgccaaagatgtaaaatttggtgcagatgcccgagccttaatgcttcaaggtgtagaccttttagccgatgctgtggccgttacaatggggccaaagggaagaacagtgattattgagcagagttggggaagtcccaaagtaacaaaagatggtgtgactgttgcaaagtcaattgacttaaaagataaatacaaaaacattggagctaaacttgttcaagatgttgccaataacacaaatgaagaagctggggatggcactaccactgctactgtactggcacgctctatagccaaggaaggcttcgagaagattagcaaaggtgctaatccagtggaaatcaggagaggtaggaatgtctgttgtcaccacagtgttctaaacttcagtgtgctttaaggcattgattccttggacctaaggaaagtgttaacttgaggaaattaatccttctctcattcctcctcttggcctggagaaatcttaaactgggttttcctttagcaagcttggctgtatggtgggtaggtactgttaggtaattttgatattttacttagttggtttcttttgttttt

SEQ ID NO: 13279 - DNA, 3151 bp, Homo sapiens
  source 1..3151: mol_type = unassigned DNA
gaggaggcgggaggcctcagggccgggcgcacgtcgagggctgcggccgccgcagcgggcacggccaacgagctgcgggcccgggatcgcggcggctggacggggctggagctgtcgggagggcggagctacagggcctgcaaggatgttggctgtcccggagatgggcctgcaggggctgtacatcggctccagcccggagcggtccccagtgcctagcccacccggctccccgaggacccaggaaagctgcggcattgcccccctcacaccctcgcagtctccaaaacccgaggtccgagccccccagcaggcctccttctctgtggtggtggccattgacttcggcaccacgtctagtggctatgctttcagctttgccagtgaccctgaggccatccacatgatgaggaaatgggagggcggagacccgggcgtggcccaccagaagaccccgacctgcctgctgctgactccggagggcgccttccacagctttggctacaccgcccgcgattactaccatgacctggaccccgaagaggcgcgggactggctctacttcgagaagttcaagatgaagatccacagcgccacggatctcaccttgaagacccagctagaggcagtaaatggaaagacgatgcccgccctggaggtgttcgcccatgccctgcgcttcttcagggagcacgcccttcaggagctgagggagcagagcccatcgctgccagagaaggacactgtgcgctgggtgttgacggtgcctgccatctggaaacagccagccaagcagttcatgcgggaggctgcctacctggctggactagtgtcccgagagaatgcagagcagctactcatcgccctggagcccgaggccgcctcggtatactgccgcaagctgcgcctgcaccagctcctggacctgagtggccgggccccaggtggtgggcgcctgggtgagcgccgctccatcgactccagcttccgtcaggctcgggagcagctgcgaaggtcccgccacagccgcacgttcctggtggagtcaggcgtaggagagctgtgggcagagatgcaagcaggagaccgctacgtggtggccgactgcggcggaggcaccgtggacctgacggtgcaccagctggagcagccccatggcaccctcaaggagctctacaaggcatctgggggcccttatggcgcggtgggcgtggacctggccttcgagcagctgctgtgccgcatcttcggcgaggacttcatcgccaccttcaaaaggcaacggccggcagcctgggtagatctgaccatcgccttcgaggctcgcaagcgcactgctggcccacaccgtgcaggggcgctcaacatctcgctgcccttctccttcattgacttctaccgcaagcagcggggccacaacgtggagaccgctctgcgcaggagcagcgtgaacttcgtgaagtggtcctcacaggggatgctccgaatgtcttgtgaagccatgaacgagctctttcagcccaccgtcagcgggatcatccagcacatagaggccctgctggcacggccggaggtgcagggtgtgaagctgctgttcctagtgggcggcttcgccgagtcagcggtgctgcagcacgcggtgcaggcggcgctgggcgcccgcggtctgcgtgtcgtggtcccgcacgacgtgggcctcaccatcctcaaaggcgcggtgctgttcggccaggcgccgggcgtggtgcgggtccgccgctcgccgctcacctatggcgtgggcgtgctcaaccgctttgtgcctgggcgccacccgcccgaaaagctgctggttcgcgacggccgccgctggtgcaccgacgtcttcgagcgcttcgtggccgccgagcagtcggtggccctgggcgaggaggtgcggcgcagctactgcccggcgcgtcccggccagcggcgcgtactcatcaacctgtactgctgcgcggcagaggatgcgcgcttcatcaccgaccccggcgtgcgcaaatgcggcgcgctcagcctcgagcttgagcccgccgactgcggccaggacaccgccggcgcgcctcccggccgccgcgagatccgcgccgccatgcagtttggcgacaccgaaattaaggtcaccgccgtcgacgtcagcaccaatcgctccgtgcgcgcgtccatcgactttctttccaactgagggcgcgccggcgcggtgccagcgccgtctgcccggccccgccctctttcggttcaggggcctgcggagcgggttggggcgggggaaacgatagttctgcagtctgcgcctttccacgccctccagccccgggggagataaggtcatgggagagtgggtggggacacacccagagactggctttgggattgggcactggtccgctgactgccaggctgaagggacccgccaaggactgaacgggtaagagaagaggtttgcaagacagagcgcgcagcccggcaaggggcatgtgaccccgaaggaagaacgcaacagaagagtcctggtctgaacttggccgagtaggggtgggggtgggatggcaggaggagccgcaggaggaaggaggttgtgcagggtctggacctgcagggctgaagttcactcatcgaccgactcagccccaaccgggagccaggcagaaaaaccctgtgccgtaggaaagtgactggaagtggactccagagggacaggtgtggtggcacagtcctggtgtggtgctgaccacccaaatatgactgtgaattgtggaaagggcagtagatctctaatgtggaggtgggaacattattgtggtggaggcaattatgagggtagcatttctttcgagacaaaacacccgtctgggaaggccccaaggtcagcttatgaaggaccccacttgcaccccaccccagccatggaagagcagctggagggtggatggggaggccagagggagcaatgaggggtggtcccagctctgctattgactcggtatgcctttaggacattctcttaccgctcatgggcctcagtttcctaaagtgtgaaatgtcaggcacttccctctaactggcatgcaacagccccacctgcctgagagccctgaggtgacaataaaacatttatgctcaaggggaa

SEQ ID NO: 13280 - DNA, 3009 bp, Homo sapiens
  source 1..3009: mol_type = unassigned DNA
ggccgccgcagcgggcacggccaacgagctgcgggcccgggatcgcggcggctggacggggctggagctgtcgggagggcggagctacagggcctgcaaggatgttggctgtcccggagatgggcctgcaggggctgtacatcgaaacccgaggtccgagccccccagcaggcctccttctctgtggtggtggccattgacttcggcaccacgtctagtggctatgctttcagctttgccagtgaccctgaggccatccacatgatgaggaaatgggagggcggagacccgggcgtggcccaccagaagaccccgacctgcctgctgctgactccggagggcgccttccacagctttggctacaccgcccgcgattactaccatgacctggaccccgaagaggcgcgggactggctctacttcgagaagttcaagatgaagatccacagcgccacggatctcaccttgaagacccagctagaggcagtaaatggaaagacgatgcccgccctggaggtgttcgcccatgccctgcgcttcttcagggagcacgcccttcaggagctgagggagcagagcccatcgctgccagagaaggacactgtgcgctgggtgttgacggtgcctgccatctggaaacagccagccaagcagttcatgcgggaggctgcctacctggctggactagtgtcccgagagaatgcagagcagctactcatcgccctggagcccgaggccgcctcggtatactgccgcaagctgcgcctgcaccagctcctggacctgagtggccgggccccaggtggtgggcgcctgggtgagcgccgctccatcgactccagcttccgtcaggctcgggagcagctgcgaaggtcccgccacagccgcacgttcctggtggagtcaggcgtaggagagctgtgggcagagatgcaagcaggagaccgctacgtggtggccgactgcggcggaggcaccgtggacctgacggtgcaccagctggagcagccccatggcaccctcaaggagctctacaaggcatctgggggcccttatggcgcggtgggcgtggacctggccttcgagcagctgctgtgccgcatcttcggcgaggacttcatcgccaccttcaaaaggcaacggccggcagcctgggtagatctgaccatcgccttcgaggctcgcaagcgcactgctggcccacaccgtgcaggggcgctcaacatctcgctgcccttctccttcattgacttctaccgcaagcagcggggccacaacgtggagaccgctctgcgcaggagcagcgtgaacttcgtgaagtggtcctcacaggggatgctccgaatgtcttgtgaagccatgaacgagctctttcagcccaccgtcagcgggatcatccagcacatagaggccctgctggcacggccggaggtgcagggtgtgaagctgctgttcctagtgggcggcttcgccgagtcagcggtgctgcagcacgcggtgcaggcggcgctgggcgcccgcggtctgcgtgtcgtggtcccgcacgacgtgggcctcaccatcctcaaaggcgcggtgctgttcggccaggcgccgggcgtggtgcgggtccgccgctcgccgctcacctatggcgtgggcgtgctcaaccgctttgtgcctgggcgccacccgcccgaaaagctgctggttcgcgacggccgccgctggtgcaccgacgtcttcgagcgcttcgtggccgccgagcagtcggtggccctgggcgaggaggtgcggcgcagctactgcccggcgcgtcccggccagcggcgcgtactcatcaacctgtactgctgcgcggcagaggatgcgcgcttcatcaccgaccccggcgtgcgcaaatgcggcgcgctcagcctcgagcttgagcccgccgactgcggccaggacaccgccggcgcgcctcccggccgccgcgagatccgcgccgccatgcagtttggcgacaccgaaattaaggtcaccgccgtcgacgtcagcaccaatcgctccgtgcgcgcgtccatcgactttctttccaactgagggcgcgccggcgcggtgccagcgccgtctgcccggccccgccctctttcggttcaggggcctgcggagcgggttggggcgggggaaacgatagttctgcagtctgcgcctttccacgccctccagccccgggggagataaggtcatgggagagtgggtggggacacacccagagactggctttgggattgggcactggtccgctgactgccaggctgaagggacccgccaaggactgaacgggtaagagaagaggtttgcaagacagagcgcgcagcccggcaaggggcatgtgaccccgaaggaagaacgcaacagaagagtcctggtctgaacttggccgagtaggggtgggggtgggatggcaggaggagccgcaggaggaaggaggttgtgcagggtctggacctgcagggctgaagttcactcatcgaccgactcagccccaaccgggagccaggcagaaaaaccctgtgccgtaggaaagtgactggaagtggactccagagggacaggtgtggtggcacagtcctggtgtggtgctgaccacccaaatatgactgtgaattgtggaaagggcagtagatctctaatgtggaggtgggaacattattgtggtggaggcaattatgagggtagcatttctttcgagacaaaacacccgtctgggaaggccccaaggtcagcttatgaaggaccccacttgcaccccaccccagccatggaagagcagctggagggtggatggggaggccagagggagcaatgaggggtggtcccagctctgctattgactcggtatgcctttaggacattctcttaccgctcatgggcctcagtttcctaaagtgtgaaatgtcaggcacttccctctaactggcatgcaacagccccacctgcctgagagccctgaggtgacaataaaacatttatgctcaaggggaa

SEQ ID NO: 13281 - DNA, 2126 bp, Homo sapiens
  source 1..2126: mol_type = unassigned DNA
ggaggcctcagggccgggcgcacgtcgagggctgcggccgccgcagcgggcacggccaacgagctgcgggcccgggatcgcggcggctggacggggctggagctgtcgggagggcggagctacagggcctgcaaggatgttggctgtcccggagatgggcctgcaggggctgtacatcggaaatgggagggcggagacccgggcgtggcccaccagaagaccccgacctgcctgctgctgactccggagggcgccttccacagctttggctacaccgcccgcgattactaccatgacctggaccccgaagaggcgcgggactggctctacttcgagaagttcaagatgaagatccacagcgccacgagccgccctgtgtccctgccaggatctcaccttgaagacccagctagaggcagtaaatggaaagacgatgcccgccctggaggtgttcgcccatgccctgcgcttcttcagggagcacgcccttcaggagctgagggagcagagcccatcgctgccagagaaggacactgtgcgctgggtgttgacggtgcctgccatctggaaacagccagccaagcagttcatgcgggaggctgcctacctggctggactagtgtcccgagagaatgcagagcagctactcatcgccctggagcccgaggccgcctcggtatactgccgcaagctgcgcctgcaccagctcctggacctgagtggccgggccccaggtggtgggcgcctgggtgagcgccgctccatcgactccagcttccgtcaggctcgggagcagctgcgaaggtcccgccacagccgcacgttcctggtggagtcaggcgtaggagagctgtgggcagagatgcaagcaggagaccgctacgtggtggccgactgcggcggaggcaccgtggacctgacggtgcaccagctggagcagccccatggcaccctcaaggagctctacaaggcatctgggggcccttatggcgcggtgggcgtggacctggccttcgagcagctgctgtgccgcatcttcggcgaggacttcatcgccaccttcaaaaggcaacggccggcagcctgggtagatctgaccatcgccttcgaggctcgcaagcgcactgctggcccacaccgtgcaggggcgctcaacatctcgctgcccttctccttcattgacttctaccgcaagcagcggggccacaacgtggagaccgctctgcgcaggagcagcgtgaacttcgtgaagtggtcctcacaggggatgctccgaatgtcttgtgaagccatgaacgagctctttcagcccaccgtcagcgggatcatccagcacatagaggccctgctggcacggccggaggtgcagggtgtgaagctgctgttcctagtgggcggcttcgccgagtcagcggtgctgcagcacgcggtgcaggcggcgctgggcgcccgcggtctgcgtgtcgtggtcccgcacgacgtgggcctcaccatcctcaaaggcgcggtgctgttcggccaggcgccgggcgtggtgcgggtccgccgctcgccgctcacctatggcgtgggcgtgctcaaccgctttgtgcctgggcgccacccgcccgaaaagctgctggttcgcgacggccgccgctggtgcaccgacgtcttcgagcgcttcgtggccgccgagcagtcggtggccctgggcgaggaggtgcggcgcagctactgcccggcgcgtcccggccagcggcgcgtactcatcaacctgtactgctgcgcggcagaggatgcgcgcttcatcaccgaccccggcgtgcgcaaatgcggcgcgctcagcctcgagcttgagcccgccgactgcggccaggacaccgccggcgcgcctcccggccgccgcgagatccgcgccgccatgcagtttggcgacaccgaaattaaggtcaccgccgtcgacgtcagcaccaatcgctccgtgcgcgcgtccatcgactttctttccaactgagggcgcgccggcgcggtgccagcgccgtctgcccggccccgccctctttcggttcaggggcctgcggagcgggttggggcgggggaaacgatagttctgcagtctgcgcctttccacgccctccagcccc

SEQ ID NO: 13282 - DNA, 5722 bp, Homo sapiens
  source 1..5722: mol_type = unassigned DNA
ggcggctcagacacggcccgagcgccgccgcggacgcggacagagacccgcacgggcacgggcgctgcgctggaggctcccctcgcggtccggggctgcgcgaccatggcggacaaggaggccggcggcagcgacgggccccgagaaacggctcccacatctgcatattcatctccagcccggagtcttggggacacaggaataacgcctctgtccccctcccatattgtgaacgacactgactccaacgtctcagaacagcagtcatttctcgtggtggtggccgtcgactttgggaccacatccagtggctatgcctacagcttcaccaaggagccggaatgcatccatgtgatgaggcgatgggagggaggtgaccctggtgtgtccaatcagaagactccaaccaccatcttgctgactcccgagaggaagttccacagcttcgggtatgccgccagggacttttaccatgacctggatcccaatgaggccaagcagtggctgtacctggagaagttcaagatgaagctgcacaccactggggacctcaccatggatacagacctgacggcagcaaatggcaagaaagtcaaagcccttgaaatctttgcttatgccctgcagtactttaaggagcaggcgctgaaggagctgagtgaccaggcgggttcggagttcgagaactctgatgtcagatgggtcatcacggtgcctgccatctggaagcagccggccaagcagttcatgagacaagctgcctaccaggcaggcctggcctcccccgagaactcggagcagctcatcattgccttggagcctgaggcagcctctatctactgccgaaagctgcggctacaccagatgattgagctgagcagcaaggcagccgtcaatgggtacagcggcagtgacacagtaggagctgggtttacacaggctaaggaacacatacggcgtaatcggcagagtcggacctttttggtggagaatgtcataggagaaatctggtccgagctggaggaaggtgataagtatgtggttgtggacagtggcggtggcaccgtagacctgacagtccatcagatccggttaccggagggacaccttaaggaactgtataaagcaacaggcggaccctatggatctttaggagtagattatgagttcgaaaaacttctgtataaaatatttggagaggattttattgaacaattcaaaatcaaacgccctgcagcctgggttgacttaatgattgcgtttgagtctcgcaaaagggcggctgccccagacagaactaacccgctgaacatcaccctgcccttctccttcattgactactacaagaagttccgcgggcacagtgtggagcacgccttgcggaaaagcaatgtggattttgtgaagtggtcctcgcaggggatgctgcggatgagtccagatgccatgaacgccctttttaagccgaccatcgatagcatcattgagcatctccgggacctgtttcagaagcccgaggtgtccaccgtcaagttcctctttctggtgggcggctttgccgaggcgcccctgctgcagcaggcggtgcaggctgcttttggggaccagtgccggatcatcatcccccaggacgtgggcctcaccatcctcaagggtgccgtcctctttggcctggaccccgcggtcatcaaggtgcgccggtcgccgctcacctacggggtaggcgtgctgaaccgctacgtggagggcaagcacccgcctgagaagctgctggtgaaggatggcactcggtggtgcaccgacgtctttgacaagttcatctctgccgaccagtctgtggctctgggtgagctggtcaagcgtagctacaccccggccaagccctcccagctggtcattgtcatcaacatctacagctctgagcacgacaacgtcagcttcatcactgatcccggggtgaagaagtgtggcacgctccgcctggatctcacagggaccagtggcactgcggtgcccgcccggagggagatccagacccttatgcagttcggggacaccgagatcaaagccacagccattgatatagccacttcgaagagtgtcaaagttgggatcgacttcttaaattactaaccctcccgccccgctgcctgtccccttggactcaacttatctgcatctgctgacctcaaccttgactgttctttccctaaccttgaccctcaccattgcccatgtgaatttcagcagggaagatgagaacaatcagggctagaaataattagtgacttttgagggcacactggagtcagaaaaacagaaattaagattaaggtttaggcatagaaaattaaaggatcctggaggagcagctagttttcataggtacaaaagtggtgaaatggccacggagaagggaatcagtacatttctgcagcagtggttgcgctgctttgaacagatctccgttatgtagaatttaggatgccctattgctgtctttctagatttaaaatgagatctttgaaccaggaggagatcttcatctgagacttgtctttctaaattttttggatggccatcaatataaaatgccacccatctgcagttaatttcttttcctcatcatgtgattaaaagtggtgattcagtgggaactgggaatgtttttagctggtggtagaaggctgcctacactgggcactgttttagattctcatatcatttaaacagcaaggaggttcagggaagaataaccgtagccttgggtaatccactagggcttttgtgagtaggagagctgatacctcacattcttagcaggtgaaaacttgccatgatggaaacagatagtgaagagttactgacgtatcccaaattatatgctgtgacataaattcccagcatgcccagccctgatttctgagttcataagtaattctagtgaaccttagtaggaattctgggtaagaaaatgaggttgccattggtcttgtttgcatcaccaagaccagacatccagaagagcccctcaccttgaaaagcagacagattttaaattaaccccctccttcccactcaccttcatctccctaagagttttggccatttaattccacattttgaaaggaatacattggtgaaatttgggaagagaatctgtgctatgcaatgtttcattaaaatcttcagtttttcaagtctctctaaaaataatttgtagatctatacttgatgtattaagtcagttttttttcacagcgggcctgtggctcgcctgcatcagaattgcctgggtgcgtgttcagaacaggttcctggatctgagccctttttaactgaggccgactcttggagaggggcaccagaatctgcatttgtagtgtataccacatcgtggttcaactgaaattggagaaatactaacctgagattttgttgaagttcacacacagatcacagcccgccctctgcaggtgtcccctttgggctcctttaggaagagggcttccatgagaaggtgaccccataccttgccctcttggtcaatgggattggggctccacctggcttggagatggcccttttaaccctcacaggaagggccaggggaggaaaaaaattgcaagaaagcgacaccaagaacggagctgactgaggaaccaactggagggtcttcactctctccttccccagtgtacaaaaccagttttctgcaacattcaggagccaaatgaggaaaaagaatcaagaatctgactcacagcccatctgatctgttcaaagctgtcttttccacctgctgaaattcattaaatcactggaggcatgcataatgaatggagaatgagtgaacttccaatgcaacttggattcacaaacccattatcatagccaatatgcagattttaaacagcatttcacatttcatttgaccatgtcttctttttcgcatcgcctgctgcagaattccctactagaatgtgaaacaacgaacaaaccacagaacttagagtgtgctggttagtcacataacttagtagcaggattgtgtatccaggcacaaaggtgtctttgctaatgttctcttgctacctgccctgcttcaaacgctaaatggtatgggtctttctttgttgccagccatattctacaaataagacttttcaatatagttatgagtaatataattttatgtacatataatgttagaatattgtacagaatcttggtttctacgatgcgcttttcttgtttcaaaaagaggaaaatgcttgatttttgttgatgatacttttgttactgtccttaattttccatagtttggtttcttaattgtgctcactaagcatcgatctgtgctgatgccaagctatggactatgtacgcaagaccgagcaatagacagaggtgcctagggtccaaacacactgaacgcacgtggaccgcctggatcaggagcctcatcagacccttctccatgcacatccttcccaaacagtcacagattccattgaaaggagcagattctatcagttcttctgtgcagactttaagagctgaacgttctggttctggaagccatgtgactgcgcagaacaacctaagaaaccctttgtgtcctgaggggtcgttgacctctccttccgggtcggagcagtcactctgagggcaaagcgtggtccactgtgtgtgatgttttcaggatgctagggtcaaagaaagaaaccaagtggtacataagcccagcttttctgctgggctaagtgtaagtgtgagtaacatggtcaagcccctcttttttgggctaatgtaaagcctttcctgccttgcattaatgctatctccctgtgtactgtttctcttaaatgagcagatagaaatctgcagtgttggcagataggtgatggagaggatgataattttatcttctggccacagagctgcagccccagttgtcagagtccttaaatgaaacccccaaatccatccctccttccctacccccactggaatattctagaataagagcactggataagtacacttgaacacatttttctaaccttagaaaatacctacaaggcctgttgtcttgacccattactcaattgtccctggcatattatctgatcttcacgtttcttggaagcagaatcatcaaggctttcctttgtaactgccctttccgtacacagcaggcatgaataaatgctgagtaacagacaagttacagacaggaggggaaagaggaggaaccatacaactgtttttgcaaaatgatggctgagtccagattatagaggttgccttacccttagaatgttatttagaccaagtttagcttttagagtccaggtctggttaattgccagggtagcaaagaatcgcatgcaccaatgtaaacaggagtcagaatgcattattagtcaaagatcgaatttcacattgtagagatgtatagctgtgattaagctgcatatgtatgctgggaaacggcttgagtggatggctaatataaaagttgttggccataatgccacacctctcatctgcttgaaatatggaccagtattctaaaatatcagctactggggtctcattcactacaagataaattcaaacttcacagaactttgcagcagttcaccaccagacgggactgtgtctgcaaactctcttgtcttcacagacgcctaataaagcaaaactctgaatctca

SEQ ID NO: 13283 - DNA, 1978 bp, Homo sapiens
  source 1..1978: mol_type = unassigned DNA
gtgcctgatggggccgttgggcggccggtagctgttgctgttgggggaccccctcattcctgccgctgccgtccctgctgcctcatggcggccatcggagttcacctgggctgcacctcagcctgtgtggccgtctataaggatggccgggctggtgtggttgcaaatgatgccggtgaccgagttactccagctgttgttgcttactcagaaaatgaagagattgttggattggcagcaaaacaaagtagaataagaaatatttcaaatacagtaatgaaagtaaagcagatcctgggcagaagccagaaatgcggtccttggacctggcttctcagcttctccgaaatcagatagtgactgacccagacaacttaatggaggatgctgcttgggccaagcactgtgatcagaacttagtggcctctgacgccccaggggaagagggaaccggcattctaaaatcaaaaaggactcaggcagctgatcatcagcctatcttgaaaacagttaaggcatcagatgaggattgtcagctaagaatcagtgaccggatacgagaaaccagtgaccttgaggactcctgggatgaatcctcgggtgcagggtgctctcaagggacccccagctacagcagctcccacagccttttcagaggtgcagttgctccctgtcagagcagccccatggccagactgggtgtgtccggggagcccagcccctgcaccagcaccaaccgcagcactcctggggtagcctccacaccgcagactccagtctcctcttcgagagctggttttgtttctggtggggataggcccttgaccagtgagccccctccaaggtgggcaaggcgaagaaggcggtcagtggccaggactatcgcagccgagttggcagaaaacaggcgattggcacgagaactctcaaagcgggaggaagaaaaactggacaggctgattgctattggtgaggaggccagtgctcagcaagatactgccaatgagctccgcagggatgctgtcatcgcagtcagacgtttggcaacagcagtggaagaggcaactggtgcttttcagctaggccttgaaaaattgcttcagaggttgatttcgaataccaaaagctaggaaccaattacaaaaggctctgcttcctaaactggtagaagtctagttcccaaacctgccttctgaatccctggctccttttctgtgtcctcagaaaaaaacatggatgaaccatttatatccagatagtatgaaaataattgctagttcattttcccaagattctccaccaaatggaagacctttcagaaatgccaggggtgacctaatagaaaacgatggagccacgttctagacagctggttcatcctagctttgtcacagatgtgaagcagtttacctccctccagtggtttcctcatccgtaaaatggggatcaataataactcctgccctgcctacctcacagggttgttgtgaggatcacgtagttcatagatgtgaaagggtttaaaagtttaaaagcactgtacacatttaagttattaattcatatggccttggctgaggtaaggcagattggtttacaagatacagaagtatggatatatactgtgacttcattgcttgaatctttcctttgctggtctaacttgactgcttcatggagtttgaaatcttaatttttaaaatccctgtgtggctcattagacgactataagcacaacctgtatttgtaccttaatctcttacatttccactgctgtgtatctgacatatctactagtaagcactgttttgtcaaaccgtctttctctccttcattttactggttcttagtctcctatcaatataaggaaataagaagtgccagggagccgccattgtgtgttacggtttatatcgataatcttcaatataaaatactggccattttataaaatattaaatatatgtaaattctttgc

SEQ ID NO: 13284 - DNA, 1904 bp, Homo sapiens
  source 1..1904: mol_type = unassigned DNA
gcactgtgcagtttccgcggagcgcagagacgcgctgaagctactcgcggactgcgcgtgaagaaaggcggaaccttcacgctgattggcggcgacgcgggaggctgtagcggccgaccggacgcagggggctggcgggaacgtgaagctccgcggtgcctgatggggccgttgggcggccggtagctgttgctgttgggggaccccctcattcctgccgctgccgtccctgctgcctcatggcggccatcggagttcacctgggctgcacctcagcctgtgtggccgtctataaggatggccgggctggtgtggttgcaaatgatgccggtgaccgagttactccagctgttgttgcttactcagaaaatgaagagattgttggattggcagcaaaacaaagtagaataagaaatatttcaaatacagtaatgaaagtaaagcagatcctgggcagaagctccagtgatccacaagctcagaaatacatcgcggaaagtaaatgtttagtcattgaaaaaaatgggaaattacgatatgaaatagatactggagaagaaacaaaatttgttaacccagaagatgttgccagactgatatttagtaaaatgaaagaaacggcacattctgtattgggctcagatgcaaatgatgtagttattactgtcccgtttgattttggagaaaagcaaaaaaatgctcttggagaagcagctagagctgctggatttaatgttttgcgattaattcacgaaccgtctgcagctcttcttgcttatggaattggacaagactcccctactggaaaaagcaatattttggtgtttaagcttggaggaacatccttatctctcagcgtcatggaagttaacagtggaatatatcgggttctttcaacaaacactgatgataacatcggtggtgcacatttcacagaaaccttagcacagtatctagcttctgagttccaaagatccttcaaacatgatgtgagaggaaatgcgcgagccatgatgaaattaacgaacagtgctgaagtagcgaaacattctttgtcaaccttgggaagtgccaactgttttcttgactcattatatgaaggtcaagattttgattgcaatgtgtccagagcaagatttgaacttctttgttctccactttttaataagtgtatagaagcaatcagaggactcttagatcaaaatggatttacagcagatgatatcaacaaggttgtcctttgtggagggtcttctcgaatcccaaagctacagcaactgattaaagatcttttcccagctgttgagcttctcaattctatccctcctgatgaagtgatccctattggtgcagctatagaagcaggaattcttattgggaaagaaaacctgttggtggaagactctcttatgatagagtgttcagccagagatattttagttaagggtgtggacgaatcaggagccagtagattcacagtgctgtttccatcagggactcctttgccagctcgaagacaacacacattgcaagcccctggaagcatatcttcagtgtgccttgaactctatgagtctgatgggaagaactctgccaaagaggaaaccaagtttgcacaggttgtactccaggatttagataaaaaagaaaatggattacgtgatatattagctgttcttactatgaaaagggatggatctttacatgtgacatgcacagatcaagaaactggaaaatgtgaagcaatctctattgagatagcatcttagtgttttagagaaatcaagaatttttaaaaacaagaatatcaacatttggttttgtgtataagtggtgtttgtattaaaatactttttcaatgaactgtataaactatgttttattaaactacaatatatcagtaa

SEQ ID NO: 13285 - DNA, 1689 bp, Homo sapiens
  source 1..1689: mol_type = unassigned DNA
gaacgtgaagctccgcggtgcctgatggggccgttgggcggccggtagctgttgctgttgggggaccccctcattcctgccgctgccgtccctgctgcctcatggcggccatcggagttcacctgggctgcacctcagcctgtgtggccgtctataaggatggccgggctggtgtggttgcaaatgatgccggtgaccgagttactccagctgttgttgcttactcagaaaatgaagagattgttggattggcagcaaaacaaagtagaataagaaatatttcaaatacagtaatgaaagtaaagcagatcctgggcagaagggtgctctcaagggacccccagctacagcagctcccacagccttttcagaggtgcagttgctccctgtcagagcagccccatggccagactgggtgtgtccggggagcccagcccctgcaccagcaccaaccgcagcactcctggggtagcctccacaccgcagactccagtctcctcttcgagagctggttttgtttctggtggggataggcccttgaccagtgagccccctccaaggtgggcaaggcgaagaaggcggtcagtggccaggactatcgcagccgagttggcagaaaacaggcgattggcacgagaactctcaaagcgggaggaagaaaaactggacaggctgattgctattggtgaggaggccagtgctcagcaagatactgccaatgagctccgcagggatgctgtcatcgcagtcagacgtttggcaacagcagtggaagaggcaactggtgcttttcagctaggccttgaaaaattgcttcagaggttgatttcgaataccaaaagctaggaaccaattacaaaaggctctgcttcctaaactggtagaagtctagttcccaaacctgccttctgaatccctggctccttttctgtgtcctcagaaaaaaacatggatgaaccatttatatccagatagtatgaaaataattgctagttcattttcccaagattctccaccaaatggaagacctttcagaaatgccaggggtgacctaatagaaaacgatggagccacgttctagacagctggttcatcctagctttgtcacagatgtgaagcagtttacctccctccagtggtttcctcatccgtaaaatggggatcaataataactcctgccctgcctacctcacagggttgttgtgaggatcacgtagttcatagatgtgaaagggtttaaaagtttaaaagcactgtacacatttaagttattaattcatatggccttggctgaggtaaggcagattggtttacaagatacagaagtatggatatatactgtgacttcattgcttgaatctttcctttgctggtctaacttgactgcttcatggagtttgaaatcttaatttttaaaatccctgtgtggctcattagacgactataagcacaacctgtatttgtaccttaatctcttacatttccactgctgtgtatctgacatatctactagtaagcactgttttgtcaaaccgtctttctctccttcattttactggttcttagtctcctatcaatataaggaaataagaagtgccagggagccgccattgtgtgttacggtttatatcgataatcttcaatataaaatactggccattttataaaatattaaatatatgtaaattc

SEQ ID NO: 13286 - DNA, 578 bp, Homo sapiens
  source 1..578: mol_type = unassigned DNA
cagcctgtgtggccgtctataaggatggccgggctggtgtggttgcaaatgatgccggtgaccgagttactccagctgttgttgcttactcagaaaatgaagagattgttggattggcagcaaaacaaagtagaataagaaatatttcaaatacagtaatgaaagtaaagcagatcctgggcagaagctccagtgatccacaagctcagaaatacatcgcggaaagtaaatgtttagtcattgaaaaaaatgggaaattacgatatgaaatagatactggagaagaaacaaaatttgttaacccagaagatgttgccagactgatatttagtaaaatgaaaggagcttattctccatggagtcagtctaattcagaagatggttgatactgaagcctaagagccaggctgtttggaaagctaattctgtgtccaaatatatcaccaaaaccacaagaagtgctgcatgatttcagagcgcagagaagaaaattgacacgggggcggggtgggcaagcaagtgtattgggaaatatgttaagtgagatctttgtcataaattaataaacctcagaaagt

SEQ ID NO: 13287 - DNA, 2427 bp, Homo sapiens
  source 1..2427: mol_type = unassigned DNA
ataaaagcccaggggcaagcggtccggataacggctagcctgaggagctgctgcgacagtccactacctttttcgagagtgactcccgttgtcccaaggcttcccagagcgaacctgtgcggctgcaggcaccggcgcgtcgagtttccggcgtccggaaggaccgagctcttctcgcggatccagtgttccgtttccagcccccaatctcagagcggagccgacagagagcagggaaccggcatggccaaagccgcggcgatcggcatcgacctgggcaccacctactcctgcgtgggggtgttccaacacggcaaggtggagatcatcgccaacgaccagggcaaccgcaccacccccagctacgtggccttcacggacaccgagcggctcatcggggatgcggccaagaaccaggtggcgctgaacccgcagaacaccgtgtttgacgcgaagcggctgattggccgcaagttcggcgacccggtggtgcagtcggacatgaagcactggcctttccaggtgatcaacgacggagacaagcccaaggtgcaggtgagctacaagggggagaccaaggcattctaccccgaggagatctcgtccatggtgctgaccaagatgaaggagatcgccgaggcgtacctgggctacccggtgaccaacgcggtgatcaccgtgccggcctacttcaacgactcgcagcgccaggccaccaaggatgcgggtgtgatcgcggggctcaacgtgctgcggatcatcaacgagcccacggccgccgccatcgcctacggcctggacagaacgggcaagggggagcgcaacgtgctcatctttgacctgggcgggggcaccttcgacgtgtccatcctgacgatcgacgacggcatcttcgaggtgaaggccacggccggggacacccacctgggtggggaggactttgacaacaggctggtgaaccacttcgtggaggagttcaagagaaaacacaagaaggacatcagccagaacaagcgagccgtgaggcggctgcgcaccgcctgcgagagggccaagaggaccctgtcgtccagcacccaggccagcctggagatcgactccctgtttgagggcatcgacttctacacgtccatcaccagggcgaggttcgaggagctgtgctccgacctgttccgaagcaccctggagcccgtggagaaggctctgcgcgacgccaagctggacaaggcccagattcacgacctggtcctggtcgggggctccacccgcatccccaaggtgcagaagctgctgcaggacttcttcaacgggcgcgacctgaacaagagcatcaaccccgacgaggctgtggcctacggggcggcggtgcaggcggccatcctgatgggggacaagtccgagaacgtgcaggacctgctgctgctggacgtggctcccctgtcgctggggctggagacggccggaggcgtgatgactgccctgatcaagcgcaactccaccatccccaccaagcagacgcagatcttcaccacctactccgacaaccaacccggggtgctgatccaggtgtacgagggcgagagggccatgacgaaagacaacaatctgttggggcgcttcgagctgagcggcatccctccggcccccaggggcgtgccccagatcgaggtgaccttcgacatcgatgccaacggcatcctgaacgtcacggccacggacaagagcaccggcaaggccaacaagatcaccatcaccaacgacaagggccgcctgagcaaggaggagatcgagcgcatggtgcaggaggcggagaagtacaaagcggaggacgaggtgcagcgcgagagggtgtcagccaagaacgccctggagtcctacgccttcaacatgaagagcgccgtggaggatgaggggctcaagggcaagatcagcgaggcggacaagaagaaggtgctggacaagtgtcaagaggtcatctcgtggctggacgccaacaccttggccgagaaggacgagtttgagcacaagaggaaggagctggagcaggtgtgtaaccccatcatcagcggactgtaccagggtgccggtggtcccgggcctgggggcttcggggctcagggtcccaagggagggtctgggtcaggccccaccattgaggaggtagattaggggcctttccaagattgctgtttttgttttggagcttcaagactttgcatttcctagtatttctgtttgtcagttctcaatttcctgtgtttgcaatgttgaaattttttggtgaagtactgaacttgctttttttccggtttctacatgcagagatgaatttatactgccatcttacgactatttcttctttttaatacacttaactcaggccattttttaagttggttacttcaaagtaaataaactttaaaattc

SEQ ID NO: 13288 - DNA, 1909 bp, Homo sapiens
  source 1..1909: mol_type = unassigned DNA
aacggctagcctgaggagctgctgcgacagtccactacctttttcgagagtgactcccgttgtcccaaggcttcccagagcgaacctgtgcggctgcaggcaccggcgcgtcgagtttccggcgtccggaaggaccgagctcttctcgcggatccagtgttccgtttccagcccccaatctcagagcggagccgacagagagcagggaaccggcatggccaaagccgcggcgatcggcatcgacctgggcaccacctactcctgcgtgggggtgttccaacacggcaagggggagcgcaacgtgctcatctttgacctgggcgggggcaccttcgacgtgtccatcctgacgatcgacgacggcatcttcgaggtgaaggccacggccggggacacccacctgggtggggaggactttgacaacaggctggtgaaccacttcgtggaggagttcaagagaaaacacaagaaggacatcagccagaacaagcgagccgtgaggcggctgcgcaccgcctgcgagagggccaagaggaccctgtcgtccagcacccaggccagcctggagatcgactccctgtttgagggcatcgacttctacacgtccatcaccagggcgaggttcgaggagctgtgctccgacctgttccgaagcaccctggagcccgtggagaaggctctgcgcgacgccaagctggacaaggcccagattcacgacctggtcctggtcgggggctccacccgcatccccaaggtgcagaagctgctgcaggacttcttcaacgggcgcgacctgaacaagagcatcaaccccgacgaggctgtggcctacggggcggcggtgcaggcggccatcctgatgggggacaagtccgagaacgtgcaggacctgctgctgctggacgtggctcccctgtcgctggggctggagacggccggaggcgtgatgactgccctgatcaagcgcaactccaccatccccaccaagcagacgcagatcttcaccacctactccgacaaccaacccggggtgctgatccaggtgtacgagggcgagagggccatgacgaaagacaacaatctgttggggcgcttcgagctgagcggcatccctccggcccccaggggcgtgccccagatcgaggtgaccttcgacatcgatgccaacggcatcctgaacgtcacggccacggacaagagcaccggcaaggccaacaagatcaccatcaccaacgacaagggccgcctgagcaaggaggagatcgagcgcatggtgcaggaggcggagaagtacaaagcggaggacgaggtgcagcgcgagagggtgtcagccaagaacgccctggagtcctacgccttcaacatgaagagcgccgtggaggatgaggggctcaagggcaagatcagcgaggcggacaagaagaaggtgctggacaagtgtcaagaggtcatctcgtggctggacgccaacaccttggccgagaaggacgagtttgagcacaagaggaaggagctggagcaggtgtgtaaccccatcatcagcggactgtaccagggtgccggtggtcccgggcctgggggcttcggggctcagggtcccaagggagggtctgggtcaggccccaccattgaggaggtagattaggggcctttccaagattgctgtttttgttttggagcttcaagactttgcatttcctagtatttctgtttgtcagttctcaatttcctgtgtttgcaatgttgaaattttttggtgaagtactgaacttgctttttttccggtttctacatgcagagatgaatttatactgccatcttacgactatttcttctttttaatacacttaactcaggccattttttaagttggttacttcaaagtaaataaactttaaaattcaagtga

SEQ ID NO: 13289 - DNA, 1909 bp, Homo sapiens
  source 1..1909: mol_type = unassigned DNA
aacggctagcctgaggagctgctgcgacagtccactacctttttcgagagtgactcccgttgtcccaaggcttcccagagcgaacctgtgcggctgcaggcaccggcgcgtcgagtttccggcgtccggaaggaccgagctcttctcgcggatccagtgttccgtttccagcccccaatctcagagccgagccgacagagagcagggaaccggcatggccaaagccgcggcgatcggcatcgacctgggcaccacctactcctgcgtgggggtgttccaacacggcaagggggagcgcaacgtgctcatctttgacctgggcgggggcaccttcgacgtgtccatcctgacgatcgacgacggcatcttcgaggtgaaggccacggccggggacacccacctgggtggggaggactttgacaacaggctggtgaaccacttcgtggaggagttcaagagaaaacacaagaaggacatcagccagaacaagcgagccgtgaggcggctgcgcaccgcctgcgagagggccaagaggaccctgtcgtccagcacccaggccagcctggagatcgactccctgtttgagggcatcgacttctacacgtccatcaccagggcgaggttcgaggagctgtgctccgacctgttccgaagcaccctggagcccgtggagaaggctctgcgcgacgccaagctggacaaggcccagattcacgacctggtcctggtcgggggctccacccgcatccccaaggtgcagaagctgctgcaggacttcttcaacgggcgcgacctgaacaagagcatcaaccccgacgaggctgtggcctacggggcggcggtgcaggcggccatcctgatgggggacaagtccgagaacgtgcaggacctgctgctgctggacgtggctcccctgtcgctggggctggagacggccggaggcgtgatgactgccctgatcaagcgcaactccaccatccccaccaagcagacgcagatcttcaccacctactccgacaaccaacccggggtgctgatccaggtgtacgagggcgagagggccatgacgaaagacaacaatctgttggggcgcttcgagctgagcggcatccctccggcccccaggggcgtgccccagatcgaggtgaccttcgacatcgatgccaacggcatcctgaacgtcacggccacggacaagagcaccggcaaggccaacaagatcaccatcaccaacgacaagggccgcctgagcaaggaggagatcgagcgcatggtgcaggaggcggagaagtacaaagcggaggacgaggtgcagcgcgagagggtgtcagccaagaacgccctggagtcctacgccttcaacatgaagagcgccgtggaggatgaggggctcaagggcaagatcagcgaggccgacaagaagaaggtgctggacaagtgtcaagaggtcatctcgtggctggacgccaacaccttggccgagaaggacgagtttgagcacaagaggaaggagctggagcaggtgtgtaaccccatcatcagcggactgtaccagggtgccggtggtcccgggcctgggggcttcggggctcagggtcccaagggagggtctgggtcaggccccaccattgaggaggtagattaggggcctttccaagattgctgtttttgttttggagcttcaagactttgcatttcctagtatttctgtttgtcagttctcaatttcctgtgtttgcaatgttgaaattttttggtgaagtactgaacttgctttttttccggtttctacatgcagagatgaatttatactgccatcttacgactatttcttctttttaatacacttaactcaggccattttttaagttggttacttcaaagtaaataaactttaaaattcaagtga

SEQ ID NO: 13290 - DNA, 2483 bp, Homo sapiens
  source 1..2483: mol_type = unassigned DNA
gagctcggtgattggctcagaagggaaaaggcgggtctccgtgacgacttataaaagcccaggggcaagcggtccggataacggctagcctgaggagctgctgcgacagtccactacctttttcgagagtgactcccgttgtcccaaggcttcccagagcgaacctgtgcggctgcaggcaccggcgcgtcgagtttccggcgtccggaaggaccgagctcttctcgcggatccagtgttccgtttccagcccccaatctcagagccgagccgacagagagcagggaaccggcatggccaaagccgcggcgatcggcatcgacctgggcaccacctactcctgcgtgggggtgttccaacacggcaaggtggagatcatcgccaacgaccagggcaaccgcaccacccccagctacgtggccttcacggacaccgagcggctcatcggggatgcggccaagaaccaggtggcgctgaacccgcagaacaccgtgtttgacgcgaagcggctgatcggccgcaagttcggcgacccggtggtgcagtcggacatgaagcactggcctttccaggtgatcaacgacggagacaagcccaaggtgcaggtgagctacaagggggacaccaaggcattctaccccgaggagatctcgtccatggtgctgaccaagatgaaggagatcgccgaggcgtacctgggctacccggtgaccaacgcggtgatcaccgtgccggcctacttcaacgactcgcagcgccaggccaccaaggatgcgggtgtgatcgcggggctcaacgtgctgcggatcatcaacgagcccacggccgccgccatcgcctacggcctggacagaacgggcaagggggagcgcaacgtgctcatctttgacctgggcgggggcaccttcgacgtgtccatcctgacgatcgacgacggcatcttcgaggtgaaggccacggccggggacacccacctgggtggggaggactttgacaacaggctggtgaaccacttcgtggaggagttcaagagaaaacacaagaaggacatcagccagaacaagcgagccgtgaggcggctgcgcaccgcctgcgagagggccaagaggaccctgtcgtccagcacccaggccagcctggagatcgactccctgtttgagggcatcgacttctacacgtccatcaccagggcgaggttcgaggagctgtgctccgacctgttccgaagcaccctggagcccgtggagaaggctctgcgcgacgccaagctggacaaggcccagattcacgacctggtcctggtcgggggctccacccgcatccccaaggtgcagaagctgctgcaggacttcttcaacgggcgcgacctgaacaagagcatcaaccccgacgaggctgtggcctacggggcggcggtgcaggcggccatcctgatgggggacaagtccgagaacgtgcaggacctgctgctgctggacgtggctcccctgtcgctggggctggagacggccggaggcgtgatgactgccctgatcaagcgcaactccaccatccccaccaagcagacgcagatcttcaccacctactccgacaaccaacccggggtgctgatccaggtgtacgagggcgagagggccatgacgaaagacaacaatctgttggggcgcttcgagctgagcggcatccctccggcccccaggggcgtgccccagatcgaggtgaccttcgacatcgatgccaacggcatcctgaacgtcacggccacggacaagagcaccggcaaggccaacaagatcaccatcaccaacgacaagggccgcctgagcaaggaggagatcgagcgcatggtgcaggaggcggagaagtacaaagcggaggacgaggtgcagcgcgagagggtgtcagccaagaacgccctggagtcctacgccttcaacatgaagagcgccgtggaggatgaggggctcaagggcaagatcagcgaggccgacaagaagaaggtgctggacaagtgtcaagaggtcatctcgtggctggacgccaacaccttggccgagaaggacgagtttgagcacaagaggaaggagctggagcaggtgtgtaaccccatcatcagcggactgtaccagggtgccggtggtcccgggcctgggggcttcggggctcagggtcccaagggagggtctgggtcaggccccaccattgaggaggtagattaggggcctttccaagattgctgtttttgttttggagcttcaagactttgcatttcctagtatttctgtttgtcagttctcaatttcctgtgtttgcaatgttgaaattttttggtgaagtactgaacttgctttttttccggtttctacatgcagagatgaatttatactgccatcttacgactatttcttctttttaatacacttaactcaggccattttttaagttggttacttcaaagtaaataaactttaaaattcaagtga

SEQ ID NO: 13291 - DNA, 1909 bp, Homo sapiens
  source 1..1909: mol_type = unassigned DNA
aacggctagcctgaggagctgctgcgacagtccactacctttttcgagagtgactcccgttgtcccaaggcttcccagagcgaacctgtgcggctgcaggcaccggcgcgtcgagtttccggcgtccggaaggaccgagctcttctcgcggatccagtgttccgtttccagcccccaatctcagagcggagccgacagagagcagggaaccggcatggccaaagccgcggcgatcggcatcgacctgggcaccacctactcctgcgtgggggtgttccaacacggcaagggggagcgcaacgtgctcatctttgacctgggcgggggcaccttcgacgtgtccatcctgacgatcgacgacggcatcttcgaggtgaaggccacggccggggacacccacctgggtggggaggactttgacaacaggctggtgaaccacttcgtggaggagttcaagagaaaacacaagaaggacatcagccagaacaagcgagccgtgaggcggctgcgcaccgcctgcgagagggccaagaggaccctgtcgtccagcacccaggccagcctggagatcgactccctgtttgagggcatcgacttctacacgtccatcaccagggcgaggttcgaggagctgtgctccgacctgttccgaagcaccctggagcccgtggagaaggctctgcgcgacgccaagctggacaaggcccagattcacgacctggtcctggtcgggggctccacccgcatccccaaggtgcagaagctgctgcaggacttcttcaacgggcgcgacctgaacaagagcatcaaccccgacgaggctgtggcctacggggcggcggtgcaggcggccatcctgatgggggacaagtccgagaacgtgcaggacctgctgctgctggacgtggctcccctgtcgctggggctggagacggccggaggcgtgatgactgccctgatcaagcgcaactccaccatccccaccaagcagacgcagatcttcaccacctactccgacaaccaacccggggtgctgatccaggtgtacgagggcgagagggccatgacgaaagacaacaatctgttggggcgcttcgagctgagcggcatccctccggcccccaggggcgtgccccagatcgaggtgaccttcgacatcgatgccaacggcatcctgaacgtcacggccacggacaagagcaccggcaaggccaacaagatcaccatcaccaacgacaagggccgcctgagcaaggaggagatcgagcgcatggtgcaggaggcggagaagtacaaagcggaggacgaggtgcagcgcgagagggtgtcagccaagaacgccctggagtcctacgccttcaacatgaagagcgccgtggaggatgaggggctcaagggcaagatcagcgaggccgacaagaagaaggtgctggacaagtgtcaagaggtcatctcgtggctggacgccaacaccttggccgagaaggacgagtttgagcacaagaggaaggagctggagcaggtgtgtaaccccatcatcagcggactgtaccagggtgccggtggtcccgggcctgggggcttcggggctcagggtcccaagggagggtctgggtcaggccccaccattgaggaggtagattaggggcctttccaagattgctgtttttgttttggagcttcaagactttgcatttcctagtatttctgtttgtcagttctcaatttcctgtgtttgcaatgttgaaattttttggtgaagtactgaacttgctttttttccggtttctacatgcagagatgaatttatactgccatcttacgactatttcttctttttaatacacttaactcaggccattttttaagttggttacttcaaagtaaataaactttaaaattcaagtga

SEQ ID NO: 13292 - DNA, 2483 bp, Homo sapiens
  source 1..2483: mol_type = unassigned DNA
gagctcggtgattggctcagaagggaaaaggcgggtctccgtgacgacttataaaagcccaggggcaagcggtccggataacggctagcctgaggagctgctgcgacagtccactacctttttcgagagtgactcccgttgtcccaaggcttcccagagcgaacctgtgcggctgcaggcaccggcgcgtcgagtttccggcgtccggaaggaccgagctcttctcgcggatccagtgttccgtttccagcccccaatctcagagcggagccgacagagagcagggaaccggcatggccaaagccgcggcgatcggcatcgacctgggcaccacctactcctgcgtgggggtgttccaacacggcaaggtggagatcatcgccaacgaccagggcaaccgcaccacccccagctacgtggccttcacggacaccgagcggctcatcggggatgcggccaagaaccaggtggcgctgaacccgcagaacaccgtgtttgacgcgaagcggctgatcggccgcaagttcggcgacccggtggtgcagtcggacatgaagcactggcctttccaggtgatcaacgacggagacaagcccaaggtgcaggtgagctacaagggggagaccaaggcattctaccccgaggagatctcgtccatggtgctgaccaagatgaaggagatcgccgaggcgtacctgggctacccggtgaccaacgcggtgatcaccgtgccggcctacttcaacgactcgcagcgccaggccaccaaggatgcgggtgtgatcgcggggctcaacgtgctgcggatcatcaacgagcccacggccgccgccatcgcctacggcctggacagaacgggcaagggggagcgcaacgtgctcatctttgacctgggcgggggcaccttcgacgtgtccatcctgacgatcgacgacggcatcttcgaggtgaaggccacggccggggacacccacctgggtggggaggactttgacaacaggctggtgaaccacttcgtggaggagttcaagagaaaacacaagaaggacatcagccagaacaagcgagccgtgaggcggctgcgcaccgcctgcgagagggccaagaggaccctgtcgtccagcacccaggccagcctggagatcgactccctgtttgagggcatcgacttctacacgtccatcaccagggcgaggttcgaggagctgtgctccgacctgttccgaagcaccctggagcccgtggagaaggctctgcgcgacgccaagctggacaaggcccagattcacgacctggtcctggtcgggggctccacccgcatccccaaggtgcagaagctgctgcaggacttcttcaacgggcgcgacctgaacaagagcatcaaccccgacgaggctgtggcctacggggcggcggtgcaggcggccatcctgatgggggacaagtccgagaacgtgcaggacctgctgctgctggacgtggctcccctgtcgctggggctggagacggccggaggcgtgatgactgccctgatcaagcgcaactccaccatccccaccaagcagacgcagatcttcaccacctactccgacaaccaacccggggtgctgatccaggtgtacgagggcgagagggccatgacgaaagacaacaatctgttggggcgcttcgagctgagcggcatccctccggcccccaggggcgtgccccagatcgaggtgaccttcgacatcgatgccaacggcatcctgaacgtcacggccacggacaagagcaccggcaaggccaacaagatcaccatcaccaacgacaagggccgcctgagcaaggaggagatcgagcgcatggtgcaggaggcggagaagtacaaagcggaggacgaggtgcagcgcgagagggtgtcagccaagaacgccctggagtcctacgccttcaacatgaagagcgccgtggaggatgaggggctcaagggcaagatcagcgaggccgacaagaagaaggtgctggacaagtgtcaagaggtcatctcgtggctggacgccaacaccttggccgagaaggacgagtttgagcacaagaggaaggagctggagcaggtgtgtaaccccatcatcagcggactgtaccagggtgccggtggtcccgggcctgggggcttcggggctcagggtcccaagggagggtctgggtcaggccccaccattgaggaggtagattaggggcctttccaagattgctgtttttgttttggagcttcaagactttgcatttcctagtatttctgtttgtcagttctcaatttcctgtgtttgcaatgttgaaattttttggtgaagtactgaacttgctttttttccggtttctacatgcagagatgaatttatactgccatcttacgactatttcttctttttaatacacttaactcaggccattttttaagttggttacttcaaagtaaataaactttaaaattcaagtga

SEQ ID NO: 13293 - DNA, 2483 bp, Homo sapiens
  source 1..2483: mol_type = unassigned DNA
gagctcggtgattggctcagaagggaaaaggcgggtctccgtgacgacttataaaagcccaggggcaagcggtccggataacggctagcctgaggagctgctgcgacagtccactacctttttcgagagtgactcccgttgtcccaaggcttcccagagcgaacctgtgcggctgcaggcaccggcgcgtcgagtttccggcgtccggaaggaccgagctcttctcgcggatccagtgttccgtttccagcccccaatctcagagcggagccgacagagagcagggaaccggcatggccaaagccgcggcgatcggcatcgacctgggcaccacctactcctgcgtgggggtgttccaacacggcaaggtggagatcatcgccaacgaccagggcaaccgcaccacccccagctacgtggccttcacggacaccgagcggctcatcggggatgcggccaagaaccaggtggcgctgaacccgcagaacaccgtgtttgacgcgaagcggctgatcggccgcaagttcggcgacccggtggtgcagtcggacatgaagcactggcctttccaggtgatcaacgacggagacaagcccaaggtgcaggtgagctacaagggggagaccaaggcattctaccccgaggagatctcgtccatggtgctgaccaagatgaaggagatcgccgaggcgtacctgggctacccggtgaccaacgcggtgatcaccgtgccggcctacttcaacgactcgcagcgccaggccaccaaggatgcgggtgtgatcgcggggctcaacgtgctgcggatcatcaacgagcccacggccgccgccatcgcctacggcctggacagaacgggcaagggggagcgcaacgtgctcatctttgacctgggcgggggcaccttcgacgtgtccatcctgacgatcgacgacggcatcttcgaggtgaaggccacggccggggacacccacctgggtggggaggactttgacaacaggctggtgaaccacttcgtggaggagttcaagagaaaacacaagaaggacatcagccagaacaagcgagccgtgaggcggctgcgcaccgcctgcgagagggccaagaggaccctgtcgtccagcacccaggccagcctggagatcgactccctgtttgagggcatcgacttctacacgtccatcaccagggcgaggttcgaggagctgtgctccgacctgttccgaagcaccctggagcccgtggagaaggctctgcgcgacgccaagctggacaaggcccagattcacgacctggtcctggtcgggggctccacccgcatccccaaggtgcagaagctgctgcaggacttcttcaacgggcgcgacctgaacaagagcatcaaccccgacgaggctgtggcctacggggcggcggtgcaggcggccatcctgatgggggacaagtccgagaacgtgcaggacctgctgctgctggacgtggctcccctgtcgctggggctggagacggccggaggcgtgatgactgccctgatcaagcgcaactccaccatccccaccaagcagacgcagatcttcaccacctactccgacaaccaacccggggtgctgatccaggtgtacgagggcgagagggccatgacgaaagacaacaatctgttggggcgcttcgagctgagcggcatccctccggcccccaggggcgtgccccagatcgaggtgaccttcgacatcgatgccaacggcatcctgaacgtcacggccacggacaagagcaccggcaaggccaacaagatcaccatcaccaacgacaagggccgcctgagcaaggaggagatcgagcgcatggtgcaggaggcggagaagtacaaagcggaggacgaggtgcagcgcgagagggtgtcagccaagaacgccctggagtcctacgccttcaacatgaagagcgccgtggaggatgaggggctcaagggcaagatcagcgaggcggacaagaagaaggtgctggacaagtgtcaagaggtcatctcgtggctggacgccaacaccttggccgagaaggacgagtttgagcacaagaggaaggagctggagcaggtgtgtaaccccatcatcagcggactgtaccagggtgccggtggtcccgggcctgggggcttcggggctcagggtcccaagggagggtctgggtcaggccccaccattgaggaggtagattaggggcctttccaagattgctgtttttgttttggagcttcaagactttgcatttcctagtatttctgtttgtcagttctcaatttcctgtgtttgcaatgttgaaattttttggtgaagtactgaacttgctttttttccggtttctacatgcagagatgaatttatactgccatcttacgactatttcttctttttaatacacttaactcaggccattttttaagttggttacttcaaagtaaataaactttaaaattcaagtga

SEQ ID NO: 13294 - DNA, 1452 bp, Homo sapiens
  source 1..1452: mol_type = unassigned DNA
aacggctagcctgaggagctgctgcgacagtccactacctttttcgagagtgactcccgttgtcccaaggcttcccagagcgaacctgtgcggctgcaggcaccggcgcgtcgagtttccggcgtccggaaggaccgagctcttctcgcggatccagtgttccgtttccagcccccaatctcagagcggagccgacagagagcagggaaccggcatggccaaagccgcggcgatcggcatcgacctgggcaccacctactcctgcgtgggggtgttccaacacggcaaggtggagatcatcgccaacgaccagggcaaccgcaccacccccagctacgtggccttcacggacaccgagcggctcatcggggatgcgggtgtgatcgcggggctcaacgtgctgcggatcatcaacgagcccacggccgccgccatcgcctacggcctggacagaacgggcaagggggagcgcaacgtgctcatctttgacctgggcgggggcaccttcgacgtgtccatcctgacgatcgacgacggcatcttcgaggtgaaggccacggccggggacacccacctgggtggggaggactttgacaacaggctggtgaaccacttcgtggaggagttcaagagaaaacacaagaaggacatcagccagaacaagcgagccgtgaggcggctgcgcaccgcctgcgagagggccaagaggaccctgtcgtccagcacccaggccagcctggagatcgactccctgtttgagggcatcgacttctacacgtccatcaccagggcgaggttcgaggagctgtgctccgacctgttccgaagcaccctggagcccgtggagaaggctccacccgcatccccaaggtgcagaagctgctgcaggacttcttcaacgggcgcgacctgaacaagagcatcaaccccgacgaggctgtggcctacggggcggcggtgcaggcggccatcctgatgggggacaagtccgagaacgtgcaggacctgctgctgctggacgtggctcccctgtcgctggggctggagacggccggaggcgtgatgactgccctgatcaagcgcaactccaccatccccaccaagcagacgcagatcttcaccacctactccgacaaccaacccggggtgctgatccaggtgtacgagggcgagagggccatgacgaaagacaacaatctgttggggcgcttcgagctgagcggcatccctccggcccccaggggcgtgccccagatcgaggtgaccttcgacatcgatgccaacggcatcctgaacgtcacggccacggacaagagcaccggcaaggccaacaagatcaccatcaccaacgacaagggccgcctgagcaaggaggagatcgagcgcatggtgcaggaggcggagaagtacaaagcggaggacgaggtgcagcgcgagagggtgtcagccaag

SEQ ID NO: 13295 - DNA, 2483 bp, Homo sapiens
  source 1..2483: mol_type = unassigned DNA
gagctcggtgattggctcagaagggaaaaggcgggtctccgtgacgacttataaaagcccaggggcaagcggtccggataacggctagcctgaggagctgctgcgacagtccactacctttttcgagagtgactcccgttgtcccaaggcttcccagagcgaacctgtgcggctgcaggcaccggcgcgtcgagtttccggcgtccggaaggaccgagctcttctcgcggatccagtgttccgtttccagcccccaatctcagagccgagccgacagagagcagggaaccggcatggccaaagccgcggcgatcggcatcgacctgggcaccacctactcctgcgtgggggtgttccaacacggcaaggtggagatcatcgccaacgaccagggcaaccgcaccacccccagctacgtggccttcacggacaccgagcggctcatcggggatgcggccaagaaccaggtggcgctgaacccgcagaacaccgtgtttgacgcgaagcggctgatcggccgcaagttcggcgacccggtggtgcagtcggacatgaagcactggcctttccaggtgatcaacgacggagacaagcccaaggtgcaggtgagctacaagggggagaccaaggcattctaccccgaggagatctcgtccatggtgctgaccaagatgaaggagatcgccgaggcgtacctgggctacccggtgaccaacgcggtgatcaccgtgccggcctacttcaacgactcgcagcgccaggccaccaaggatgcgggtgtgatcgcggggctcaacgtgctgcggatcatcaacgagcccacggccgccgccatcgcctacggcctggacagaacgggcaagggggagcgcaacgtgctcatctttgacctgggcgggggcaccttcgacgtgtccatcctgacgatcgacgacggcatcttcgaggtgaaggccacggccggggacacccacctgggtggggaggactttgacaacaggctggtgaaccacttcgtggaggagttcaagagaaaacacaagaaggacatcagccagaacaagcgagccgtgaggcggctgcgcaccgcctgcgagagggccaagaggaccctgtcgtccagcacccaggccagcctggagatcgactccctgtttgagggcatcgacttctacacgtccatcaccagggcgaggttcgaggagctgtgctccgacctgttccgaagcaccctggagcccgtggagaaggctctgcgcgacgccaagctggacaaggcccagattcacgacctggtcctggtcgggggctccacccgcatccccaaggtgcagaagctgctgcaggacttcttcaacgggcgcgacctgaacaagagcatcaaccccgacgaggctgtggcctacggggcggcggtgcaggcggccatcctgatgggggacaagtccgagaacgtgcaggacctgctgctgctggacgtggctcccctgtcgctggggctggagacggccggaggcgtgatgactgccctgatcaagcgcaactccaccatccccaccaagcagacgcagatcttcaccacctactccgacaaccaacccggggtgctgatccaggtgtacgagggcgagagggccatgacgaaagacaacaatctgttggggcgcttcgagctgagcggcatccctccggcccccaggggcgtgccccagatcgaggtgaccttcgacatcgatgccaacggcatcctgaacgtcacggccacggacaagagcaccggcaaggccaacaagatcaccatcaccaacgacaagggccgcctgagcaaggaggagatcgagcgcatggtgcaggaggcggagaagtacaaagcggaggacgaggtgcagcgcgagagggtgtcagccaagaacgccctggagtcctacgccttcaacatgaagagcgccgtggaggatgaggggctcaagggcaagatcagcgaggccgacaagaagaaggtgctggacaagtgtcaagaggtcatctcgtggctggacgccaacaccttggccgagaaggacgagtttgagcacaagaggaaggagctggagcaggtgtgtaaccccatcatcagcggactgtaccagggtgccggtggtcccgggcctgggggcttcggggctcagggtcccaagggagggtctgggtcaggccccaccattgaggaggtagattaggggcctttccaagattgctgtttttgttttggagcttcaagactttgcatttcctagtatttctgtttgtcagttctcaatttcctgtgtttgcaatgttgaaattttttggtgaagtactgaacttgctttttttccggtttctacatgcagagatgaatttatactgccatcttacgactatttcttctttttaatacacttaactcaggccattttttaagttggttacttcaaagtaaataaactttaaaattcaagtga

SEQ ID NO: 13296 - DNA, 1909 bp, Homo sapiens; identical to SEQ ID NO: 13289
  source 1..1909: mol_type = unassigned DNA

SEQ ID NO: 13297 - DNA, 1909 bp, Homo sapiens; identical to SEQ ID NO: 13288
  source 1..1909: mol_type = unassigned DNA

SEQ ID NO: 13298 - DNA, 1867 bp, Homo sapiens
  source 1..1867: mol_type = unassigned DNA
aacggctagcctgaggagctgctgcgacagtccactacctttttcgagagtgactcccgttgtcccaaggcttcccagagcgaacctgtgcggctgcaggcaccggcgcgtcgagtttccggcgtccggaaggaccgagctcttctcgcggatccagtgttccgtttccagcccccaatctcagagcggagccgacagagagcagggaaccggcatggccaaagccgcggcgatcggcatcgacctgggcaccacctactcctgcgtgggggtgttccaacacggcaaggtgcagatctcgtccatggtgctgaccaagatgaaggagatcgccgaggcgtacctgggctacccggtgaccaacgcggtgatcaccgtgccggcctacttcaacgactcgcagcgccaggccaccaaggatgcgggtgtgatcgcggggctcaacgtgctgcggatcatcaacgagcccacggccgccgccatcgcctacggcctggacagaacgggcaagggggagcgcaacgtgctcatctttgacctgggcgggggcaccttcgacgtgtccatcctgacgatcgacgacggcatcttcgaggtgaaggccacggccggggacacccacctgggtggggaggactttgacaacaggctggtgaaccacttcgtggaggagttcaagagaaaacacaagaaggacatcagccagaacaagcgagccgtgaggcggctgcgcaccgcctgcgagagggccaagaggaccctgtcgtccagcacccaggccagcctggagatcgactccctgtttgagggcatcgacttctacacgtccatcaccagggcgaggttcgaggagctgtgctccgacctgttccgaagcaccctggagcccgtggagaaggctctgcgcgacgccaagctggacaaggcccagattcacgacctggtcctggtcgggggctccacccgcatccccaaggtgcagaagctgctgcaggacttcttcaacgggcgcgacctgaacaagagcatcaaccccgacgaggctgtggcctacggggcggcggtgcaggcggccatcctgatgggggacaagtccgagaacgtgcaggacctgctgctgctggacgtggctcccctgtcgctggggctggagacggccggaggcgtgatgactgccctgatcaagcgcaactccaccatccccaccaagcagacgcagatcttcaccacctactccgacaaccaacccggggtgctgatccaggtgtacgagggcgagagggccatgacgaaagacaacaatctgttggggcgcttcgagctgagcggcatccctccggcccccaggggcgtgccccagatcgaggtgaccttcgacatcgatgccaacggcatcctgaacgtcacggccacggacaagagcaccggcaaggccaacaagatcaccatcaccaacgacaagggccgcctgagcaaggaggagatcgagcgcatggtgcaggaggcggagaagtacaaagcggaggacgaggtgcagcgcgagagggtgtcagccaagaacgccctggagtcctacgccttcaacatgaagagcgccgtggaggatgaggggctcaagggcaagatcagcgaggcggacaagaagaaggtgctggacaagtgtcaagaggtcatctcgtggctggacgccaacaccttggccgagaaggacgagtttgagcacaagaggaaggagctggagcaggtgtgtaaccccatcatcagcggactgtaccagggtgccggtggtcccgggcctgggggcttcggggctcagggtcccaagggagggtctgggtcaggccccaccattgaggaggtagattag

SEQ ID NO: 13299 - DNA, 2344 bp, Homo sapiens
  source 1..2344: mol_type = unassigned DNA
aacggctagcctgaggagctgctgcgacagtccactacctttttcgagagtgactcccgttgtcccaaggcttcccagagcgaacctgtgcggctgcaggcaccggcgcgtcgagtttccggcgtccggaaggaccgagctcttctcgcggatccagtgttccgtttccagcccccaatctcagagcggagccgacagagagcagggaaccggcatggccaaagccgcggcgatcggcatcgacctgggcaccacctactcctgcgtgggggtgttccaacacggcaaggtggagatcatcgccaacgaccagggcaaccgcaccacccccagctacgtggccttcacggacaccgagcggctcatcggggatgcggccaagaaccaggtggcgctgaacccggtggtgcagtcggacatgaagcactggcctttccaggtgatcaacgacggagacaagcccaaggtgcaggtgagctacaagggggagaccaaggcattctaccccgaggagatctcgtccatggtgctgaccaagatgaaggagatcgccgaggcgtacctgggctacccggtgaccaacgcggtgatcaccgtgccggcctacttcaacgactcgcagcgccaggccaccaaggatgcgggtgtgatcgcggggctcaacgtgctgcggatcatcaacgagcccacggccgccgccatcgcctacggcctggacagaacgggcaagggggagcgcaacgtgctcatctttgacctgggcgggggcaccttcgacgtgtccatcctgacgatcgacgacggcatcttcgaggtgaaggccacggccggggacacccacctgggtggggaggactttgacaacaggctggtgaaccacttcgtggaggagttcaagagaaaacacaagaaggacatcagccagaacaagcgagccgtgaggcggctgcgcaccgcctgcgagagggccaagaggaccctgtcgtccagcacccaggccagcctggagatcgactccctgtttgagggcatcgacttctacacgtccatcaccagggcgaggttcgaggagctgtgctccgacctgttccgaagcaccctggagcccgtggagaaggctctgcgcgacgccaagctggacaaggcccagattcacgacctggtcctggtcgggggctccacccgcatccccaaggtgcagaagctgctgcaggacttcttcaacgggcgcgacctgaacaagagcatcaaccccgacgaggctgtggcctacggggcggcggtgcaggcggccatcctgatgggggacaagtccgagaacgtgcaggacctgctgctgctggacgtggctcccctgtcgctggggctggagacggccggaggcgtgatgactgccctgatcaagcgcaactccaccatccccaccaagcagacgcagatcttcaccacctactccgacaaccaacccggggtgctgatccaggtgtacgagggcgagagggccatgacgaaagacaacaatctgttggggcgcttcgagctgagcggcatccctccggcccccaggggcgtgccccagatcgaggtgaccttcgacatcgatgccaacggcatcctgaacgtcacggccacggacaagagcaccggcaaggccaacaagatcaccatcaccaacgacaagggccgcctgagcaaggaggagatcgagcgcatggtgcaggaggcggagaagtacaaagcggaggacgaggtgcagcgcgagagggtgtcagccaagaacgccctggagtcctacgccttcaacatgaagagcgccgtggaggatgaggggctcaagggcaagatcagcgaggcggacaagaagaaggtgctggacaagtgtcaagaggtcatctcgtggctggacgccaacaccttggccgagaaggacgagtttgagcacaagaggaaggagctggagcaggtgtgtaaccccatcatcagcggactgtaccagggtgccggtggtcccgggcctgggggcttcggggctcagggtcccaagggagggtctgggtcaggccccaccattgaggaggtagattaggggcctttccaagattgctgtttttgttttggagcttcaagactttgcatttcctagtatttctgtttgtcagttctcaatttcctgtgtttgcaatgttgaaattttttggtgaagtactgaacttgctttttttccggtttctacatgcagagatgaatttatactgccatcttacgactatttcttctttttaatacacttaactcaggccattttttaagttggttacttcaaagtaaataaactttaaaattc

SEQ ID NO: 13300 - DNA, 1867 bp, Homo sapiens
  source 1..1867: mol_type = unassigned DNA
aacggctagcctgaggagctgctgcgacagtccactacctttttcgagagtgactcccgttgtcccaaggcttcccagagcgaacctgtgcggctgcaggcaccggcgcgtcgagtttccggcgtccggaaggaccgagctcttctcgcggatccagtgttccgtttccagcccccaatctcagagccgagccgacagagagcagggaaccggcatggccaaagccgcggcgatcggcatcgacctgggcaccacctactcctgcgtgggggtgttccaacacggcaaggtgcagatctcgtccatggtgctgaccaagatgaaggagatcgccgaggcgtacctgggctacccggtgaccaacgcggtgatcaccgtgccggcctacttcaacgactcgcagcgccaggccaccaaggatgcgggtgtgatcgcggggctcaacgtgctgcggatcatcaacgagcccacggccgccgccatcgcctacggcctggacagaacgggcaagggggagcgcaacgtgctcatctttgacctgggcgggggcaccttcgacgtgtccatcctgacgatcgacgacggcatcttcgaggtgaaggccacggccggggacacccacctgggtggggaggactttgacaacaggctggtgaaccacttcgtggaggagttcaagagaaaacacaagaaggacatcagccagaacaagcgagccgtgaggcggctgcgcaccgcctgcgagagggccaagaggaccctgtcgtccagcacccaggccagcctggagatcgactccctgtttgagggcatcgacttctacacgtccatcaccagggcgaggttcgaggagctgtgctccgacctgttccgaagcaccctggagcccgtggagaaggctctgcgcgacgccaagctggacaaggcccagattcacgacctggtcctggtcgggggctccacccgcatccccaaggtgcagaagctgctgcaggacttcttcaacgggcgcgacctgaacaagagcatcaaccccgacgaggctgtggcctacggggcggcggtgcaggcggccatcctgatgggggacaagtccgagaacgtgcaggacctgctgctgctggacgtggctcccctgtcgctggggctggagacggccggaggcgtgatgactgccctgatcaagcgcaactccaccatccccaccaagcagacgcagatcttcaccacctactccgacaaccaacccggggtgctgatccaggtgtacgagggcgagagggccatgacgaaagacaacaatctgttggggcgcttcgagctgagcggcatccctccggcccccaggggcgtgccccagatcgaggtgaccttcgacatcgatgccaacggcatcctgaacgtcacggccacggacaagagcaccggcaaggccaacaagatcaccatcaccaacgacaagggccgcctgagcaaggaggagatcgagcgcatggtgcaggaggcggagaagtacaaagcggaggacgaggtgcagcgcgagagggtgtcagccaagaacgccctggagtcctacgccttcaacatgaagagcgccgtggaggatgaggggctcaagggcaagatcagcgaggccgacaagaagaaggtgctggacaagtgtcaagaggtcatctcgtggctggacgccaacaccttggccgagaaggacgagtttgagcacaagaggaaggagctggagcaggtgtgtaaccccatcatcagcggactgtaccagggtgccggtggtcccgggcctgggggcttcggggctcagggtcccaagggagggtctgggtcaggccccaccattgaggaggtagattag

SEQ ID NO: 13301 - DNA, 1867 bp, Homo sapiens; identical to SEQ ID NO: 13300
  source 1..1867: mol_type = unassigned DNA

SEQ ID NO: 13302 - DNA, 1867 bp, Homo sapiens
  source 1..1867: mol_type = unassigned DNA
aacggctagcctgaggagctgctgcgacagtccactacctttttcgagagtgactcccgttgtcccaaggcttcccagagcgaacctgtgcggctgcaggcaccggcgcgtcgagtttccggcgtccggaaggaccgagctcttctcgcggatccagtgttccgtttccagcccccaatctcagagcggagccgacagagagcagggaaccggcatggccaaagccgcggcgatcggcatcgacctgggcaccacctactcctgcgtgggggtgttccaacacggcaaggtgcagatctcgtccatggtgctgaccaagatgaaggagatcgccgaggcgtacctgggctacccggtgaccaacgcggtgatcaccgtgccggcctacttcaacgactcgcagcgccaggccaccaaggatgcgggtgtgatcgcggggctcaacgtgctgcggatcatcaacgagcccacggccgccgccatcgcctacggcctggacagaacgggcaagggggagcgcaacgtgctcatctttgacctgggcgggggcaccttcgacgtgtccatcctgacgatcgacgacggcatcttcgaggtgaaggccacggccggggacacccacctgggtggggaggactttgacaacaggctggtgaaccacttcgtggaggagttcaagagaaaacacaagaaggacatcagccagaacaagcgagccgtgaggcggctgcgcaccgcctgcgagagggccaagaggaccctgtcgtccagcacccaggccagcctggagatcgactccctgtttgagggcatcgacttctacacgtccatcaccagggcgaggttcgaggagctgtgctccgacctgttccgaagcaccctggagcccgtggagaaggctctgcgcgacgccaagctggacaaggcccagattcacgacctggtcctggtcgggggctccacccgcatccccaaggtgcagaagctgctgcaggacttcttcaacgggcgcgacctgaacaagagcatcaaccccgacgaggctgtggcctacggggcggcggtgcaggcggccatcctgatgggggacaagtccgagaacgtgcaggacctgctgctgctggacgtggctcccctgtcgctggggctggagacggccggaggcgtgatgactgccctgatcaagcgcaactccaccatccccaccaagcagacgcagatcttcaccacctactccgacaaccaacccggggtgctgatccaggtgtacgagggcgagagggccatgacgaaagacaacaatctgttggggcgcttcgagctgagcggcatccctccggcccccaggggcgtgccccagatcgaggtgaccttcgacatcgatgccaacggcatcctgaacgtcacggccacggacaagagcaccggcaaggccaacaagatcaccatcaccaacgacaagggccgcctgagcaaggaggagatcgagcgcatggtgcaggaggcggagaagtacaaagcggaggacgaggtgcagcgcgagagggtgtcagccaagaacgccctggagtcctacgccttcaacatgaagagcgccgtggaggatgaggggctcaagggcaagatcagcgaggccgacaagaagaaggtgctggacaagtgtcaagaggtcatctcgtggctggacgccaacaccttggccgagaaggacgagtttgagcacaagaggaaggagctggagcaggtgtgtaaccccatcatcagcggactgtaccagggtgccggtggtcccgggcctgggggcttcggggctcagggtcccaagggagggtctgggtcaggccccaccattgaggaggtagattag

SEQ ID NO: 13303 - DNA, 1452 bp, Homo sapiens
  source 1..1452: mol_type = unassigned DNA
aacggctagcctgaggagctgctgcgacagtccactacctttttcgagagtgactcccgttgtcccaaggcttcccagagcgaacctgtgcggctgcaggcaccggcgcgtcgagtttccggcgtccggaaggaccgagctcttctcgcggatccagtgttccgtttccagcccccaatctcagagccgagccgacagagagcagggaaccggcatggccaaagccgcggcgatcggcatcgacctgggcaccacctactcctgcgtgggggtgttccaacacggcaaggtggagatcatcgccaacgaccagggcaaccgcaccacccccagctacgtggccttcacggacaccgagcggctcatcggggatgcgggtgtgatcgcggggctcaacgtgctgcggatcatcaacgagcccacggccgccgccatcgcctacggcctggacagaacgggcaagggggagcgcaacgtgctcatctttgacctgggcgggggcaccttcgacgtgtccatcctgacgatcgacgacggcatcttcgaggtgaaggccacggccggggacacccacctgggtggggaggactttgacaacaggctggtgaaccacttcgtggaggagttcaagagaaaacacaagaaggacatcagccagaacaagcgagccgtgaggcggctgcgcaccgcctgcgagagggccaagaggaccctgtcgtccagcacccaggccagcctggagatcgactccctgtttgagggcatcgacttctacacgtccatcaccagggcgaggttcgaggagctgtgctccgacctgttccgaagcaccctggagcccgtggagaaggctccacccgcatccccaaggtgcagaagctgctgcaggacttcttcaacgggcgcgacctgaacaagagcatcaaccccgacgaggctgtggcctacggggcggcggtgcaggcggccatcctgatgggggacaagtccgagaacgtgcaggacctgctgctgctggacgtggctcccctgtcgctggggctggagacggccggaggcgtgatgactgccctgatcaagcgcaactccaccatccccaccaagcagacgcagatcttcaccacctactccgacaaccaacccggggtgctgatccaggtgtacgagggcgagagggccatgacgaaagacaacaatctgttggggcgcttcgagctgagcggcatccctccggcccccaggggcgtgccccagatcgaggtgaccttcgacatcgatgccaacggcatcctgaacgtcacggccacggacaagagcaccggcaaggccaacaagatcaccatcaccaacgacaagggccgcctgagcaaggaggagatcgagcgcatggtgcaggaggcggagaagtacaaagcggaggacgaggtgcagcgcgagagggtgtcagccaag

SEQ ID NO: 13304 - DNA, 1867 bp, Homo sapiens; identical to SEQ ID NO: 13298
  source 1..1867: mol_type = unassigned DNA

SEQ ID NO: 13305 - DNA, 1452 bp, Homo sapiens; identical to SEQ ID NO: 13294
  source 1..1452: mol_type = unassigned DNA

SEQ ID NO: 13306 - DNA, 1452 bp, Homo sapiens; identical to SEQ ID NO: 13294
  source 1..1452: mol_type = unassigned DNA

SEQ ID NO: 13307 - DNA, 1452 bp, Homo sapiens; identical to SEQ ID NO: 13303
  source 1..1452: mol_type = unassigned DNA

SEQ ID NO: 13308 - DNA, 2520 bp, Homo sapiens
  source 1..2520: mol_type = unassigned DNA
ggaaaacggccagcctgaggagctgctgcgagggtccgcttcgtctttcgagagtgactcccgcggtcccaaggctttccagagcgaacctgtgcggctgcaggcaccggcgtgttgagtttccggcgttccgaaggactgagctcttgtcgcggatcccgtccgccgtttccagcccccagtctcagagcggagcccacagagcagggcaccggcatggccaaagccgcggcgatcggcatcgacctgggcaccacctactcctgcgtgggggtgttccaacacggcaaggtggagatcatcgccaacgaccagggcaaccgcaccacccccagctacgtggccttcacggacaccgagcggctcatcggggatgcggccaagaaccaggtggcgctgaacccgcagaacaccgtgtttgacgcgaagcggctgattggccgcaagttcggcgacccggtggtgcagtcggacatgaagcactggcctttccaggtgatcaacgacggagacaagcccaaggtgcaggtgagctacaagggggagaccaaggcattctaccccgaggagatctcgtccatggtgctgaccaagatgaaggagatcgccgaggcgtacctgggctacccggtgaccaacgcggtgatcaccgtgccggcctacttcaacgactcgcagcgccaggccaccaaggatgcgggtgtgatcgcggggctcaacgtgctgcggatcatcaacgagcccacggccgccgccatcgcctacggcctggacagaacgggcaagggggagcgcaacgtgctcatctttgacctgggcgggggcaccttcgacgtgtccatcctgacgatcgacgacggcatcttcgaggtgaaggccacggccggggacacccacctgggtggggaggactttgacaacaggctggtgaaccacttcgtggaggagttcaagagaaaacacaagaaggacatcagccagaacaagcgagccgtgaggcggctgcgcaccgcctgcgagagggccaagaggaccctgtcgtccagcacccaggccagcctggagatcgactccctgtttgagggcatcgacttctacacgtccatcaccagggcgaggttcgaggagctgtgctccgacctgttccgaagcaccctggagcccgtggagaaggctctgcgcgacgccaagctggacaaggcccagattcacgacctggtcctggtcgggggctccacccgcatccccaaggtgcagaagctgctgcaggacttcttcaacgggcgcgacctgaacaagagcatcaaccccgacgaggctgtggcctacggggcggcggtgcaggcggccatcctgatgggggacaagtccgagaacgtgcaggacctgctgctgctggacgtggctcccctgtcgctggggctggagacggccggaggcgtgatgactgccctgatcaagcgcaactccaccatccccaccaagcagacgcagatcttcaccacctactccgacaaccaacccggggtgctgatccaggtgtacgagggcgagagggccatgacgaaagacaacaatctgttggggcgcttcgagctgagcggcatccctccggcccccaggggcgtgccccagatcgaggtgaccttcgacatcgatgccaacggcatcctgaacgtcacggccacggacaagagcaccggcaaggccaacaagatcaccatcaccaacgacaagggccgcctgagcaaggaggagatcgagcgcatggtgcaggaggcggagaagtacaaagcggaggacgaggtgcagcgcgagagggtgtcagccaagaacgccctggagtcctacgccttcaacatgaagagcgccgtggaggatgaggggctcaagggcaagatcagcgaggcggacaagaagaaggttctggacaagtgtcaagaggtcatctcgtggctggacgccaacaccttggccgagaaggacgagtttgagcacaagaggaaggagctggagcaggtgtgtaaccccatcatcagcggactgtaccagggtgccggtggtcccgggcctggcggcttcggggctcagggtcccaagggagggtctgggtcaggccctaccattgaggaggtggattaggggcctttgttctttagtatgtttgtctttgaggtggactgttgggactcaaggactttgctgctgttttcctatgtcatttctgcttcagctctttgctgcttcacttctttgtaaagttgtaacctgatggtaattagctggcttcattatttttgtagtacaaccgatatgttcattagaattctttgcatttaatgttgatactgtaagggtgtttcgttccctttaaatgaatcaacactgccaccttctgtacgagtttgtttgttttttttttttttttttttttttgcttggcgaaaacactacaaaggctgggaatgtatgtttttataatttgtttatttaaatatgaaaaataaaatgttaaacttt

SEQ ID NO: 13309 - DNA, 2524 bp, Homo sapiens
  source 1..2524: mol_type = unassigned DNA
ggaaaacggccagcctgaggagctgctgcgagggtccgcttcgtctttcgagagtgactcccgcggtcccaaggctttccagagcgaacctgtgcggctgcaggcaccggcgtgttgagtttccggcgttccgaaggactgagctcttgtcgcggatcccgtccgccgtttccagcccccagtctcagagcggagcccacagagcagggcaccggcatggccaaagccgcggcgatcggcatcgacctgggcaccacctactcctgcgtgggggtgttccaacacggcaaggtggagatcatcgccaacgaccagggcaaccgcaccacccccagctacgtggccttcacggacaccgagcggctcatcggggatgcggccaagaaccaggtggcgctgaacccgcagaacaccgtgtttgacgcgaagcggctgatcggccgcaagttcggcgacccggtggtgcagtcggacatgaagcactggcctttccaggtgatcaacgacggagacaagcccaaggtgcaggtgagctacaagggggagaccaaggcattctaccccgaggagatctcgtccatggtgctgaccaagatgaaggagatcgccgaggcgtacctgggctacccggtgaccaacgcggtgatcaccgtgccggcctacttcaacgactcgcagcgccaggccaccaaggatgcgggtgtgatcgcggggctcaacgtgctgcggatcatcaacgagcccacggccgccgccatcgcctacggcctggacagaacgggcaagggggagcgcaacgtgctcatctttgacctgggcgggggcaccttcgacgtgtccatcctgacgatcgacgacggcatcttcgaggtgaaggccacggccggggacacccacctgggtggggaggactttgacaacaggctggtgaaccacttcgtggaggagttcaagagaaaacacaagaaggacatcagccagaacaagcgagccgtgaggcggctgcgcaccgcctgcgagagggccaagaggaccctgtcgtccagcacccaggccagcctggagatcgactccctgtttgagggcatcgacttctacacgtccatcaccagggcgaggttcgaggagctgtgctccgacctgttccgaagcaccctggagcccgtggagaaggctctgcgcgacgccaagctggacaaggcccagattcacgacctggtcctggtcgggggctccacccgcatccccaaggtgcagaagctgctgcaggacttcttcaacgggcgcgacctgaacaagagcatcaaccccgacgaggctgtggcctacggggcggcggtgcaggcggccatcctgatgggggacaagtccgagaacgtgcaggacctgctgctgctggacgtggctcccctgtcgctggggctggagacggccggaggcgtgatgactgccctgatcaagcgcaactccaccatccccaccaagcagacgcagatcttcaccacctactccgacaaccaacccggggtgctgatccaggtgtacgagggcgagagggccatgacgaaagacaacaatctgttggggcgcttcgagctgagcggcatccctccggcccccaggggcgtgccccagatcgaggtgaccttcgacatcgatgccaacggcatcctgaacgtcacggccacggacaagagcaccggcaaggccaacaagatcaccatcaccaacgacaagggccgcctgagcaaggaggagatcgagcgcatggtgcaggaggcggagaagtacaaagcggaggacgaggtgcagcgcgagagggtgtcagccaagaacgccctggagtcctacgccttcaacatgaagagcgccgtggaggatgaggggctcaagggcaagatcagcgaggcggacaagaagaaggttctggacaagtgtcaagaggtcatctcgtggctggacgccaacaccttggccgagaaggacgagtttgagcacaagaggaaggagctggagcaggtgtgtaaccccatcatcagcggactgtaccagggtgccggtggtcccgggcctggcggcttcggggctcagggtcccaagggagggtctgggtcaggccctaccattgaggaggtggattaggggcctttgttctttagtatgtttgtctttgaggtggactgttgggactcaaggactttgctgctgttttcctatgtcatttctgcttcagctctttgctgcttcacttctttgtaaagttaagttgtaacctgatggtaattagctggcttcattatttttgtagtacaaccgatatgttcattagaattctttgcatttaatgttgatactgtaagggtgtttcgttccctttaaatgaatcaacactgccaccttctgtacgagtttgtttgttttttttttttttttttttttgcttggcgaaaacactacaaaggctgggaatgtatgtttttataatttgtttatttaaatatgaaaaataaaatgttaaactttt

SEQ ID NO: 13310 - DNA, 2525 bp, Homo sapiens
  source 1..2525: mol_type = unassigned DNA
ggaaaacggccagcctgaggagctgctgcgagggtccgcttcgtctttcgagagtgactcccgcggtcccaaggctttccagagcgaacctgtgcggctgcaggcaccggcgtgttgagtttccggcgttccgaaggactgagctcttgtcgcggatcccgtccgccgtttccagcccccagtctcagagcggagcccacagagcagggcaccggcatggccaaagccgcggcgatcggcatcgacctgggcaccacctactcctgcgtgggggtgttccaacacggcaaggtggagatcatcgccaacgaccagggcaaccgcaccacccccagctacgtggccttcacggacaccgagcggctcatcggggatgcggccaagaaccaggtggcgctgaacccgcagaacaccgtgtttgacgcgaagcggctgatcggccgcaagttcggcgacccggtggtgcagtcggacatgaagcactggcctttccaggtgatcaacgacggagacaagcccaaggtgcaggtgagctacaagggggagaccaaggcattctaccccgaggagatctcgtccatggtgctgaccaagatgaaggagatcgccgaggcgtacctgggctacccggtgaccaacgcggtgatcaccgtgccggcctacttcaacgactcgcagcgccaggccaccaaggatgcgggtgtgatcgcggggctcaacgtgctgcggatcatcaacgagcccacggccgccgccatcgcctacggcctggacagaacgggcaagggggagcgcaacgtgctcatctttgacctgggcgggggcaccttcgacgtgtccatcctgacgatcgacgacggcatcttcgaggtgaaggccacggccggggacacccacctgggtggggaggactttgacaacaggctggtgaaccacttcgtggaggagttcaagagaaaacacaagaaggacatcagccagaacaagcgagccgtgaggcggctgcgcaccgcctgcgagagggccaagaggaccctgtcgtccagcacccaggccagcctggagatcgactccctgtttgagggcatcgacttctacacgtccatcaccagggcgaggttcgaggagctgtgctccgacctgttccgaagcaccctggagcccgtggagaaggctctgcgcgacgccaagctggacaaggcccagattcacgacctggtcctggtcgggggctccacccgcatccccaaggtgcagaagctgctgcaggacttcttcaacgggcgcgacctgaacaagagcatcaaccccgacgaggctgtggcctacggggcggcggtgcaggcggccatcctgatgggggacaagtccgagaacgtgcaggacctgctgctgctggacgtggctcccctgtcgctggggctggagacggccggaggcgtgatgactgccctgatcaagcgcaactccaccatccccaccaagcagacgcagatcttcaccacctactccgacaaccaacccggggtgctgatccaggtgtacgagggcgagagggccatgacgaaagacaacaatctgttggggcgcttcgagctgagcggcatccctccggcccccaggggcgtgccccagatcgaggtgaccttcgacatcgatgccaacggcatcctgaacgtcacggccacggacaagagcaccggcaaggccaacaagatcaccatcaccaacgacaagggccgcctgagcaaggaggagatcgagcgcatggtgcaggaggcggagaagtacaaagcggaggacgaggtgcagcgcgagagggtgtcagccaagaacgccctggagtcctacgccttcaacatgaagagcgccgtggaggatgaggggctcaagggcaagatcagcgaggcggacaagaagaaggttctggacaagtgtcaagaggtcatctcgtggctggacgccaacaccttggccgagaaggacgagtttgagcacaagaggaaggagctggagcaggtgtgtaaccccatcatcagcggactgtaccagggtgccggtggtcccgggcctgggggcttcggggctcagggtcccaagggagggtctgggtcaggccctaccattgaggaggtggattaggggcctttgttctttagtatgtttgtctttgaggtggactgttgggactcaaggactttgctgctgttttcctatgtcatttctgcttcagctctttgctgcttcacttctttgtaaagttaagttgtaacctgatggtaattagctggcttcattatttttgtagtacaaccgatatgttcattagaattctttgcatttaatgttgatactgtaagggtgtttcgttccctttaaatgaatcaacactgccaccttctgtacgagtttttttttttttttttttttttttttttttgcttggcgaaaacactacaaaggctgggaatgtatgtttttataatttgtttatttaaatatgaaaaataaaatgttaaactttt

SEQ ID NO: 13311 - DNA, 1054 bp, Homo sapiens
  source 1..1054: mol_type = unassigned DNA
atggccaaagccgcggcgatcggcatcgacctgggcaccacctactcctgcgtgggggtgttccaacacggcaaggtggagatcatcgccaacgaccagggcaaccgcaccacccccagctacgtggccttcacggacaccgagcggctcatcggggatgcgggtgtgatcgcggggctcaacgtgctgcggatcatcaacgagcccacggccgccgccatcgcctacggcctggacagaacgggcaagggggagcgcaacgtgctcatctttgacctgggcgggggcaccttcgacgtgtccatcctgacgatcgacgacggcatcttcgaggtgaaggccacggccggggacacccacctgggtggggaggactttgacaacaggctggtgaaccacttcgtggaggagttcaagagaaaacacaagaaggacatcagccagaacaagcgagccgtgaggcggctgcgcaccgcctgcgagagggccaagaggaccctgtcgtccagcacccaggccagcctggagatcgactccctgtttgagggcatcgacttctacacgtccatcaccagggcgaggttcgaggagctgtgctccgacctgttccgaagcaccctggagcccgtggagaaggctccacccgcatccccaaggtgcagaagctgctgcaggacttcttcaacgggcgcgacctgaacaagagcatcaaccccgacgaggctgtggcctacggggcggcggtgcaggcggccatcctgatgggggacaagtccgagaacgtgcaggacctgctgctgctggacgtggctcccctgtcgctggggctggagacggccggaggcgtgatgactgccctgatcaagcgcaactccaccatccccaccaagcagacgcagatcttcaccacctactccgacaaccaacccggggtgctgatccaggtgtacgagggcgagagggccatgacgaaagacaacaatctgttggggcgcttcgagctgagcggcatccctccggcccccaggggcgtgccccagatcgaggtgacctt

SEQ ID NO: 13312 - DNA, 2521 bp, Homo sapiens
  source 1..2521: mol_type = unassigned DNA
ggaaaacggccagcctgaggagctgctgcgagggtccgcttcgtctttcgagagtgactcccgcggtcccaaggctttccagagcgaacctgtgcggctgcaggcaccggcgtgttgagtttccggcgttccgaaggactgagctcttgtcgcggatcccgtccgccgtttccagcccccagtctcagagcggagcccacagagcagggcaccggcatggccaaagccgcggcgatcggcatcgacctgggcaccacctactcctgcgtgggggtgttccaacacggcaaggtggagatcatcgccaacgaccagggcaaccgcaccacccccagctacgtggccttcacggacaccgagcggctcatcggggatgcggccaagaaccaggtggcgctgaacccgcagaacaccgtgtttgacgcgaagcggctgatcggccgcaagttcggcgacccggtggtgcagtcggacatgaagcactggcctttccaggtgatcaacgacggagacaagcccaaggtgcaggtgagctacaagggggagaccaaggcattctaccccgaggagatctcgtccatggtgctgaccaagatgaaggagatcgccgaggcgtacctgggctacccggtgaccaacgcggtgatcaccgtgccggcctacttcaacgactcgcagcgccaggccaccaaggatgcgggtgtgatcgcggggctcaacgtgctgcggatcatcaacgagcccacggccgccgccatcgcctacggcctggacagaacgggcaagggggagcgcaacgtgctcatctttgacctgggcgggggcaccttcgacgtgtccatcctgacgatcgacgacggcatcttcgaggtgaaggccacggccggggacacccacctgggtggggaggactttgacaacaggctggtgaaccacttcgtggaggagttcaagagaaaacacaagaaggacatcagccagaacaagcgagccgtgaggcggctgcgcaccgcctgcgagagggccaagaggaccctgtcgtccagcacccaggccagcctggagatcgactccctgtttgagggcatcgacttctacacgtccatcaccagggcgaggttcgaggagctgtgctccgacctgttccgaagcaccctggagcccgtggagaaggctctgcgcgacgccaagctggacaaggcccagattcacgacctggtcctggtcgggggctccacccgcatccccaaggtgcagaagctgctgcaagacttcttcaacgggcgcgacctgaacaagagcatcaaccccgacgaggctgtggcctacggggcggcggtgcaggcggccatcctgatgggggacaagtccgagaacgtgcaggacctgctgctgctggacgtggctcccctgtcgctggggctggagacggccggaggcgtgatgactgccctgatcaagcgcaactccaccatccccaccaagcagacgcagatcttcaccacctactccgacaaccaacccggggtgctgatccaggtgtacgagggcgagagggccatgacgaaagacaacaatctgttggggcgcttcgagctgagcggcatccctccggcccccaggggcgtgccccagatcgaggtgaccttcgacatcgatgccaacggcatcctgaacgtcacggccacggacaagagcaccggcaaggccaacaagatcaccatcaccaacgacaagggccgcctgagcaaggaggagatcgagcgcatggtgcaggaggcggagaagtacaaagcggaggacgaggtgcagcgcgagagggtgtcagccaagaacgccctggagtcctacgccttcaacatgaagagcgccgtggaggatgaggggctcaagggcaagatcagcgaggcggacaagaagaaggttctggacaagtgtcaagaggtcatctcgtggctggacgccaacaccttggccgagaaggacgagtttgagcacaagaggaaggagctggagcaggtgtgtaaccccatcatcagcggactgtaccagggtgccggtggtcccgggcctggcggcttcggggctcagggtcccaagggagggtctgggtcaggccctaccattgaggaggtggattaggggcctttgttctttagtatgtttgtctttgaggtggactgttgggactcaaggactttgctgctgttttcctatgtcatttctgcttcagctctttgctgcttcacttctttgtaaagttgtaacctgatggtaattagctggcttcattatttttgtagtacaaccgatatgttcattagaattctttgcatttaatgttgatactgtaagggtgtttcgttccctttaaatgaatcaacactgccaccttctgtacgagtttgtttgttttttttttttttttttttttttgcttggcgaaaacactacaaaggctgggaatgtatgtttttataatttgtttatttaaatatgaaaaataaaatgttaaactttt

SEQ ID NO: 13313 - DNA, 2515 bp, Homo sapiens
  source 1..2515: mol_type = unassigned DNA
ggaaaacggccagcctgaggagctgctgcgagggtccgcttcgtctttcgagagtgactcccgcggtcccaaggctttccagagcgaacctgtgcggctgcaggcaccggcgtgttgagtttccggcgttccgaaggactgagctcttgtcgcggatcccgtccgccgtttccagcccccagtctcagagcggagcccacagagcagggcaccggcatggccaaagccgcggcgatcggcatcgacctgggcaccacctactcctgcgtgggggtgttccaacacggcaaggtggagatcatcgccaacgaccagggcaaccgcaccacccccagctacgtggccttcacggacaccgagcggctcatcggggatgcggccaagaaccaggtggcgctgaacccgcagaacaccgtgtttgacgcgaagcggctgatcggccgcaagttcggcgacccggtggtgcagtcggacatgaagcactggcctttccaggtgatcaacgacggagacaagcccaaggtgcaggtgagctacaagggggagaccaaggcattctaccccgaggagatctcgtccatggtgctgaccaagatgaaggagatcgccgaggcgtacctgggctacccggtgaccaacgcggtgatcaccgtgccggcctacttcaacgactcgcagcgccaggccaccaaggatgcgggtgtgatcgcggggctcaacgtgctgcggatcatcaacgagcccacggccgccgccatcgcctacggcctggacagaacgggcaagggggagcgcaacgtgctcatctttgacctgggcgggggcaccttcgacgtgtccatcctgacgatcgacgacggcatcttcgaggtgaaggccacggccggggacacccacctgggtggggaggactttgacaacaggctggtgaaccacttcgtggaggagttcaagagaaaacacaagaaggacatcagccagaacaagcgagccgtgaggcggctgcgcaccgcctgcgagagggccaagaggaccctgtcgtccagcacccaggccagcctggagatcgactccctgtttgagggcatcgacttctacacgtccatcaccagggcgaggttcgaggagctgtgctccgacctgttccgaagcaccctggagcccgtggagaaggctctgcgcgacgccaagctggacaaggcccagattcacgacctggtcctggtcgggggctccacccgcatccccaaggtgcagaagctgctgcaagacttcttcaacgggcgcgacctgaacaagagcatcaaccccgacgaggctgtggcctacggggcggcggtgcaggcggccatcctgatgggggacaagtccgagaacgtgcaggacctgctgctgctggacgtggctcccctgtcgctggggctggagacggccggaggcgtgatgactgccctgatcaagcgcaactccaccatccccaccaagcagacgcagatcttcaccacctactccgacaaccaacccggggtgctgatccaggtgtacgagggcgagagggccatgacgaaagacaacaatctgttggggcgcttcgagctgagcggcatccctccggcccccaggggcgtgccccagatcgaggtgaccttcgacatcgatgccaacggcatcctgaacgtcacggccacggacaagagcaccggcaaggccaacaagatcaccatcaccaacgacaagggccgcctgagcaaggaggagatcgagcgcatggtgcaggaggcggagaagtacaaagcggaggacgaggtgcagcgcgagagggtgtcagccaagaacgccctggagtcctacgccttcaacatgaagagcgccgtggaggatgaggggctcaagggcaagatcagcgaggcggacaagaagaaggttctggacaagtgtcaagaggtcatctcgtggctggacgccaacaccttggccgagaaggacgagtttgagcacaagaggaaggagctggagcaggtgtgtaaccccatcatcagcggactgtaccagggtgccggtggtcccgggcctgggggcttcggggctcagggtcccaagggagggtctgggtcaggccctaccattgaggaggtggattaggggcctttgttctttagtatgtttgtctttgaggtggactgttgggactcaaggactttgctgctgttttcctatgtcatttctgcttcagctctttgctgcttcacttctttgtaaagttgtaacctgatggtaattagctggcttcattatttttgtagtacaaccgatatgttcattagaattctttgcatttaatgttgatactgtaagggtgtttcgttccctttaaatgaatcaacactgccaccttctgtacgagtttgttttttttttttttttttttttgcttggcgaaaacactacaaaggctgggaatgtatgtttttataatttgtttatttaaatatgaaaaataaaatgttaaactttt

SEQ ID NO: 13314 - DNA, 2519 bp, Homo sapiens
  source 1..2519: mol_type = unassigned DNA
ggaaaacggccagcctgaggagctgctgcgagggtccgcttcgtctttcgagagtgactcccgcggtcccaaggctttccagagcgaacctgtgcggctgcaggcaccggcgtgttgagtttccggcgttccgaaggactgagctcttgtcgcggatcccgtccgccgtttccagcccccagtctcagagcggagcccacagacagggcaccggcatggccaaagccgcggcgatcggcatcgacctgggcaccacctactcctgcgtgggggtgttccaacacggcaaggtggagatcatcgccaacgaccagggcaaccgcaccacccccagctacgtggccttcacggacaccgagcggctcatcggggatgcggccaagaaccaggtggcgctgaacccgcagaacaccgtgtttgacgcgaagcggctgattggccgcaagttcggcgacccggtggtgcagtcggacatgaagcactggcctttccaggtgatcaacgacggagacaagcccaaggtgcaggtgagctacaagggggagaccaaggcattctaccccgaggagatctcgtccatggtgctgaccaagatgaaggagatcgccgaggcgtacctgggctacccggtgaccaacgcggtgatcaccgtgccggcctacttcaacgactcgcagcgccaggccaccaaggatgcgggtgtgatcgcggggctcaacgtgctgcggatcatcaacgagcccacggccgccgccatcgcctacggcctggacagaacgggcaagggggagcgcaacgtgctcatctttgacctgggcgggggcaccttcgacgtgtccatcctgacgatcgacgacggcatcttcgaggtgaaggccacggccggggacacccacctgggtggggaggactttgacaacaggctggtgaaccacttcgtggaggagttcaagagaaaacacaagaaggacatcagccagaacaagcgagccgtgaggcggctgcgcaccgcctgcgagagggccaagaggaccctgtcgtccagcacccaggccagcctggagatcgactccctgtttgagggcatcgacttctacacgtccatcaccagggcgaggttcgaggagctgtgctccgacctgttccgaagcaccctggagcccgtggagaaggctctgcgcgacgccaagctggacaaggcccagattcacgacctggtcctggtcgggggctccacccgcatccccaaggtgcagaagctgctgcaggacttcttcaacgggcgcgacctgaacaagagcatcaaccccgacgaggctgtggcctacggggcggcggtgcaggcggccatcctgatgggggacaagtccgagaacgtgcaggacctgctgctgctggacgtggctcccctgtcgctggggctggagacggccggaggcgtgatgactgccctgatcaagcgcaactccaccatccccaccaagcagacgcagatcttcaccacctactccgacaaccaacccggggtgctgatccaggtgtacgagggcgagagggccatgacgaaagacaacaatctgttggggcgcttcgagctgagcggcatccctccggcccccaggggcgtgccccagatcgaggtgaccttcgacatcgatgccaacggcatcctgaacgtcacggccacggacaagagcaccggcaaggccaacaagatcaccatcaccaacgacaagggccgcctgagcaaggaggagatcgagcgcatggtgcaggaggcggagaagtacaaagcggaggacgaggtgcagcgcgagagggtgtcagccaagaacgccctggagtcctacgccttcaacatgaagagcgccgtggaggatgaggggctcaagggcaagatcagcgaggcggacaagaagaaggttctggacaagtgtcaagaggtcatctcgtggctggacgccaacaccttggccgagaaggacgagtttgagcacaagaggaaggagctggagcaggtgtgtaaccccatcatcagcggactgtaccagggtgccggtggtcccgggcctggcggcttcggggctcagggtcccaagggagggtctgggtcaggccctaccattgaggaggtggattaggggcctttgttctttagtatgtttgtctttgaggtggactgttgggactcaaggactttgctgctgttttcctatgtcatttctgcttcagctctttgctgcttcacttctttgtaaagttgtaacctgatggtaattagctggcttcattatttttgtagtacaaccgatatgttcattagaattctttgcatttaatgttgatactgtaagggtgtttcgttccctttaaatgaatcaacactgccaccttctgtacgagtttgtttgttttttttttttttttttttttttgcttggcgaaaacactacaaaggctgggaatgtatgtttttataatttgtttatttaaatatgaaaaataaaatgttaaacttt

SEQ ID NO: 13315 - DNA, 1653 bp, Homo sapiens
  source 1..1653: mol_type = unassigned DNA
atggccaaagccgcggcgatcggcatcgacctgggcaccacctactcctgcgtgggggtgttccaacacggcaaggtgcagatctcgtccatggtgctgaccaagatgaaggagatcgccgaggcgtacctgggctacccggtgaccaacgcggtgatcaccgtgccggcctacttcaacgactcgcagcgccaggccaccaaggatgcgggtgtgatcgcggggctcaacgtgctgcggatcatcaacgagcccacggccgccgccatcgcctacggcctggacagaacgggcaagggggagcgcaacgtgctcatctttgacctgggcgggggcaccttcgacgtgtccatcctgacgatcgacgacggcatcttcgaggtgaaggccacggccggggacacccacctgggtggggaggactttgacaacaggctggtgaaccacttcgtggaggagttcaagagaaaacacaagaaggacatcagccagaacaagcgagccgtgaggcggctgcgcaccgcctgcgagagggccaagaggaccctgtcgtccagcacccaggccagcctggagatcgactccctgtttgagggcatcgacttctacacgtccatcaccagggcgaggttcgaggagctgtgctccgacctgttccgaagcaccctggagcccgtggagaaggctctgcgcgacgccaagctggacaaggcccagattcacgacctggtcctggtcgggggctccacccgcatccccaaggtgcagaagctgctgcaggacttcttcaacgggcgcgacctgaacaagagcatcaaccccgacgaggctgtggcctacggggcggcggtgcaggcggccatcctgatgggggacaagtccgagaacgtgcaggacctgctgctgctggacgtggctcccctgtcgctggggctggagacggccggaggcgtgatgactgccctgatcaagcgcaactccaccatccccaccaagcagacgcagatcttcaccacctactccgacaaccaacccggggtgctgatccaggtgtacgagggcgagagggccatgacgaaagacaacaatctgttggggcgcttcgagctgagcggcatccctccggcccccaggggcgtgccccagatcgaggtgaccttcgacatcgatgccaacggcatcctgaacgtcacggccacggacaagagcaccggcaaggccaacaagatcaccatcaccaacgacaagggccgcctgagcaaggaggagatcgagcgcatggtgcaggaggcggagaagtacaaagcggaggacgaggtgcagcgcgagagggtgtcagccaagaacgccctggagtcctacgccttcaacatgaagagcgccgtggaggatgaggggctcaagggcaagatcagcgaggcggacaagaagaaggttctggacaagtgtcaagaggtcatctcgtggctggacgccaacaccttggccgagaaggacgagtttgagcacaagaggaaggagctggagcaggtgtgtaaccccatcatcagcggactgtaccagggtgccggtggtcccgggcctggcggcttcggggctcagggtcccaagggagggtctgggtcaggccctaccattgaggaggtggattag

SEQ ID NO: 13316 - DNA, 1875 bp, Homo sapiens
  source 1..1875: mol_type = unassigned DNA
atggccaaagccgcggcgatcggcatcgacctgggcaccacctactcctgcgtgggggtgttccaacacggcaaggtggagatcatcgccaacgaccagggcaaccgcaccacccccagctacgtggccttcacggacaccgagcggctcatcggggatgcggccaagaaccaggtggcgctgaacccgccggtggtgcagtcggacatgaagcactggcctttccaggtgatcaacgacggagacaagcccaaggtgcaggtgagctacaagggggagaccaaggcattctaccccgaggagatctcgtccatggtgctgaccaagatgaaggagatcgccgaggcgtacctgggctacccggtgaccaacgcggtgatcaccgtgccggcctacttcaacgactcgcagcgccaggccaccaaggatgcgggtgtgatcgcggggctcaacgtgctgcggatcatcaacgagcccacggccgccgccatcgcctacggcctggacagaacgggcaagggggagcgcaacgtgctcatctttgacctgggcgggggcaccttcgacgtgtccatcctgacgatcgacgacggcatcttcgaggtgaaggccacggccggggacacccacctgggtggggaggactttgacaacaggctggtgaaccacttcgtggaggagttcaagagaaaacacaagaaggacatcagccagaacaagcgagccgtgaggcggctgcgcaccgcctgcgagagggccaagaggaccctgtcgtccagcacccaggccagcctggagatcgactccctgtttgagggcatcgacttctacacgtccatcaccagggcgaggttcgaggagctgtgctccgacctgttccgaagcaccctggagcccgtggagaaggctctgcgcgacgccaagctggacaaggcccagattcacgacctggtcctggtcgggggctccacccgcatccccaaggtgcagaagctgctgcaggacttcttcaacgggcgcgacctgaacaagagcatcaaccccgacgaggctgtggcctacggggcggcggtgcaggcggccatcctgatgggggacaagtccgagaacgtgcaggacctgctgctgctggacgtggctcccctgtcgctggggctggagacggccggaggcgtgatgactgccctgatcaagcgcaactccaccatccccaccaagcagacgcagatcttcaccacctactccgacaaccaacccggggtgctgatccaggtgtacgagggcgagagggccatgacgaaagacaacaatctgttggggcgcttcgagctgagcggcatccctccggcccccaggggcgtgccccagatcgaggtgaccttcgacatcgatgccaacggcatcctgaacgtcacggccacggacaagagcaccggcaaggccaacaagatcaccatcaccaacgacaagggccgcctgagcaaggaggagatcgagcgcatggtgcaggaggcggagaagtacaaagcggaggacgaggtgcagcgcgagagggtgtcagccaagaacgccctggagtcctacgccttcaacatgaagagcgccgtggaggatgaggggctcaagggcaagatcagcgaggcggacaagaagaaggttctggacaagtgtcaagaggtcatctcgtggctggacgccaacaccttggccgagaaggacgagtttgagcacaagaggaaggagctggagcaggtgtgtaaccccatcatcagcggactgtaccagggtgccggtggtcccgggcctggcggcttcggggctcagggtcccaagggagggtctgggtcaggccctaccattgaggaggtggattag

SEQ ID NO: 13317 - DNA, 2166 bp, Homo sapiens
  source 1..2166: mol_type = unassigned DNA
aaaacggccagcctgaggagctgctgcgagggtccgcttcgtctttcgagagtgactcccgcggtcccaaggctttccagagcgaacctgtgcggctgcaggcaccggcgtgttgagtttccggcgttccgaaggactgagctcttgtcgcggatcccgtccgccgtttccagcccccagtctcagagcggagcccacagagcagggcaccggcatggccaaagccgcggcgatcggcatcgacctgggcaccacctactcctgcgtgggggtgttccaacacggcaaggtggagatcatcgccaacgaccagggcaaccgcaccacccccagctacgtggccttcacggacaccgagcggctcatcggggatgcggccaagaaccaggtggtgcagtcggacatgaagcactggcctttccaggtgatcaacgacggagacaagcccaaggtgcaggtgagctacaagggggagaccaaggcattctaccccgaggagatctcgtccatggtgctgaccaagatgaaggagatcgccgaggcgtacctgggctacccggtgaccaacgcggtgatcaccgtgccggcctacttcaacgactcgcagcgccaggccaccaaggatgcgggtgtgatcgcggggctcaacgtgctgcggatcatcaacgagcccacggccgccgccatcgcctacggcctggacagaacgggcaagggggagcgcaacgtgctcatctttgacctgggcgggggcaccttcgacgtgtccatcctgacgatcgacgacggcatcttcgaggtgaaggccacggccggggacacccacctgggtggggaggactttgacaacaggctggtgaaccacttcgtggaggagttcaagagaaaacacaagaaggacatcagccagaacaagcgagccgtgaggcggctgcgcaccgcctgcgagagggccaagaggaccctgtcgtccagcacccaggccagcctggagatcgactccctgtttgagggcatcgacttctacacgtccatcaccagggcgaggttcgaggagctgtgctccgacctgttccgaagcaccctggagcccgtggagaaggctctgcgcgacgccaagctggacaaggcccagattcacgacctggtcctggtcgggggctccacccgcatccccaaggtgcagaagctgctgcaggacttcttcaacgggcgcgacctgaacaagagcatcaaccccgacgaggctgtggcctacggggcggcggtgcaggcggccatcctgatgggggacaagtccgagaacgtgcaggacctgctgctgctggacgtggctcccctgtcgctggggctggagacggccggaggcgtgatgactgccctgatcaagcgcaactccaccatccccaccaagcagacgcagatcttcaccacctactccgacaaccaacccggggtgctgatccaggtgtacgagggcgagagggccatgacgaaagacaacaatctgttggggcgcttcgagctgagcggcatccctccggcccccaggggcgtgccccagatcgaggtgaccttcgacatcgatgccaacggcatcctgaacgtcacggccacggacaagagcaccggcaaggccaacaagatcaccatcaccaacgacaagggccgcctgagcaaggaggagatcgagcgcatggtgcaggaggcggagaagtacaaagcggaggacgaggtgcagcgcgagagggtgtcagccaagaacgccctggagtcctacgccttcaacatgaagagcgccgtggaggatgaggggctcaagggcaagatcagcgaggcggacaagaagaaggttctggacaagtgtcaagaggtcatctcgtggctggacgccaacaccttggccgagaaggacgagtttgagcacaagaggaaggagctggagcaggtgtgtaaccccatcatcagcggactgtaccagggtgccggtggtcccgggcctggcggcttcggggctcagggtcccaagggagggtctgggtcaggccctaccattgaggaggtggattaggggcctttgttctttagtatgtttgtctttgaggtggactgttgggactcaaggactttgctgctgttttcctatgtcatttctgcttcagctct

SEQ ID NO: 13318 - DNA, 2166 bp, Homo sapiens
  source 1..2166: mol_type = unassigned DNA
aaaacggccagcctgaggagctgctgcgagggtccgcttcgtctttcgagagtgactcccgcggtcccaaggctttccagagcgaacctgtgcggctgcaggcaccggcgtgttgagtttccggcgttccgaaggactgagctcttgtcgcggatcccgtccgccgtttccagcccccagtctcagagcggagcccacagagcagggcaccggcatggccaaagccgcggcgatcggcatcgacctgggcaccacctactcctgcgtgggggtgttccaacacggcaaggtggagatcatcgccaacgaccagggcaaccgcaccacccccagctacgtggccttcacggacaccgagcggctcatcggggatgcggccaagaaccaggtggtgcagtcggacatgaagcactggcctttccaggtgatcaacgacggagacaagcccaaggtgcaggtgagctacaagggggagaccaaggcattctaccccgaggagatctcgtccatggtgctgaccaagatgaaggagatcgccgaggcgtacctgggctacccggtgaccaacgcggtgatcaccgtgccggcctacttcaacgactcgcagcgccaggccaccaaggatgcgggtgtgatcgcggggctcaacgtgctgcggatcatcaacgagcccacggccgccgccatcgcctacggcctggacagaacgggcaagggggagcgcaacgtgctcatctttgacctgggcgggggcaccttcgacgtgtccatcctgacgatcgacgacggcatcttcgaggtgaaggccacggccggggacacccacctgggtggggaggactttgacaacaggctggtgaaccacttcgtggaggagttcaagagaaaacacaagaaggacatcagccagaacaagcgagccgtgaggcggctgcgcaccgcctgcgagagggccaagaggaccctgtcgtccagcacccaggccagcctggagatcgactccctgtttgagggcatcgacttctacacgtccatcaccagggcgaggttcgaggagctgtgctccgacctgttccgaagcaccctggagcccgtggagaaggctctgcgcgacgccaagctggacaaggcccagattcacgacctggtcctggtcgggggctccacccgcatccccaaggtgcagaagctgctgcaggacttcttcaacgggcgcgacctgaacaagagcatcaaccccgacgaggctgtggcctacggggcggcggtgcaggcggccatcctgatgggggacaagtccgagaacgtgcaggacctgctgctgctggacgtggctcccctgtcgctggggctggagacggccggaggcgtgatgactgccctgatcaagcgcaactccaccatccccaccaagcagacgcagatcttcaccacctactccgacaaccaacccggggtgctgatccaggtgtacgagggcgagagggccatgacgaaagacaacaatctgttggggcgcttcgagctgagcggcatccctccggcccccaggggcgtgccccagatcgaggtgaccttcgacatcgatgccaacggcatcctgaacgtcacggccacggacaagagcaccggcaaggccaacaagatcaccatcaccaacgacaagggccgcctgagcaaggaggagatcgagcgcatggtgcaggaggcggagaagtacaaagcggaggacgaggtgcagcgcgagagggtgtcagccaagaacgccctggagtcctacgccttcaacatgaagagcgccgtggaggatgaggggctcaagggcaagatcagcgaggcggacaagaagaaggttctggacaagtgtcaagaggtcatctcgtggctggacgccaacaccttggccgagaaggacgagtttgagcacaagaggaaggagctggagcaggtgtgtaaccccatcatcagcggactgtaccagggtgccggtggtcccgggcctgggggcttcggggctcagggtcccaagggagggtctgggtcaggccctaccattgaggaggtggattaggggcctttgttctttagtatgtttgtctttgaggtggactgttgggactcaaggactttgctgctgttttcctatgtcatttctgcttcagctct

SEQ ID NO: 13319 - DNA, 1653 bp, Homo sapiens
  source 1..1653: mol_type = unassigned DNA
atggccaaagccgcggcgatcggcatcgacctgggcaccacctactcctgcgtgggggtgttccaacacggcaaggtgcagatctcgtccatggtgctgaccaagatgaaggagatcgccgaggcgtacctgggctacccggtgaccaacgcggtgatcaccgtgccggcctacttcaacgactcgcagcgccaggccaccaaggatgcgggtgtgatcgcggggctcaacgtgctgcggatcatcaacgagcccacggccgccgccatcgcctacggcctggacagaacgggcaagggggagcgcaacgtgctcatctttgacctgggcgggggcaccttcgacgtgtccatcctgacgatcgacgacggcatcttcgaggtgaaggccacggccggggacacccacctgggtggggaggactttgacaacaggctggtgaaccacttcgtggaggagttcaagagaaaacacaagaaggacatcagccagaacaagcgagccgtgaggcggctgcgcaccgcctgcgagagggccaagaggaccctgtcgtccagcacccaggccagcctggagatcgactccctgtttgagggcatcgacttctacacgtccatcaccagggcgaggttcgaggagctgtgctccgacctgttccgaagcaccctggagcccgtggagaaggctctgcgcgacgccaagctggacaaggcccagattcacgacctggtcctggtcgggggctccacccgcatccccaaggtgcagaagctgctgcaagacttcttcaacgggcgcgacctgaacaagagcatcaaccccgacgaggctgtggcctacggggcggcggtgcaggcggccatcctgatgggggacaagtccgagaacgtgcaggacctgctgctgctggacgtggctcccctgtcgctggggctggagacggccggaggcgtgatgactgccctgatcaagcgcaactccaccatccccaccaagcagacgcagatcttcaccacctactccgacaaccaacccggggtgctgatccaggtgtacgagggcgagagggccatgacgaaagacaacaatctgttggggcgcttcgagctgagcggcatccctccggcccccaggggcgtgccccagatcgaggtgaccttcgacatcgatgccaacggcatcctgaacgtcacggccacggacaagagcaccggcaaggccaacaagatcaccatcaccaacgacaagggccgcctgagcaaggaggagatcgagcgcatggtgcaggaggcggagaagtacaaagcggaggacgaggtgcagcgcgagagggtgtcagccaagaacgccctggagtcctacgccttcaacatgaagagcgccgtggaggatgaggggctcaagggcaagatcagcgaggcggacaagaagaaggttctggacaagtgtcaagaggtcatctcgtggctggacgccaacaccttggccgagaaggacgagtttgagcacaagaggaaggagctggagcaggtgtgtaaccccatcatcagcggactgtaccagggtgccggtggtcccgggcctggcggcttcggggctcagggtcccaagggagggtctgggtcaggccctaccattgaggaggtggattag

SEQ ID NO: 13320 - DNA, 2166 bp, Homo sapiens
  source 1..2166: mol_type = unassigned DNA
aaaacggccagcctgaggagctgctgcgagggtccgcttcgtctttcgagagtgactcccgcggtcccaaggctttccagagcgaacctgtgcggctgcaggcaccggcgtgttgagtttccggcgttccgaaggactgagctcttgtcgcggatcccgtccgccgtttccagcccccagtctcagagcggagcccacagagcagggcaccggcatggccaaagccgcggcgatcggcatcgacctgggcaccacctactcctgcgtgggggtgttccaacacggcaaggtggagatcatcgccaacgaccagggcaaccgcaccacccccagctacgtggccttcacggacaccgagcggctcatcggggatgcggccaagaaccaggtggtgcagtcggacatgaagcactggcctttccaggtgatcaacgacggagacaagcccaaggtgcaggtgagctacaagggggagaccaaggcattctaccccgaggagatctcgtccatggtgctgaccaagatgaaggagatcgccgaggcgtacctgggctacccggtgaccaacgcggtgatcaccgtgccggcctacttcaacgactcgcagcgccaggccaccaaggatgcgggtgtgatcgcggggctcaacgtgctgcggatcatcaacgagcccacggccgccgccatcgcctacggcctggacagaacgggcaagggggagcgcaacgtgctcatctttgacctgggcgggggcaccttcgacgtgtccatcctgacgatcgacgacggcatcttcgaggtgaaggccacggccggggacacccacctgggtggggaggactttgacaacaggctggtgaaccacttcgtggaggagttcaagagaaaacacaagaaggacatcagccagaacaagcgagccgtgaggcggctgcgcaccgcctgcgagagggccaagaggaccctgtcgtccagcacccaggccagcctggagatcgactccctgtttgagggcatcgacttctacacgtccatcaccagggcgaggttcgaggagctgtgctccgacctgttccgaagcaccctggagcccgtggagaaggctctgcgcgacgccaagctggacaaggcccagattcacgacctggtcctggtcgggggctccacccgcatccccaaggtgcagaagctgctgcaagacttcttcaacgggcgcgacctgaacaagagcatcaaccccgacgaggctgtggcctacggggcggcggtgcaggcggccatcctgatgggggacaagtccgagaacgtgcaggacctgctgctgctggacgtggctcccctgtcgctggggctggagacggccggaggcgtgatgactgccctgatcaagcgcaactccaccatccccaccaagcagacgcagatcttcaccacctactccgacaaccaacccggggtgctgatccaggtgtacgagggcgagagggccatgacgaaagacaacaatctgttggggcgcttcgagctgagcggcatccctccggcccccaggggcgtgccccagatcgaggtgaccttcgacatcgatgccaacggcatcctgaacgtcacggccacggacaagagcaccggcaaggccaacaagatcaccatcaccaacgacaagggccgcctgagcaaggaggagatcgagcgcatggtgcaggaggcggagaagtacaaagcggaggacgaggtgcagcgcgagagggtgtcagccaagaacgccctggagtcctacgccttcaacatgaagagcgccgtggaggatgaggggctcaagggcaagatcagcgaggcggacaagaagaaggttctggacaagtgtcaagaggtcatctcgtggctggacgccaacaccttggccgagaaggacgagtttgagcacaagaggaaggagctggagcaggtgtgtaaccccatcatcagcggactgtaccagggtgccggtggtcccgggcctgggggcttcggggctcagggtcccaagggagggtctgggtcaggccctaccattgaggaggtggattaggggcctttgttctttagtatgtttgtctttgaggtggactgttgggactcaaggactttgctgctgttttcctatgtcatttctgcttcagctct

SEQ ID NO: 13321 - DNA, 1653 bp, Homo sapiens; identical to SEQ ID NO: 13315
  source 1..1653: mol_type = unassigned DNA

SEQ ID NO: 13322 - DNA, 2102 bp, Homo sapiens
  source 1..2102: mol_type = unassigned DNA
ggcttttaattgtgggggcttgctgggcctgcgcagttgtgggcagggggctggtgcggggagcgggttacgcgcgtccaggggagggtgggggcgtttgtgttgacaccgcccggccacgttacaatggagatactgtctctgacctcatgggccagtttggaaaaagattactgagttggagccgtctcaaatttgcagggagggacggggtggggggtggggggaccccggttgtgcagtttgatattgagggagcccccacctactcgctggggctgcgtaatctggacgtttccaaactgaagcgaaggcgtcgggagactaggcctcagagaaccatggctactgccaagggaatcgccataggcatcgacctgggcaccacctactcctgtgtgggggtgttccagcacggcaaggtggagatcatcgccaacgaccagggcaaccgcaccacccccagctacgtggccttcacagacaccgagcggctcattggggatgcggccaagaaccaggtagcaatgaatccccagaacactgtttttgatgctaaacgtctgatcggcaggaaatttaatgatcctgttgtacaagcagatatgaaactttggccttttcaagtgattaatgactctcaacgtcaggctactaaggatgcaggtgtgattgctggacttaatgtgctaagaatcatcaatgagcccacggctgctgccattgcctatggtttagataaaggaggtcaaggagaacgacatgtcctgatttttgatctgggtggaggcacatttgatgtgtcaattctgaccatagatgatgggatttttgaggtaaaggccactgctggggacactcacctgggtggggaggactttgacaacaggcttgtgagccacttcgtggaggagttcaagaggaaacacaaaaaggacatcagccagaacaagcgagccgtgaggcggctgcgcaccgcctgcgagagggccaagaggaccctgtcgtccagcacccaggccaacctagaaattgattcactttatgaaggcattgacttctatacatccatcaccagagctcgatttgaagagttgtgtgcagacctgtttaggggtaccctggagcctgtagaaaaagcgcttcgggatgccaagatggataaggctaaaatccatgacattgttttagtagggggctccacccgcatccccaaggtgcagcggctgcttcaggactacttcaatggacgtgatctcaacaagagcatcaaccctgatgaggccgtagcatatggggctgcggtacaagcagccatcctgatgggggacaagtctgagaaggtacaggacctgctgctgctggacgtggctcccctgtccctggggctggagacggctgggggcgtgatgactgccctgataaagcgcaactccaccatccccaccaagcagacacagattttcaccacctactctgacaaccaacccggggtgctgatccaggtgtatgagggcgagagggccatgacaaaggacaacaacctgctggggcggtttgacctgactggaatccctccagcacccaggggagttcctcagatcgaggtgacgtttgacattgatgccaatggtattctcaatgtcacagccacggacaagagcaccggcaaggtgaacaagatcaccatcaccaatgacaagggccgcctgagcaaggaggagattgagcgcatggttctggatgctgagaaatataaagctgaagatgaggtccagagggagaaaattgctgcaaagaatgccttagaatcctatgcttttaacatgaagagtgttgtgagtgatgaaggtttgaagggcaagattagtgagtctgataaaaataaaatattggataaatgcaacgagctcctttcgtggctggaggtcaatcaactggcagagaaagatgagtttgatcataagagaaaggaattggagcagatgtgtaaccctatcatcacaaaactctaccaaggaggatgcactgggcctgcctgcggaacagggtatgtgcctggaaggcctgccacaggccccacaattgaagaagtagattaa

SEQ ID NO: 13323 - DNA, 2544 bp, Homo sapiens
  source 1..2544: mol_type = unassigned DNA
gggccagtttggaaaaagattactgagttggagccgtctcaaatttgcagggagggacggggtggggggtggggggaccccggttgtgcagtttgatattgagggagcccccacctactcgctggggctgcgtaatctggacgtttccaaactgaagcgaaggcgtcgggagactaggcctcagagaaccatggctactgccaagggaatcgccataggcatcgacctgggcaccacctactcctgtgtgggggtgttccagcacggcaaggtggagatcatcgccaacgaccagggcaaccgcaccacccccagctacgtggccttcacagacaccgagcggctcattggggatgcggccaagaaccaggtagcaatgaatccccagaacactgtttttgatgctaaacgtctgatcggcaggaaatttaatgatcctgttgtacaagcagatatgaaactttggccttttcaagtgattaatgaaggaggcaagcccaaagtccttgtgtcctacaaaggggagaataaagctttctaccctgaggaaatctcttcgatggtattgactaagttgaaggagactgctgaggcctttttgggccaccctgtcaccaatgcagtgattaccgtgccagcctatttcaatgactctcaacgtcaggctactaaggatgcaggtgtgattgctggacttaatgtgctaagaatcatcaatgagcccacggctgctgccattgcctatggtttagataaaggaggtcaaggagaacgacatgtcctgatttttgatctgggtggaggcacatttgatgtgtcaattctgaccatagatgatgggatttttgaggtaaaggccactgctggggacactcacctgggtggggaggactttgacaacaggcttgtgagccacttcgtggaggagttcaagaggaaacacaaaaaggacatcagccagaacaagcgagccgtgaggcggctgcgcaccgcctgcgagagggccaagaggaccctgtcgtccagcacccaggccaacctagaaattgattcactttatgaaggcattgacttctatacatccatcaccagagctcgatttgaagagttgtgtgcagacctgtttaggggtaccctggagcctgtagaaaaagcgcttcgggatgccaagatggataaggctaaaatccatgacattgttttagtagggggctccacccgcatccccaaggtgcagcggctgcttcaggactacttcaatggacgtgatctcaacaagagcatcaaccctgatgaggccgtagcatatggggctgcggtacaagcagccatcctgatgggggacaagtctgagaaggtacaggacctgctgctgctggacgtggctcccctgtccctggggctggagacggctgggggcgtgatgactgccctgataaagcgcaactccaccatccccaccaagcagacacagattttcaccacctactctgacaaccaacccggggtgctgatccaggtgtatgagggcgagagggccatgacaaaggacaacaacctgctggggcggtttgacctgactggaatccctccagcacccaggggagttcctcagatcgaggtgacgtttgacattgatgccaatggtattctcaatgtcacagccacggacaagagcaccggcaaggtgaacaagatcaccatcaccaatgacaagggccgcctgagcaaggaggagattgagcgcatggttctggatgctgagaaatataaagctgaagatgaggtccagagggagaaaattgctgcaaagaatgccttagaatcctatgcttttaacatgaagagtgttgtgagtgatgaaggtttgaagggcaagattagtgagtctgataaaaataaaatattggataaatgcaacgagctcctttcgtggctggaggtcaatcaactggcagagaaagatgagtttgatcataagagaaaggaattggagcagatgtgtaaccctatcatcacaaaactctaccaaggaggatgcactgggcctgcctgcggaacagggtatgtgcctggaaggcctgccacaggccccacaattgaagaagtagattaattctttttagaactgaagcatcctaggatgcctctacatgtatttcattcccctcatcttcaaacatcattattattcttgaccagacctgaatctaagttaccatcccttggaaattctggagaaggagtctcatgcaccacctatcacactccctcacatcctgtttctgactttggaatggactcaggaaaactaggcccctctttaaaccgtgtgatgtatttgaatgtctgttatttccagccaccctaacattcttcttcctgtgtggatgcttatttgtcaatcagtaaatttgttcgtaaagaaaattacttctggtatttaggctgtgaatgtaccttgaaggggagagttcatggagagagcatgtgttctctgattgtgaggtcactgtgaatgattaaattggtaagggtaaagta

SEQ ID NO: 13324 - DNA, 2544 bp, Homo sapiens
  source 1..2544: mol_type = unassigned DNA
gggccagtttggaaaaagattactgagttggagccgtctcaaatttgcagggagggacggggtggggggtggggggaccccggttgtgcagtttgatattgagggagcccccacctactcgctggggctgcgtaatctggacgtttccaaactgaagcgaaggcgtcgggagactaggcctcagagaaccatggctactgccaagggaatcgccataggcatcgacctgggcaccacctactcctgtgtgggggtgttccagcacggcaaggtggagatcatcgccaacgaccagggcaaccgcaccacccccagctacgtggccttcacagacaccgagcggctcattggggatgcggccaagaaccaggtagcaatgaatccccagaacactgtttttgatgctaaacgtctgatcggcaggaaatttaatgatcctgttgtacaagcagatatgaaactttggccttttcaagtgattaatgaaggaggcaagcccaaagtccttgtgtcctacaaaggggagaataaagctttctaccctgaggaaatctcttcgatggtattgactaagttgaaggagactgctgaggcctttttgggccaccctgtcaccaatgcagtgattaccgtgccagcctatttcaatgactctcaacgtcaggctactaaggatgcaggtgtgattgctggacttaatgtgctaagaatcatcaatgagcccacggctgctgccattgcctatggtttagataaaggaggtcaaggagaacgacatgtcctgatttttgatctgggtggaggcacatttgatgtgtcaattctgaccatagatgatgggatttttgaggtaaaggccactgctggggacactcacctgggtggggaggactttgacaacaggcttgtgagccacttcgtggaggagttcaagaggaaacacaaaaaggacatcagccagaacaagcgagccgtgaggcggctgcgcaccgcctgcgagagggccaagaggaccctgtcgtccagcacccaggccaacctagaaattgattcactttatgaaggcattgacttctatacatccatcaccagagctcgatttgaagagttgtgtgcagacctgtttaggggtaccctggagcctgtagaaaaagcgcttcgggatgccaagatggataaggctaaaatccatgacattgttttagtagggggctccacccgcatccccaaggtgcagcggctgcttcaggactacttcaatggacgtgatctcaacaagagcatcaaccctgatgaggccgtagcatatggggctgcggtacaagcagccatcctgatgggggacaagtctgagaaggtacaggacctgctgctgctggacgtggctcccctgtccctggggctggagacggctgggggcgtgatgactgccctgataaagcgcaactccaccatccccaccaagcagacacagattttcaccacctactctgacaaccaacccggggtgctgatccaggtgtatgagggcgagagggccatgacaaaggacaacaacctgctggggcggtttgacctgactggaatccctccagcacccaggggagttcctcagatcgaggtgacgtttgacattgatgccaatggtattctcaatgtcacagccatggacaagagcaccggcaaggtgaacaagatcaccatcaccaatgacaagggccgcctgagcaaggaggagattgagcgcatggttctggatgctgagaaatataaagctgaagatgaggtccagagggagaaaattgctgcaaagaatgccttagaatcctatgcttttaacatgaagagtgttgtgagtgatgaaggtttgaagggcaagattagtgagtctgataaaaataaaatattggataaatgcaacgagctcctttcgtggctggaggtcaatcaactggcagagaaagatgagtttgatcataagagaaaggaattggagcagatgtgtaaccctatcatcacaaaactctaccaaggaggatgcactgggcctgcctgcggaacagggtatgtgcctggaaggcctgccacaggccccacaattgaagaagtagattaattctttttagaactgaagcatcctaggatgcctctacatgtatttcattcccctcatcttcaaacatcattattattcttgaccagacctgaatctaagttaccatcccttggaaattctggagaaggagtctcatgcaccacctatcacactccctcacatcctgtttctgactttggaatggactcaggaaaactaggcccctctttaaaccgtgtgatgtatttgaatgtctgttatttccagccaccctaacattcttcttcctgtgtggatgcttatttgtcaatcagtaaatttgttcgtaaagaaaattacttctggtatttaggctgtgaatgtaccttgaaggggagagttcatggagagagcatgtgttctctgattgtgaggtcactgtgaatgattaaattggtaagggtaaagta

SEQ ID NO: 13325 - DNA, 2019 bp, Homo sapiens
  source 1..2019: mol_type = unassigned DNA
aaactcgacgcgccggtgcctgcagccgcacaggttcgctctgggaagccttgggacaacgggagtcactctcgaaaaaggcctcagagaaccatggctactgccaagggaatcgccataggcatcgacctgggcaccacctactcctgtgtgggggtgttccagcacggcaaggtggagatcatcgccaacgaccagggcaaccgcaccacccccagctacgtggccttcacagacaccgagcggctcattggggatgcggccaagaaccaggtagcaatgaatccccagaacactgtttttgatgctaaacgtctgatcggcaggaaatttaatgatcctgttgtacaagcagatatgaaactttggccttttcaagtgattaatgaaggaggcaagcccaaagtccttgtgtcctacaaaggggagaataaagctttctaccctgaggaaatctcttcgatggtattgactaagttgaaggagactgctgaggcctttttgggccaccctgtcaccaatgcagtgattaccgtgccagcctatttcaatgactctcaacgtcaggctactaaggatgcaggtgtgattgctggacttaatgtgctaagaatcatcaatgagcccacggctgctgccattgcctatggtttagataaaggaggtcaaggagaacgacatgtcctgatttttgatctgggtggaggcacatttgatgtgtcaattctgaccatagatgatgggatttttgaggtaaaggccactgctggggacactcacctgggtggggaggactttgacaacaggcttgtgagccacttcgtggaggagttcaagaggaaacacaaaaaggacatcagccagaacaagcgagccgtgaggcggctgcgcaccgcctgcgagagggccaagaggaccctgtcgtccagcacccaggccaacctagaaattgattcactttatgaaggcattgacttctatacatccatcaccagagctcgatttgaagagttgtgtgcagacctgtttaggggtaccctggagcctgtagaaaaagcgcttcgggatgccaagatggataaggctaaaatccatgacattgttttagtagggggctccacccgcatccccaaggtgcagcggctgcttcaggactacttcaatggacgtgatctcaacaagagcatcaaccctgatgaggccgtagcatatggggctgcggtacaagcagccatcctgatgggggacaagtctgagaaggtacaggacctgctgctgctggacgtggctcccctgtccctggggctggagacggctgggggcgtgatgactgccctgataaagcgcaactccaccatccccaccaagcagacacagattttcaccacctactctgacaaccaacccggggtgctgatccaggtgtatgagggcgagagggccatgacaaaggacaacaacctgctggggcggtttgacctgactggaatccctccagcacccaggggagttcctcagatcgaggtgacgtttgacattgatgccaatggtattctcaatgtcacagccacggacaagagcaccggcaaggtgaacaagatcaccatcaccaatgacaagggccgcctgagcaaggaggagattgagcgcatggttctggatgctgagaaatataaagctgaagatgaggtccagagggagaaaattgctgcaaagaatgccttagaatcctatgcttttaacatgaagagtgttgtgagtgatgaaggtttgaagggcaagattagtgagtctgataaaaataaaatattggataaatgcaacgagctcctttcgtggctggaggtcaatcaactggcagagaaagatgagtttgatcataagagaaaggaattggagcagatgtgtaaccctatcatcacaaaactctaccaaggaggatgcactgggcctgcctgcggaacagggtatgtgcctggaaggcctgccacaggccccacaattgaagaagtagattaa

SEQ ID NO: 13326 - DNA, 2544 bp, Homo sapiens; identical to SEQ ID NO: 13323
  source 1..2544: mol_type = unassigned DNA

SEQ ID NO: 13327 - DNA, 696 bp, Homo sapiens
  source 1..696: mol_type = unassigned DNA
gccaagggaatcgccataggcatcgacctgggcaccacctactcctgtgtgggggtgttccagcacggcaaggtggagatcatcgccaacgaccagggcaaccgcaccacccccagctacgtggccttcacagacaccgagcggctcattggggatgcaggtgtgattgctggacttaatgtgctaagaatcatcaatgagcccacggctgctgccattgcctatggtttagataaaggaggtcaaggagaacgacatgtcctgatttttgatctgggtggaggcacatttgatgtgtcaattctgaccatagatgatgggatttttgaggtaaaggccactgctggggacactcacctgggtggggaggactttgacaacaggcttgtgagccacttcgtggaggagttcaagaggaaacacaaaaaggacatcagccagaacaagcgagccgtgaggcggctgcgcaccgcctgcgagagggccaagaggaccctgtcgtccagcacccaggccaacctagaaattgattcactttatgaaggcattgacttctatacatccatcaccagagctcgatttgaagagttgtgtgcagacctgtttaggggtaccctggagcctgtagaaaaaggggctccacccgcatccccaaggtgcagcggctgcttcaggactacttcaatggacgtgatc

SEQ ID NO: 13328 - DNA, 2544 bp, Homo sapiens; identical to SEQ ID NO: 13324
  source 1..2544: mol_type = unassigned DNA

SEQ ID NO: 13329 - DNA, 1984 bp, Homo sapiens
  source 1..1984: mol_type = unassigned DNA
aaatttgcagggagggacggggtggggggtggggggaccccggttgtgcagtttgatattgagggagcccccacctactcgctggggctgcgtaatctggacgtttccaaactgaagcgaaggcgtcgggagactaggcctcagagaaccatggctactgccaagggaatcgccataggcatcgacctgggcaccacctactcctgtgtgggggtgttccagcacggcaaggtggagatcatcgccaacgaccagggcaaccgcaccacccccagctacgtggccttcacagacaccgagcggctcattggggatgcggccaagaaccaggtagcaatgaatccccagaacactgtttttgatgctaaacgtctgatcggcaggaaatttaatgatcctgttgtacaagcagatatgaaactttggccttttcaagtgattaatgaaggaggcaagcccaaagtccttgtgtcctacaaaggggagaataaagctttctaccctgaggaaatctcttcgatggtattgactaagttgaaggagactgctgaggcctttttgggccaccctgtcaccaatgcagtgattaccgtgccagcctatttcaatgactctcaacgtcaggctactaaggatgcaggtgtgattgctggacttaatgtgctaagaatcatcaatgagcccacggctgctgccattgcctatggtttagataaaggaggtcaaggagaacgacatgtcctgatttttgatctgggtggaggcacatttgatgtgtcaattctgaccatagatgatgggatttttgaggtaaaggccactgctggggacactcacctgggtggggaggactttgacaacaggcttgtgagccacttcgtggaggagttcaagaggaaacacaaaaaggacatcagccagaacaagcgagccgtgaggcggctgcgcaccgcctgcgagagggccaagaggaccctgtcgtccagcacccaggccaacctagaaattgattcactttatgaaggcattgacttctatacatccatcaccagagctcgatttgaagagttgtgtgcagacctgtttaggggtaccctggagcctgtagaaaaagcgcttcgggatgccaagatggataaggctaaaatccatgacattgttttagtagggggctccacccgcatccccaaggtgcagcggctgcttcaggactacttcaatggacgtgatctcaacaagagcatcaaccctgatgaggccgtagcatatggggctgcggtacaagcagccatcctgatgggggacaagtctgagaaggtacaggacctgctgctgctggacgtggctcccctgtccctggggctggagacggctgggggcgtgatgactgccctgataaagcgcaactccaccatccccaccaagcagacacagattttcaccacctactctgacaaccaacccggggtgctgatccaggtgtatgagggcgagagggccatgacaaaggacaacaacctgctggggcggtttgacctgactggaatccctccagcacccaggggagttcctcagatcgaggtgacgtttgacattgatgccaatggtattctcaatgtcacagccatggacaagagcaccggcaaggtgaacaagatcaccatcaccaatgacaagggccgcctgagcaaggaggagattgagcgcatggttctggatgctgagaaatataaagctgaagatgtgtaaccctatcatcacaaaactctaccaaggaggatgcactgggcctgcctgcggaacagggtatgtgcctggaaggcctgccacaggccccacaattgaagaagtagattaattctttttagaactgaagcatcctaggatgcctctacatgtatttcattcccctcatcttcaaacatcattattattcttgaccagacctgaatctaagttaccatcccttggaaattctggagaa

SEQ ID NO: 13330 - DNA, 696 bp, Homo sapiens; identical to SEQ ID NO: 13327
  source 1..696: mol_type = unassigned DNA

SEQ ID NO: 13331 - DNA, 2019 bp, Homo sapiens; identical to SEQ ID NO: 13325
  source 1..2019: mol_type = unassigned DNA

SEQ ID NO: 13332 - DNA, 1984 bp, Homo sapiens; identical to SEQ ID NO: 13329
  source 1..1984: mol_type = unassigned DNA

SEQ ID NO: 13333 - DNA, 1984 bp, Homo sapiens
  source 1..1984: mol_type = unassigned DNA
aaatttgcagggagggacggggtggggggtggggggaccccggttgtgcagtttgatattgagggagcccccacctactcgctggggctgcgtaatctggacgtttccaaactgaagcgaaggcgtcgggagactaggcctcagagaaccatggctactgccaagggaatcgccataggcatcgacctgggcaccacctactcctgtgtgggggtgttccagcacggcaaggtggagatcatcgccaacgaccagggcaaccgcaccacccccagctacgtggccttcacagacaccgagcggctcattggggatgcggccaagaaccaggtagcaatgaatccccagaacactgtttttgatgctaaacgtctgatcggcaggaaatttaatgatcctgttgtacaagcagatatgaaactttggccttttcaagtgattaatgaaggaggcaagcccaaagtccttgtgtcctacaaaggggagaataaagctttctaccctgaggaaatctcttcgatggtattgactaagttgaaggagactgctgaggcctttttgggccaccctgtcaccaatgcagtgattaccgtgccagcctatttcaatgactctcaacgtcaggctactaaggatgcaggtgtgattgctggacttaatgtgctaagaatcatcaatgagcccacggctgctgccattgcctatggtttagataaaggaggtcaaggagaacgacatgtcctgatttttgatctgggtggaggcacatttgatgtgtcaattctgaccatagatgatgggatttttgaggtaaaggccactgctggggacactcacctgggtggggaggactttgacaacaggcttgtgagccacttcgtggaggagttcaagaggaaacacaaaaaggacatcagccagaacaagcgagccgtgaggcggctgcgcaccgcctgcgagagggccaagaggaccctgtcgtccagcacccaggccaacctagaaattgattcactttatgaaggcattgacttctatacatccatcaccagagctcgatttgaagagttgtgtgcagacctgtttaggggtaccctggagcctgtagaaaaagcgcttcgggatgccaagatggataaggctaaaatccatgacattgttttagtagggggctccacccgcatccccaaggtgcagcggctgcttcaggactacttcaatggacgtgatctcaacaagagcatcaaccctgatgaggccgtagcatatggggctgcggtacaagcagccatcctgatgggggacaagtctgagaaggtacaggacctgctgctgctggacgtggctcccctgtccctggggctggagacggctgggggcgtgatgactgccctgataaagcgcaactccaccatccccaccaagcagacacagattttcaccacctactctgacaaccaacccggggtgctgatccaggtgtatgagggcgagagggccatgacaaaggacaacaacctgctggggcggtttgacctgactggaatccctccagcacccaggggagttcctcagatcgaggtgacgtttgacattgatgccaatggtattctcaatgtcacagccacggacaagagcaccggcaaggtgaacaagatcaccatcaccaatgacaagggccgcctgagcaaggaggagattgagcgcatggttctggatgctgagaaatataaagctgaagatgtgtaaccctatcatcacaaaactctaccaaggaggatgcactgggcctgcctgcggaacagggtatgtgcctggaaggcctgccacaggccccacaattgaagaagtagattaattctttttagaactgaagcatcctaggatgcctctacatgtatttcattcccctcatcttcaaacatcattattattcttgaccagacctgaatctaagttaccatcccttggaaattctggagaa

SEQ ID NO: 13334 - DNA, 2019 bp, Homo sapiens
  source 1..2019: mol_type = unassigned DNA
aaactcgacgcgccggtgcctgcagccgcacaggttcgctctgggaagccttgggacaacgggagtcactctcgaaaaaggcctcagagaaccatggctactgccaagggaatcgccataggcatcgacctgggcaccacctactcctgtgtgggggtgttccagcacggcaaggtggagatcatcgccaacgaccagggcaaccgcaccacccccagctacgtggccttcacagacaccgagcggctcattggggatgcggccaagaaccaggtagcaatgaatccccagaacactgtttttgatgctaaacgtctgatcggcaggaaatttaatgatcctgttgtacaagcagatatgaaactttggccttttcaagtgattaatgaaggaggcaagcccaaagtccttgtgtcctacaaaggggagaataaagctttctaccctgaggaaatctcttcgatggtattgactaagttgaaggagactgctgaggcctttttgggccaccctgtcaccaatgcagtgattaccgtgccagcctatttcaatgactctcaacgtcaggctactaaggatgcaggtgtgattgctggacttaatgtgctaagaatcatcaatgagcccacggctgctgccattgcctatggtttagataaaggaggtcaaggagaacgacatgtcctgatttttgatctgggtggaggcacatttgatgtgtcaattctgaccatagatgatgggatttttgaggtaaaggccactgctggggacactcacctgggtggggaggactttgacaacaggcttgtgagccacttcgtggaggagttcaagaggaaacacaaaaaggacatcagccagaacaagcgagccgtgaggcggctgcgcaccgcctgcgagagggccaagaggaccctgtcgtccagcacccaggccaacctagaaattgattcactttatgaaggcattgacttctatacatccatcaccagagctcgatttgaagagttgtgtgcagacctgtttaggggtaccctggagcctgtagaaaaagcgcttcgggatgccaagatggataaggctaaaatccatgacattgttttagtagggggctccacccgcatccccaaggtgcagcggctgcttcaggactacttcaatggacgtgatctcaacaagagcatcaaccctgatgaggccgtagcatatggggctgcggtacaagcagccatcctgatgggggacaagtctgagaaggtacaggacctgctgctgctggacgtggctcccctgtccctggggctggagacggctgggggcgtgatgactgccctgataaagcgcaactccaccatccccaccaagcagacacagattttcaccacctactctgacaaccaacccggggtgctgatccaggtgtatgagggcgagagggccatgacaaaggacaacaacctgctggggcggtttgacctgactggaatccctccagcacccaggggagttcctcagatcgaggtgacgtttgacattgatgccaatggtattctcaatgtcacagccatggacaagagcaccggcaaggtgaacaagatcaccatcaccaatgacaagggccgcctgagcaaggaggagattgagcgcatggttctggatgctgagaaatataaagctgaagatgaggtccagagggagaaaattgctgcaaagaatgccttagaatcctatgcttttaacatgaagagtgttgtgagtgatgaaggtttgaagggcaagattagtgagtctgataaaaataaaatattggataaatgcaacgagctcctttcgtggctggaggtcaatcaactggcagagaaagatgagtttgatcataagagaaaggaattggagcagatgtgtaaccctatcatcacaaaactctaccaaggaggatgcactgggcctgcctgcggaacagggtatgtgcctggaaggcctgccacaggccccacaattgaagaagtagattaa

SEQ ID NO: 13335 - DNA, 696 bp, Homo sapiens; identical to SEQ ID NO: 13327
  source 1..696: mol_type = unassigned DNA

SEQ ID NO: 13336 - DNA, 696 bp, Homo sapiens; identical to SEQ ID NO: 13327
  source 1..696: mol_type = unassigned DNA

SEQ ID NO: 13337 - DNA, 2019 bp, Homo sapiens; identical to SEQ ID NO: 13334
  source 1..2019: mol_type = unassigned DNA

SEQ ID NO: 13338 - DNA, 2767 bp, Homo sapiens
  source 1..2767: mol_type = unassigned DNA
ccagcagcaggaggcgcgcgaggcaccacggcctggcggccgagagtcagggaggaacctcatttacataacggccgcccctctgtctcctggcgggggccggagtcccgcccctcgtccaacttgaaatctgttgggtcacgggccagtcactccgacctaggcaagcctgtggtggagctggaagagtttgtgagggcggtcccgggagcggattgggtctgggagttcccagaggcggctataagaaccgggaactgggcgcggggagctgagttgctggtagtgcccgtggtgcttggttcgaggtggccgttagttgactccgcggagttcatctccctggttttcccgtcctaacgtcgctcgcctttcagtcaggatgtctgcccgtggcccggctatcggcatcgacctgggcaccacctattcgtgcgtcggggtcttccaacatggcaaggtggagatcatcgccaacgaccagggcaatcgcaccacccccagctacgtggccttcacggacaccgagcgcctcatcggcgacgccgccaagaaccaggtggccatgaaccccaccaacaccatcttcgacgccaagaggctgattggacggaaattcgaggatgccacagtgcagtcggatatgaaacactggccgttccgggtggtgagcgagggaggcaagcccaaagtgcaagtagagtacaagggggagaccaagaccttcttcccagaggagatatcctccatggtcctcacgaagatgaaggagatcgcggaagcctacctggggggcaaggtgcacagcgcggtcataacggtcccggcctatttcaacgactcgcagcgccaggccaccaaggacgcaggcaccatcacggggctcaatgtgctgcgcatcatcaacgagcccacggcggcggccatcgcctacggcctggacaagaagggctgcgcgggcggcgagaagaacgtgctcatctttgacctgggcggtggcactttcgacgtgtccatcctgaccatcgaggatggcatcttcgaggtgaagtccacggccggcgacacccacctgggcggtgaggacttcgacaaccgcatggtgagccacctggcggaggagttcaagcgcaagcacaagaaggacattgggcccaacaagcgcgccgtgaggcggctgcgcaccgcttgcgagcgcgccaagcgcaccctgagctcgtccacgcaggcgagcatcgagatcgactcgctctacgagggcgtggacttctatacgtccatcacgcgcgcccgcttcgaggagctcaatgccgacctctttcgcgggaccctggagccggtggagaaggcgctgcgcgacgccaagctggacaagggccagatccaggagatcgtgctggtgggcggctccactcgtatccccaagatccagaagctgctgcaggatttcttcaacggcaaggagctgaacaagagcatcaaccccgacgaggcggtggcctatggcgccgcggtgcaggcggccatcctcatcggcgacaaatcagagaatgtgcaggacctgctgctactcgacgtgaccccgttgtcgctgggcatcgagacagctggcggtgtcatgaccccactcatcaagaggaacaccacgatccccaccaagcagacgcagaccttcaccacctactcggacaaccagagcagcgtactggtgcaggtatacgagggcgaacgggccatgaccaaggacaataacctgctgggcaagttcgacctgaccgggattccccctgcgcctcgcggggtcccccaaatcgaggttaccttcgacattgacgccaatggcatccttaacgttaccgccgccgacaagagcaccggtaaggaaaacaaaatcaccatcaccaatgacaaaggtcgtctgagcaaggacgacattgaccggatggtgcaggaggcggagcggtacaaatcggaagatgaggcgaatcgcgaccgagtcgcggccaaaaacgccctggagtcctatacctacaacatcaagcagacggtggaagacgagaaactgaggggcaagattagcgagcaggacaaaaacaagatcctcgacaagtgtcaggaggtgatcaactggctcgaccgaaaccagatggcagagaaagatgagtatgaacacaagcagaaagagctcgaaagagtttgcaaccccatcatcagcaaactttaccaaggtggtcctggcggcggcagcggcggcggcggttcaggagcctccgggggacccaccatcgaagaagtggactaagcttgcactcaagtcagcgtaaacctctttgcctttctctctctctctttttttttgtttgtttctttgaaatgtccttgtgccaagtacgagatctattgttggaagtctttggtatatgcaaatgaaaggagaggtgcaacaacttagtttaattataaaagttccaaagtttgttttttaaaaacattattcgaggtttctctttaatgcattttgcgtgtttgctgacttgagcatttttgattagttcgtgcatggagatttgtttgagatgagaaaccttaagtttgcacacctgttctgtagaagcttggaaacagtaaaatatataggagcttaaattgtttatttttatgtactactttaaaactaaactgaacattgcagtaatgttaaggacaggtatactttttgcaaacaaatgcataaatgcaaatgtaaagtaaagctgaaattgatctc

SEQ ID NO: 13339 - DNA, 2464 bp, Homo sapiens
  source 1..2464: mol_type = unassigned DNA
ctctcttgcctgccgccatgtgcctttcgccttctgccgtgattgtgaggcctccccagccatatggaagttcaggatgtctgcccgtggcccggctatcggcatcgacctgggcaccacctattcgtgcgtcggggtcttccaacatggcaaggtggagatcatcgccaacgaccagggcaatcgcaccacccccagctacgtggccttcacggacaccgagcgcctcatcggcgacgccgccaagaaccaggtggccatgaaccccaccaacaccatcttcgacgccaagaggctgattggacggaaattcgaggatgccacagtgcagtcggatatgaaacactggccgttccgggtggtgagcgagggaggcaagcccaaagtgcaagtagagtacaagggggagaccaagaccttcttcccagaggagatatcctccatggtcctcacgaagatgaaggagatcgcggaagcctacctggggggcaaggtgcacagcgcggtcataacggtcccggcctatttcaacgactcgcagcgccaggccaccaaggacgcaggcaccatcacggggctcaatgtgctgcgcatcatcaacgagcccacggcggcggccatcgcctacggcctggacaagaagggctgcgcgggcggcgagaagaacgtgctcatctttgacctgggcggtggcactttcgacgtgtccatcctgaccatcgaggatggcatcttcgaggtgaagtccacggccggcgacacccacctgggcggtgaggacttcgacaaccgcatggtgagccacctggcggaggagttcaagcgcaagcacaagaaggacattgggcccaacaagcgcgccgtgaggcggctgcgcaccgcttgcgagcgcgccaagcgcaccctgagctcgtccacgcaggcgagcatcgagatcgactcgctctacgagggcgtggacttctatacgtccatcacgcgcgcccgcttcgaggagctcaatgccgacctctttcgcgggaccctggagccggtggagaaggcgctgcgcgacgccaagctggacaagggccagatccaggagatcgtgctggtgggcggctccactcgtatccccaagatccagaagctgctgcaggatttcttcaacggcaaggagctgaacaagagcatcaaccccgacgaggcggtggcctatggcgccgcggtgcaggcggccatcctcatcggcgacaaatcagagaatgtgcaggacctgctgctactcgacgtgaccccgttgtcgctgggcatcgagacagctggcggtgtcatgaccccactcatcaagaggaacaccacgatccccaccaagcagacgcagaccttcaccacctactcggacaaccagagcagcgtactggtgcaggtatacgagggcgaacgggccatgaccaaggacaataacctgctgggcaagttcgacctgaccgggattccccctgcgcctcgcggggtcccccaaatcgaggttaccttcgacattgacgccaatggcatccttaacgttaccgccgccgacaagagcaccggtaaggaaaacaaaatcaccatcaccaatgacaaaggtcgtctgagcaaggacgacattgaccggatggtgcaggaggcggagcggtacaaatcggaagatgaggcgaatcgcgaccgagtcgcggccaaaaacgccctggagtcctatacctacaacatcaagcagacggtggaagacgagaaactgaggggcaagattagcgagcaggacaaaaacaagatcctcgacaagtgtcaggaggtgatcaactggctcgaccgaaaccagatggcagagaaagatgagtatgaacacaagcagaaagagctcgaaagagtttgcaaccccatcatcagcaaactttaccaaggtggtcctggcggcggcagcggcggcggcggttcaggagcctccgggggacccaccatcgaagaagtggactaagcttgcactcaagtcagcgtaaacctctttgcctttctctctctctctttttttttgtttgtttctttgaaatgtccttgtgccaagtacgagatctattgttggaagtctttggtatatgcaaatgaaaggagaggtgcaacaacttagtttaattataaaagttccaaagtttgttttttaaaaacattattcgaggtttctctttaatgcattttgcgtgtttgctgacttgagcatttttgattagttcgtgcatggagatttgtttgagatgagaaaccttaagtttgcacacctgttctgtagaagcttggaaacagtaaaatatataggagcttaaattgtttatttttatgtactactttaaaactaaactgaacattgcagtaatgttaaggacaggtatactttttgcaaacaaatgcataaatgcaaatgtaaagtaaagctgaaattgatctcaaa

SEQ ID NO: 13340 - DNA, 1816 bp, Homo sapiens
  source 1..1816: mol_type = unassigned DNA
gagttgctggtagtgcccgtggtgcttggttcgaggtggccgttagttgactccgcggagttcatctccctggttttcccgtcctaacgtcgctcgcctttcagtcaggatgtctgcccgtggcccggctatcggcatcgacctgggcaccacctattcgtgcgtcggggtcttccaacatggcaaggtggagatcatcgccaacgaccagggcaatcgcaccacccccagctacgtggccttcacggacaccgagcgcctcatcggcgacgccgccaagaaccaggtggccatgaaccccaccaacaccatcttcgacgccaagaggctgattggacggaaattcgaggagctcaatgccgacctctttcgcgggaccctggagccggtggagaaggcgctgcgcgacgccaagctggacaagggccagatccaggagatcgtgctggtgggcggctccactcgtatccccaagatccagaagctgctgcaggatttcttcaacggcaaggagctgaacaagagcatcaaccccgacgaggcggtggcctatggcgccgcggtgcaggcggccatcctcatcggcgacaaatcagagaatgtgcaggacctgctgctactcgacgtgaccccgttgtcgctgggcatcgagacagctggcggtgtcatgaccccactcatcaagaggaacaccacgatccccaccaagcagacgcagaccttcaccacctactcggacaaccagagcagcgtactggtgcaggtatacgagggcgaacgggccatgaccaaggacaataacctgctgggcaagttcgacctgaccgggattccccctgcgcctcgcggggtcccccaaatcgaggttaccttcgacattgacgccaatggcatccttaacgttaccgccgccgacaagagcaccggtaaggaaaacaaaatcaccatcaccaatgacaaaggtcgtctgagcaaggacgacattgaccggatggtgcaggaggcggagcggtacaaatcggaagatgaggcgaatcgcgaccgagtcgcggccaaaaacgccctggagtcctatacctacaacatcaagcagacggtggaagacgagaaactgaggggcaagattagcgagcaggacaaaaacaagatcctcgacaagtgtcaggaggtgatcaactggctcgaccgaaaccagatggcagagaaagatgagtatgaacacaagcagaaagagctcgaaagagtttgcaaccccatcatcagcaaactttaccaaggtggtcctggcggcggcagcggcggcggcggttcaggagcctccgggggacccaccatcgaagaagtggactaagcttgcactcaagtcagcgtaaacctctttgcctttctctctctctctttttttttgtttgtttctttgaaatgtccttgtgccaagtacgagatctattgttggaagtctttggtatatgcaaatgaaaggagaggtgcaacaacttagtttaattataaaagttccaaagtttgttttttaaaaacattattcgaggtttctctttaatgcattttgcgtgtttgctgacttgagcatttttgattagttcgtgcatggagatttgtttgagatgagaaaccttaagtttgcacacctgttctgtagaagcttggaaacagtaaaatatataggagcttaaattgtttatttttatgtactactttaaaactaaactgaacattgcagtaatgttaaggacaggtatactttttgcaaacaaatgcataaatgcaaatgtaaagtaaagctgaaattgatctc

SEQ ID NO: 13341 - DNA, 4825 bp, Homo sapiens
  source 1..4825: mol_type = unassigned DNA
ctttcgtagctctggtgctgcggctccgctctcgtcgcaacgagatctttcgagatcttctccgcccccgctaccggcgcctcctctgcggccactgagccggagccggcctgagcagcgctctcggttgcagtacccactggaaggacttaggcgctcgcgtggacaccgcaagcccctcagtagcctcggcccaagaggcctgctttccactcgctagccccgccgggggtccgtgtcctgtctcggtggccggacccgggcccgagcccgagcagtagccggcgccatgtcggtggtgggcatagacctgggcttccagagctgctacgtcgctgtggcccgcgccggcggcatcgagactatcgctaatgagtatagcgaccgctgcacgccggcttgcatttcttttggtcctaagaatcgttcaattggagcagcagctaaaagccaggtaatttctaatgcaaagaacacagtccaaggatttaaaagattccatggccgagcattctctgatccatttgtggaggcagaaaaatctaaccttgcatatgatattgtgcagttgcctacaggattaacaggtataaaggtgacatatatggaggaagagcgaaattttaccactgagcaagtgactgccatgcttttgtccaaactgaaggagacagccgaaagtgttcttaagaagcctgtagttgactgtgttgtttcggttccttgtttctatactgatgcagaaagacgatcagtgatggatgcaacacagattgctggtcttaattgcttgcgattaatgaatgaaaccactgcagttgctcttgcatatggaatctataagcaggatcttcctgccttagaagagaaaccaagaaatgtagtttttgtagacatgggccactctgcttatcaagtttctgtatgtgcatttaatagaggaaaactgaaagttctggccactgcatttgacacgacattgggaggtagaaaatttgatgaagtgttagtaaatcacttctgtgaagaatttgggaagaaatacaagctagacattaagtccaaaatccgtgcattattacgactctctcaggagtgtgagaaactcaagaaattgatgagtgcaaatgcttcagatctccctttgagcattgaatgttttatgaatgatgttgatgtatctggaactatgaatagaggcaaatttctggagatgtgcaatgatctcttagctagagtggagccaccacttcgtagtgttttggaacaaaccaagttaaagaaagaagatatttatgcagtggagatagttggtggtgctacacgaatccctgcggtaaaagagaagatcagcaaatttttcggtaaagaacttagtacaacattaaatgctgatgaagctgtcactcgaggctgtgcattgcagtgtgccatcttatcgcctgctttcaaagtcagagaattttctatcactgatgtagtaccatatccaatatctctgagatggaattctccagctgaagaagggtcaagtgactgtgaagtcttttccaaaaatcatgctgctcctttctctaaagttcttacattttatagaaaggaacctttcactcttgaggcctactacagctctcctcaggatttgccctatccagatcctgctatagctcagttttcagttcagaaagtcactcctcagtctgatggctccagttcaaaagtgaaagtcaaagttcgagtaaatgtccatggcattttcagtgtgtccagtgcatctttagtggaggttcacaagtctgaggaaaatgaggagccaatggaaacagatcagaatgcaaaggaggaagagaagatgcaagtggaccaggaggaaccacatgttgaagagcaacagcagcagacaccagcagaaaataaggcagagtctgaagaaatggagacctctcaagctggatccaaggataaaaagatggaccaaccaccccaagccaagaaggcaaaagtgaagaccagtactgtggacctgccaatcgagaatcagctattatggcagatagacagagagatgctcaacttgtacattgaaaatgagggtaagatgatcatgcaggataaactggagaaggagcggaatgatgctaagaacgcagtggaggaatatgtgtatgaaatgagagacaagcttagtggtgaatatgagaagtttgtgagtgaagatgatcgtaacagttttactttgaaactggaagatactgaaaattggttgtatgaggatggagaagaccagccaaagcaagtttatgttgataagttggctgaattaaaaaatctaggtcaacctattaagatacgtttccaggaatctgaagaacgaccaaaattatttgaagaactagggaaacagatccaacagtatatgaaaataatcagctctttcaaaaacaaggaggaccagtatgatcatttggatgctgctgacatgacaaaggtagaaaaaagcacaaatgaagcaatggagtggatgaataacaagctaaatctgcagaacaagcagagtttgaccatggatccagttgtcaagtcaaaagagattgaagctaaaattaaggagctgacaagtacttgtagccctataatttcaaagcccaaacccaaagtggaacctccaaaagaggaacaaaaaaatgcagagcagaatggaccagtggatggacaaggagacaacccaggcccccaggctgctgagcagggtacagacacagctgtgccttcggattcagacaagaagcttcctgaaatggacattgattgattccaacacttgtttctattaaaacagactattataaagctttaagttgtcaactttgttctaaatatcaactagcgcaagtgaatactgaagatttcttagtcagtttttaggggattttcggggaggggaaataggtaatgtatggagcattttcacttctaaatagttagatacagaaattaagtgcattgtatctttttcataatggtactatttagaagcccagttagtcttactgagcttatgcttcactcctttatgtttaaccatgtgtctacaagaataagtttgttttggaaagttgagctatagctacagctctagctatccagcagacttttcattatgacttacatggcaggagctctaattatgctttaaaaatctgttgtggagattgctttaaatgctccctgcctggtgtggggatggggtccccctctttgtgagggctggagcatggcacggcatggattaacacggcagaggaacaaaggtgtgctctgagcttcttcatatttcaccttcaccctcacctgtgttctcttccctctctcccaataaaagggctcccattataaatgccatgtacttctcttgggaaaatagacccccttgcctagagtaagttgttaactgagggctttaaacctggaggctcttcctgaaagtatgttcatgaataccccaagcatcaaggtctaaataattttcagaagattagaattgggtagatatactgttggatatagccatggtaaatttaactgaggaattaaatccttgttaattttggtgtaaagatttgtatcctggcctgtttattcaggtgggagatgttctgtataattttgaggtatagcttgaactcctagaacaagagttaaaagttctttttagctcattcacaatcacttgtgtgttaagtgttaatatctgtcatgaacctgccaatttgtacgtgttaagcagctgacagatgatgcaaaaaaaactaagatacactggattgtactggatgagtctgaaattagtgttaaagaagtgtggtgcctgatgttataacaacacctcattcttaactgtgtggccaatgtcaggtataccaaagcattcctctgactgctttttggggcagtgttgacaggagtgaggcattttggaaactccaagggaagcctgtgtttgaggccagagttggtacctgctttaagaaactgttacagggcttgttggtaatgttttgaatctttgtaaaaattgatattctgtataacagagtgcctctctgttacttttggcctatgttgttagaaataagatgctatcttgcatagttagaattaagcgtttgtccatctctagataacattgaaaagtttgagtgttacaggctctaaagtgcaatggagaacaattgcttaggaggaggaaggggaaagtatacttatgttggtgtgtaagcatgcatggaggcctcgaggcaccacaacaaggccaggttcttagcacatcctctgttctctacctgtcatgcttcaagagttccagctggcctgctgtgaagccagtagctattttaaaagtgctggctgcaggattaagccaaccctttacaactggcccagaccgtaatggccatttcttcttaaaaaaaaaaaaattttttttttttttttttttttttttttttttttttttggtgtgtgtgtgtgtgtgtgtggggaagggtgtgggtgctgggatgggggtgaatttcaagttgaaacacgatgatgtggtctgcttgctctctgcttagacaggctttaagaccaattggattttcatggaggccaggacagagagtggtaattgatggcttgtgtacagacaagcatttatccaggttgcgttatccaaactgatttgttaaagctccaggtcacgttcttacactaagaaaatcattcagtaaacatgagacaagtttaggaaaaactaataaaataaacctgtcttaaacttgaa

SEQ ID NO: 13342 - DNA, 728 bp, Homo sapiens
  source 1..728: mol_type = unassigned DNA
gctctggtgctgcggctccgctctcgtcgcaacgagatctttcgagatcttctccgcccccgctaccggcgcctcctctgcggccactgagccggagccggcctgagcagcgctctcggttgcagtacccactggaaggacttaggcgctcgcgtggacaccgcaagcccctcagtagcctcggcccaagaggcctgctttccactcgctagccccgccgggggtccgtgtcctgtctcggtggccggacccgggcccgagcccgagcagtagccggcgccatgtcggtggtgggcatagacctgggcttccagagctgctacgtcgctgtggcccgcgccggcggcatcgagactatcgctaatgagtatagcgaccgctgcacgccggcttgcatttcttttggtcctaagaatcgttcaattggagcagcagctaaaagccaggtaatttctaatgcaaagaacacagtccaaggatttaaaagattccatggccgagcattctctgatccatttgtggaggcagaaaaatctaaccttgcatatgatattgtgcagttgcctacaggattaacaggtataaaggtgacatatatggaggaagagcagaatggaccagtggatggacaaggagacaacccaggcccccaggctgctgagcagggtacagacacagctgtgccttcggattcagacaagaagcttcctgaaatggacattgattga

SEQ ID NO: 13343 - DNA, 1703 bp, Homo sapiens
  source 1..1703: mol_type = unassigned DNA
gctctggtgctgcggctccgctctcgtcgcaacgagatctttcgagatcttctccgcccccgctaccggcgcctcctctgcggccactgagccggagccggcctgagcagcgctctcggttgcagtacccactggaaggacttaggcgctcgcgtggacaccgcaagcccctcagtagcctcggcccaagaggcctgctttccactcgctagccccgccgggggtccgtgtcctgtctcggtggccggacccgggcccgagcccgagcagtagccggcgccatgtcggtggtgggcatagacctgggcttccagagctgctacgtcgctgtggcccgcgccggcggcatcgagactatcgctaatgagtatagcgaccgctgcacgccggcttgcatttcttttggtcctaagaatcgttcaattggagcagcagctaaaagccaggtaatttctaatgcaaagaacacagtccaaggatttaaaagattccatggccgagcattctctgatccatttgtggaggcagaaaaatctaaccttgcatatgatattgtgcagttgcctacaggattaacaggtataaaggtgacatatatggaggaagagcgaaattttaccactgagcaagtgactgccatgcttttgtccaaactgaaggagacagccgaaagtgttcttaagaagcctgtagttgactgtgttgtttcggttccttgtttctatactgatgcagaaagacgatcagtgatggatgcaacacagattgctggtcttaattgcttgcgattaatgaatgaaaccactgcagttgctcttgcatatggaatctataagcaggatcttcctgccttagaagagaaaccaagaaatgtagtttttgtagacatgggccactctgcttatcaagtttctgtatgtgcatttaatagaggaaaactgaaagttctggccactgcatttgacacgacattgggaggtagaaaatttgatgaagtgttagtaaatcacttctgtgaagaatttgggaagaaatacaagctagacattaagtccaaaatccgtgcattattacgactctctcaggagtgtgagaaactcaagaaattgatgagtgcaaatgcttcagatctccctttgagcattgaatgttttatgaatgatgttgatgtatctggaactatgaatagaggcaaatttctggagatgtgcaatgatctcttagctagagtggagccaccacttcgtagtgttttggaacaaaccaagttaaagaaagaagatatttatgcagtggagatagttggtggtgctacacgaatccctgcggtaaaagagaagatcagcaaatttttcggtaaagaacttagtacaacattaaatgctgatgaagctgtcactcgaggctgtgcattgcagtgtgccatcttatcgcctgctttcaaagtcagagaattttctatcactgatgtagtaccatatccaatatctctgagatggaattctccagctgaagaagggtcaagtgactgtgaagtcttttccaaaaatcatgctgctcctttctctaaagttcttacattttatagaaaggaacctttcactcttgaggcctactacagctctcctggatttgccctatccagatcctgctatagcatcataaagtcactcctcagtctgatggctccagttcaaaagtga

SEQ ID NO: 13344 - DNA, 3908 bp, Homo sapiens
  source 1..3908: mol_type = unassigned DNA
acagcacagacagattgacctattggggtgtttcgcgagtgtgagagggaagcgccgcggcctgtatttctagacctgcccttcgcctggttcgtggcgccttgtgaccccgggcccctgccgcctgcaagtcggaaattgcgctgtgctcctgtgctacggcctgtggctggactgcctgctgctgcccaactggctggcaagatgaagctctccctggtggccgcgatgctgctgctgctcagcgcggcgcgggccgaggaggaggacaagaaggaggacgtgggcacggtggtcggcatcgacctggggaccacctactcctgcgtcggcgtgttcaagaacggccgcgtggagatcatcgccaacgatcagggcaaccgcatcacgccgtcctatgtcgccttcactcctgaaggggaacgtctgattggcgatgccgccaagaaccagctcacctccaaccccgagaacacggtctttgacgccaagcggctcatcggccgcacgtggaatgacccgtctgtgcagcaggacatcaagttcttgccgttcaaggtggttgaaaagaaaactaaaccatacattcaagttgatattggaggtgggcaaacaaagacatttgctcctgaagaaatttctgccatggttctcactaaaatgaaagaaaccgctgaggcttatttgggaaagaaggttacccatgcagttgttactgtaccagcctattttaatgatgcccaacgccaagcaaccaaagacgctggaactattgctggcctaaatgttatgaggatcatcaacgagcctacggcagctgctattgcttatggcctggataagagggagggggagaagaacatcctggtgtttgacctgggtggcggaaccttcgatgtgtctcttctcaccattgacaatggtgtcttcgaagttgtggccactaatggagatactcatctgggtggagaagactttgaccagcgtgtcatggaacacttcatcaaactgtacaaaaagaagacgggcaaagatgtcaggaaagacaatagagctgtgcagaaactccggcgcgaggtagaaaaggccaaacgggccctgtcttctcagcatcaagcaagaattgaaattgagtccttctatgaaggagaagacttttctgagaccctgactcgggccaaatttgaagagctcaacatggatctgttccggtctactatgaagcccgtccagaaagtgttggaagattctgatttgaagaagtctgatattgatgaaattgttcttgttggtggctcgactcgaattccaaagattcagcaactggttaaagagttcttcaatggcaaggaaccatcccgtggcataaacccagatgaagctgtagcgtatggtgctgctgtccaggctggtgtgctctctggtgatcaagatacaggtgacctggtactgcttgatgtatgtccccttacacttggtattgaaactgtgggaggtgtcatgaccaaactgattccaaggaacacagtggtgcctaccaagaagtctcagatcttttctacagcttctgataatcaaccaactgttacaatcaaggtctatgaaggtgaaagacccctgacaaaagacaatcatcttctgggtacatttgatctgactggaattcctcctgctcctcgtggggtcccacagattgaagtcacctttgagatagatgtgaatggtattcttcgagtgacagctgaagacaagggtacagggaacaaaaataagatcacaatcaccaatgaccagaatcgcctgacacctgaagaaatcgaaaggatggttaatgatgctgagaagtttgctgaggaagacaaaaagctcaaggagcgcattgatactagaaatgagttggaaagctatgcctattctctaaagaatcagattggagataaagaaaagctgggaggtaaactttcctctgaagataaggagaccatggaaaaagctgtagaagaaaagattgaatggctggaaagccaccaagatgctgacattgaagacttcaaagctaagaagaaggaactggaagaaattgttcaaccaattatcagcaaactctatggaagtgcaggccctcccccaactggtgaagaggatacagcagaaaaagatgagttgtagacactgatctgctagtgctgtaatattgtaaatactggactcaggaacttttgttaggaaaaaattgaaagaacttaagtctcgaatgtaattggaatcttcacctcagagtggagttgaaactgctatagcctaagcggctgtttactgcttttcattagcagttgctcacatgtctttgggtgggggggagaagaagaattggccatcttaaaaagcgggtaaaaaacctgggttagggtgtgtgttcaccttcaaaatgttctatttaacaactgggtcatgtgcatctggtgtaggaagttttttctaccataagtgacaccaataaatgtttgttatttacactggtctaatgtttgtgagaagcttctaattagatcaattacttattttaggaaatttaagactagatactcgtgtgtggggtgaggggagggagtatttggtatgttgggataaggaaacacttctatttaatgcttccagggatttttttttttttttttaaccctcctgggcccaagtgatccttccacctcagtctcccagctaattgagaccacaggcttgttaccaccatgctcggcttttgcattaatctaagaaaaggggagagaagttaatccacatctttactcaggcaaggggcatttcacagtgcccaagagtggggttttcttgaacatacttggtttcctatttccccttatctttctaaaactgcctttctggtggctttttttaaaattattactaatgatgcttttatagctgcttggattctctgagaaatgatggggagtgagtgatcactggtattaactttatacacttggatttcatttgtaactttaggatgtaaaggtatattgtgaaccctagctgtgtcagaatctccatccctgaaatttctcattagtggtactggggtgggatcttggatggtgacattgaaactacactaaatcccctcactatgaatgggttgttaaaggcaatggtttgtgtcaaaactggtttaggattacttagattgtgttcctgaagaaaagagtccaggtaaatggtatgatcaataaaggacaggctggtgctaacataaaatccaatattgtaatcctagcactttgggaggccaaggcgggtggatcacaaggtcaagagatagagaccatctttgccaacatggtgaaactccatctctactgaaaatacaaaaattagctgggcgtggtagtgcaagctgaaggctgaggcaggagaatcactcgaacccgggaggcagaggttgcagtgagccgagatcacaccactgtactccagcccggcactccagcctggcgacaagagtgagactccacctcaaaaaaaaaaaaaagaatccaatactgcccaaggataggtattttatagatgggcaactggctgaaaggttaattctctagggctagtagaactggatcccaacaccaaactcttaattagacctaggcctcagctgcactgcccgaaaagcatttgggcagaccctgagcagaatactggtctcaggccaagcccaatacagccattaaagatgacctacagtgctgtgtaccctggggcaatagggttaaatggtagttagcaactagggctagtcttcccttacctcaaaggctctcactaccgtggaccacctagtctgtaactctttctgaggagctgttactgaatattaaaaagatagacttcaa

SEQ ID NO: 13345 - DNA, 1141 bp, Homo sapiens
  source 1..1141: mol_type = unassigned DNA
gacgccggccaagacagcacagacagattgacctattggggtgtttcgcgagtgtgagagggaagcgccgcggcctgtatttctagacctgcccttcgcctggttcgtggcgccttgtgaccccgggcccctgccgcctgcaagtcggaaattgcgctgtgctcctgtgctacggcctgtggctggactgcctgctgctgcccaactggctggcaagatgaagctctccctggtggccgcgatgctgctgctgctcagcgcggcgcgggccgaggaggaggacaagaaggaggacgtgggcacggtggtcggcatcgacctggggaccacctactcctgcgtcggcgtgttcaagaacggccgcgtggagatcatcgccaacgatcagggcaaccgcatcacgccgtcctatgtcgccttcactcctgaaggggaacgtctgattggcgatgccgccaagaaccagctcacctccaaccccgagaacacggtctttgacgccaagcggctcatcggccgcacgtggaatgacccgtctgtgcagcaggacatcaagttcttgccgttcaaggtggttgaaaagaaaactaaaccatacattcaagttgatattggaggtgggcaaacaaagacatttgctcctgaagaaatttctgccatggttctcactaaaatgaaagaaaccgctgaggcttatttgggaaagaaggttacccatgcagttgttactgtaccagcctattttaatgatgcccaacgccaagcaaccaaagacgctggaactattgctggcctaaatgttatgaggatcatcaacgagcctacggcagctgctattgcttatggcctggataagagggagggggagaagaacatcctggtgtttgacctgggtggcggaaccttcgatgtgtctcttctcaccattgacaatggtgtcttcgaagttgtggccactaatggagatactcatctgggtggagaagactttgaccagcgtgtcatggaacacttcatcaaactgtacaaaaagaagacttttctgagaccctgactcgggccaaatttgaagagctcaacatggatctgttccggtctactatgaagcccgtccagaaagtgttggaagattctgatttga

SEQ ID NO: 13346 - DNA, 2646 bp, Homo sapiens
  source 1..2646: mol_type = unassigned DNA
agagccagcccggaggagctagaaccttccccgcatttctttcagcagcctgagtcagaggcgggctggcctggcgtagccgcccagcctcgcggctcatgccccgatctgcccgaaccttctcccggggtcagcgccgcgccgcgccacccggctgagtcagcccgggcgggcgagaggctctcaactgggcgggaaggtgcgggaaggtgcggaaaggttcgcgaaagttcgcggcggcgggggtcgggtgaggcgcaaaaggataaaaagccggtggaagcggagctgagcagatccgagccgggctggctgcagagaaaccgcagggagagcctcactgctgagcgcccctcgacggcggagcggcagcagcctccgtggcctccagcatccgacaagaagcttcagccatgcaggccccacgggagctcgcggtgggcatcgacctgggcaccacctactcgtgcgtgggcgtgtttcagcagggccgcgtggagatcctggccaacgaccagggcaaccgcaccacgcccagctacgtggccttcaccgacaccgagcggctggtcggggacgcggccaagagccaggcggccctgaacccccacaacaccgtgttcgatgccaagcggctgatcgggcgcaagttcgcggacaccacggtgcagtcggacatgaagcactggcccttccgggtggtgagcgagggcggcaagcccaaggtgcgcgtatgctaccgcggggaggacaagacgttctaccccgaggagatctcgtccatggtgctgagcaagatgaaggagacggccgaggcgtacctgggccagcccgtgaagcacgcagtgatcaccgtgcccgcctatttcaatgactcgcagcgccaggccaccaaggacgcgggggccatcgcggggctcaacgtgttgcggatcatcaatgagcccacggcagctgccatcgcctatgggctggaccggcggggcgcgggagagcgcaacgtgctcatttttgacctgggtgggggcaccttcgatgtgtcggttctctccattgacgctggtgtctttgaggtgaaagccactgctggagatacccacctgggaggagaggacttcgacaaccggctcgtgaaccacttcatggaagaattccggcggaagcatgggaaggacctgagcgggaacaagcgtgccctgcgcaggctgcgcacagcctgtgagcgcgccaagcgcaccctgtcctccagcacccaggccaccctggagatagactccctgttcgagggcgtggacttctacacgtccatcactcgtgcccgctttgaggaactgtgctcagacctcttccgcagcaccctggagccggtggagaaggccctgcgggatgccaagctggacaaggcccagattcatgacgtcgtcctggtggggggctccacacgcatccccaaggtgcagaagttgctgcaggacttcttcaacggcaaggagctgaacaagagcatcaaccctgatgaggctgtggcctatggggctgctgtgcaggcggccgtgttgatgggggacaaatgtgagaaagtgcaggatctcctgctgctggatgtggctcccctgtctctggggctggagacagcaggtggggtgatgaccacgctgatccagaggaacgccactatccccaccaagcagacccagactttcaccacctactcggacaaccagcctggggtcttcatccaggtgtatgagggtgagagggccatgaccaaggacaacaacctgctggggcgttttgaactcagtggcatccctcctgccccacgtggagtcccccagatagaggtgacttttgacattgatgctaatggcatcctgagcgtgacagccactgacaggagcacaggtaaggctaacaagatcaccatcaccaatgacaagggccggctgagcaaggaggaggtggagaggatggttcatgaagccgagcagtacaaggctgaggatgaggcccagagggacagagtggctgccaaaaactcgctggaggcccatgtcttccatgtgaaaggttctttgcaagaggaaagccttagggacaagattcccgaagaggacaggcgcaaaatgcaagacaagtgtcgggaagtccttgcctggctggagcacaaccagctggcagagaaggaggagtatgagcatcagaagagggagctggagcaaatctgtcgccccatcttctccaggctctatggggggcctggtgtccctgggggcagcagttgtggcactcaagcccgccagggggaccccagcaccggccccatcattgaggaggttgattgaatggcccttcgtgataagtcagctgtgactgtcagggctatgctatgggccttctagactgtcttctatgatcctgcccttcagagatgaactttccctccaaagctagaactttcttcccaggataactgaagtcttttgactttttgcggggagggcggttcatcctcttctgcttcaaataaaaagtcattaatttattaaaacttgtgtggcactttaacattgctttcacctatattttgtgtactttgttacttgcatgtatgaattttgttatgtaaaatatagttatagacct

SEQ ID NO: 13347 - DNA, 2176 bp, Homo sapiens
  source 1..2176: mol_type = unassigned DNA
cgagccgggctggctgcagagaaaccgcagggagagcctcactgctgagcgcccctcgacggcggagcggcagcagcctccgtggcctccagcatccgacaagaagcttcagccatgcaggccccacgggagctcgcggtgggcatcgacctgggcaccacctactcgtgcgtggccttcaccgacaccgagcggctggtcggggacgcggccaagagccaggcggccctgaacccccacaacaccgtgttcgatgccaagcggctgatcgggcgcaagttcgcggacaccacggtgcagtcggacatgaagcactggcccttccgggtggtgagcgagggcggcaagcccaaggtgcgcgtatgctaccgcggggaggacaagacgttctaccccgaggagatctcgtccatggtgctgagcaagatgaaggagacggccgaggcgtacctgggccagcccgtgaagcacgcagtgatcaccgtgcccgcctatttcaatgactcgcagcgccaggccaccaaggacgcgggggccatcgcggggctcaacgtgttgcggatcatcaatgagcccacggcagctgccatcgcctatgggctggaccggcggggcgcgggagagcgcaacgtgctcatttttgacctgggtgggggcaccttcgatgtgtcggttctctccattgacgctggtgtctttgaggtgaaagccactgctggagatacccacctgggaggagaggacttcgacaaccggctcgtgaaccacttcatggaagaattccggcggaagcatgggaaggacctgagcgggaacaagcgtgccctgcgcaggctgcgcacagcctgtgagcgcgccaagcgcaccctgtcctccagcacccaggccaccctggagatagactccctgttcgagggcgtggacttctacacgtccatcactcgtgcccgctttgaggaactgtgctcagacctcttccgcagcaccctggagccggtggagaaggccctgcgggatgccaagctggacaaggcccagattcatgacgtcgtcctggtggggggctccacacgcatccccaaggtgcagaagttgctgcaggacttcttcaacggcaaggagctgaacaagagcatcaaccctgatgaggctgtggcctatggggctgctgtgcaggcggccgtgttgatgggggacaaatgtgagaaagtgcaggatctcctgctgctggatgtggctcccctgtctctggggctggagacagcaggtggggtgatgaccacgctgatccagaggaacgccactatccccaccaagcagacccagactttcaccacctactcggacaaccagcctggggtcttcatccaggtgtatgagggtgagagggccatgaccaaggacaacaacctgctggggcgttttgaactcagtggcatccctcctgccccacgtggagtcccccagatagaggtgacttttgacattgatgctaatggcatcctgagcgtgacagccactgacaggagcacaggtaaggctaacaagatcaccatcaccaatgacaagggccggctgagcaaggaggaggtggagaggatggttcatgaagccgagcagtacaaggctgaggatgaggcccagagggacagagtggctgccaaaaactcgctggaggcccatgtcttccatgtgaaaggttctttgcaagaggaaagccttagggacaagattcccgaagaggacaggcgcaaaatgcaagacaagtgtcgggaagtccttgcctggctggagcacaaccagctggcagagaaggaggagtatgagcatcagaagagggagctggagcaaatctgtcgccccatcttctccaggctctatggggggcctggtgtccctgggggcagcagttgtggcactcaagcccgccagggggaccccagcaccggccccatcattgaggaggttgattgaatggcccttcgtgataagtcagctgtgactgtcagggctatgctatgggccttctagactgtcttctatgatcctgcccttcagagatgaactttccctccaaagctagaactttcttcccaggataactgaagtcttttgactttttgcggggagggcggttcatcctcttctgcttcaaataaaaagtcattaatttatt

SEQ ID NO: 13348 - DNA, 2186 bp, Homo sapiens
  source 1..2186: mol_type = unassigned DNA
cagcaaccatgtccaagggacctgcagttggtattgatcttggcaccacctactcttgtgtgggtgttttccagcacggaaaagtcgagataattgccaatgatcagggaaaccgaaccactccaagctatgtcgcctttacggacactgaacggttgatcggtgatgccgcaaagaatcaagttgcaatgaaccccaccaacacagtttttgatgccaaacgtctgattggacgcagatttgatgatgctgttgtccagtctgatatgaaacattggccctttatggtggtgaatgatgctggcaggcccaaggtccaagtagaatacaagggagagaccaaaagcttctatccagaggaggtgtcttctatggttctgacaaagatgaaggaaattgcagaagcctaccttgggaagactgttaccaatgctgtggtcacagtgccagcttactttaatgactctcagcgtcaggctaccaaagatgctggaactattgctggtctcaatgtacttagaattattaatgagccaactgctgctgctattgcttacggcttagacaaaaaggttggagcagaaagaaacgtgctcatctttgacctgggaggtggcacttttgatgtgtcaatcctcactattgaggatggaatctttgaggtcaagtctacagctggagacacccacttgggtggagaagattttgacaaccgaatggtcaaccattttattgctgagtttaagcgcaagcataagaaggacatcagtgagaacaagagagctgtaagacgcctccgtactgcttgtgaacgtgctaagcgtaccctctcttccagcacccaggccagtattgagatcgattctctctatgaaggaatcgacttctatacctccattacccgtgcccgatttgaagaactgaatgctgacctgttccgtggcaccctggacccagtagagaaagcccttcgagatgccaaactagacaagtcacagattcatgatattgtcctggttggtggttctactcgtatccccaagattcagaagcttctccaagacttcttcaatggaaaagaactgaataagagcatcaaccctgatgaagctgttgcttatggtgcagctgtccaggcagccatcttgtctggagacaagtctgagaatgttcaagatttgctgctcttggatgtcactcctctttcccttggtattgaaactgctggtggagtcatgactgtcctcatcaagcgtaataccaccattcctaccaagcagacacagaccttcactacctattctgacaaccagcctggtgtgcttattcaggtttatgaaggcgagcgtgccatgacaaaggataacaacctgcttggcaagtttgaactcacaggcatacctcctgcaccccgaggtgttcctcagattgaagtcacttttgacattgatgccaatggtatactcaatgtctctgctgtggacaagagtacgggaaaagagaacaagattactatcactaatgacaagggccgtttgagcaaggaagacattgaacgtatggtccaggaagctgagaagtacaaagctgaagatgagaagcagagggacaaggtgtcatccaagaattcacttgagtcctatgccttcaacatgaaagcaactgttgaagatgagaaacttcaaggcaagattaacgatgaggacaaacagaagattctggacaagtgtaatgaaattatcaactggcttgataagaatcagactgctgagaaggaagaatttgaacatcaacagaaagagctggagaaagtttgcaaccccatcatcaccaagctgtaccagagtgcaggaggcatgccaggaggaatgcctgggggatttcctggtggtggagctcctccctctggtggtgcttcctcagggcccaccattgaagaggttgattaagccaaccaagtgtagatgtagcattgttccacacatttaaaacatttgaaggacctaaattcgtagcaaattctgtggcagttttaaaaagttaagctgctatagtaagttactgggcattctcaatacttgaatatggaacatatgcacaggggaaggaaataacattgcactttataaacactgtattgtaagtggaaaatgcaatgtcttaaataaaactatttaaaattggca

SEQ ID NO: 13349 - DNA, 2004 bp, Homo sapiens
  source 1..2004: mol_type = unassigned DNA
atcgtgaggcggagcgcggtggggtgggtgcggaagggggcgaggcccgaggagtggagccgggcttgtgattgggtcttgtaagggcagccgggcgtctattggccggggaagccgtaatggcaggcagcaggggcgggccccttctggaaggttctaagatagggtataagaggcagggtggcgggcggaaaccggtctcattgaactcgcctgcagctcttgggttttttgtggcttccttcgttattggagccaggcctacaccccagcaaccatgtccaagggacctgcagttggtattgatcttggcaccacctactcttgtgtgggtgttttccagcacggaaaagtcgagataattgccaatgatcagggaaaccgaaccactccaagctatgtcgcctttacggacactgaacggttgatcggtgatgccgcaaagaatcaagttgcaatgaaccccaccaacacagtttttgatgccaaacgtctgattggacgcagatttgatgatgctgttgtccagtctgatatgaaacattggccctttatggtggtgaatgatgctggcaggcccaaggtccaagtagaatacaagggagagaccaaaagcttctatccagaggaggtgtcttctatggttctgacaaagatgaaggaaattgcagaagcctaccttgggaagactgttaccaatgctgtggtcacagtgccagcttactttaatgactctcagcgtcaggctaccaaagatgctggaactattgctggtctcaatgtacttagaattattaatgagccaactgctgctgctattgcttacggcttagacaaaaaggttggagcagaaagaaacgtgctcatctttgacctgggaggtggcacttttgatgtgtcaatcctcactattgaggatggaatctttgaggtcaagtctacagctggagacacccacttgggtggagaagattttgacaaccgaatggtcaaccattttattgctgagtttaagcgcaagcataagaaggacatcagtgagaacaagagagctgtaagacgcctccgtactgcttgtgaacgtgctaagcgtaccctctcttccagcacccaggccagtattgagatcgattctctctatgaaggaatcgacttctatacctccattacccgtgcccgatttgaagaactgaatgctgacctgttccgtggcaccctggacccagtagagaaagcccttcgagatgccaaactagacaagtcacagattcatgatattgtcctggttggtggttctactcgtatccccaagattcagaagcttctccaagacttcttcaatggaaaagaactgaataagagcatcaaccctgatgaagctgttgcttatggtgcagctgtccaggcagccatcttgtctggagacaagtctgagaatgttcaagatttgctgctcttggatgtcactcctctttcccttggtattgaaactgctggtggagtcatgactgtcctcatcaagcgtaataccaccattcctaccaagcagacacagaccttcactacctattctgacaaccagcctggtgtgcttattcaggtttatgaaggcgagcgtgccatgacaaaggataacaacctgcttggcaagtttgaactcacaggcatgccaggaggaatgcctgggggatttcctggtggtggagctcctccctctggtggtgcttcctcagggcccaccattgaagaggttgattaagccaaccaagtgtagatgtagcattgttccacacatttaaaacatttgaaggacctaaattcgtagcaaattctgtggcagttttaaaaagttaagctgctatagtaagttactgggcattctcaatacttgaatatggaacatatgcacaggggaaggaaataacattgcactttataaacactgtattgtaagtggaaaatgcaatgtcttaaataaaactatttaaaattggcaccatacaa

SEQ ID NO: 13350 - DNA, 1924 bp, Homo sapiens
  source 1..1924: mol_type = unassigned DNA
agcaaccatgtccaagggacctgcagttggtattgatcttggcaccacctactcttgtgtgggtgttttccagcacggaaaagtcgagataattgccaatgatcagggaaaccgaaccactccaagctatgtcgcctttacggacactgaacggttgatcggtgatgccgcaaagaatcaagttgcaatgaaccccaccaacacagtttttgatgccaaacgtctgattggacgcagatttgatgatgctgttgtccagtctgatatgaaacattggccctttatggtggtgaatgatgctggcaggcccaaggtccaagtagaatacaagggagagaccaaaagcttctatccagaggaggtgtcttctatggttctgacaaagatgaaggaaattgcagaagcctaccttgggaaggctaccaaagatgctggaactattgctggtctcaatgtacttagaattattaatgagccaactgctgctgctattgcttacggcttagacaaaaaggttggagcagaaagaaacgtgctcatctttgacctgggaggtggcacttttgatgtgtcaatcctcactattgaggatggaatctttgaggtcaagtctacagctggagacacccacttgggtggagaagattttgacaaccgaatggtcaaccattttattgctgagtttaagcgcaagcataagaaggacatcagtgagaacaagagagctgtaagacgcctccgtactgcttgtgaacgtgctaagcgtaccctctcttccagcacccaggccagtattgagatcgattctctctatgaaggaatcgacttctatacctccattacccgtgcccgatttgaagaactgaatgctgacctgttccgtggcaccctggacccagtagagaaagcccttcgagatgccaaactagacaagtcacagattcatgatattgtcctggttggtggttctactcgtatccccaagattcagaagcttctccaagacttcttcaatggaaaagaactgaataagagcatcaaccctgatgaagctgttgcttatggtgcagctgtccaggcagccatcttgtctggagacaagtctgagaatgttcaagatttgctgctcttggatgtcactcctctttcccttggtattgaaactgctggtggagtcatgactgtcctcatcaagcgtaataccaccattcctaccaagcagacacagaccttcactacctattctgacaaccagcctggtgtgcttattcaggtttatgaaggcgagcgtgccatgacaaaggataacaacctgcttggcaagtttgaactcacaggcatacctcctgcaccccgaggtgttcctcagattgaagtcacttttgacattgatgccaatggtatactcaatgtctctgctgtggacaagagtacgggaaaagagaacaagattactatcactaatgacaagggccgtttgagcaaggaagacattgaacgtatggtccaggaagctgagaagtacaaagctgaagatgagaagcagagggacaaggtgtcatccaagaattcacttgagtcctatgccttcaacatgaaagcaactgttgaagatgagaaacttcaaggcaagattaacgatgaggacaaacagaagattctggacaagtgtaatgaaattatcaactggcttgataagaatcagactgctgagaaggaagaatttgaacatcaacagaaagagctggagaaagtttgcaaccccatcatcaccaagctgtaccagagtgcaggaggcatgccaggaggaatgcctgggggatttcctggtggtggagctcctccctctggtggtgcttcctcagggcccaccattgaagaggttgattaagccaaccaagtgtagatgtagcattgttccaca

SEQ ID NO: 13351 - DNA, 2306 bp, Homo sapiens
  source 1..2306: mol_type = unassigned DNA
ggtttgcctggcgcgcggggaagtggagccagcgttttctttcacccagttccctgcttagtccagtcccaccgtggttcttcagagctgttcttggcgtgcttccagtatggggcaaccatgtccaagggacctgcagttggtattgatcttggcaccacctactcttgtgtgggtgttttccagcacggaaaagtcgagataattgccaatgatcagggaaaccgaaccactccaagctatgtcgcctttacggacactgaacggttgatcggtgatgccgcaaagaatcaagttgcaatgaaccccaccaacacagtttttgatgccaaacgtctgattggacgcagatttgatgatgctgttgtccagtctgatatgaaacattggccctttatggtggtgaatgatgctggcaggcccaaggtccaagtagaatacaagggagagaccaaaagcttctatccagaggaggtgtcttctatggttctgacaaagatgaaggaaattgcagaagcctaccttgggaagactgttaccaatgctgtggtcacagtgccagcttactttaatgactctcagcgtcaggctaccaaagatgctggaactattgctggtctcaatgtacttagaattattaatgagccaactgctgctgctattgcttacggcttagacaaaaaggttggagcagaaagaaacgtgctcatctttgacctgggaggtggcacttttgatgtgtcaatcctcactattgaggatggaatctttgaggtcaagtctacagctggagacacccacttgggtggagaagattttgacaaccgaatggtcaaccattttattgctgagtttaagcgcaagcataagaaggacatcagtgagaacaagagagctgtaagacgcctccgtactgcttgtgaacgtgctaagcgtaccctctcttccagcacccaggccagtattgagatcgattctctctatgaaggaatcgacttctatacctccattacccgtgcccgatttgaagaactgaatgctgacctgttccgtggcaccctggacccagtagagaaagcccttcgagatgccaaactagacaagtcacagattcatgatattgtcctggttggtggttctactcgtatccccaagattcagaagcttctccaagacttcttcaatggaaaagaactgaataagagcatcaaccctgatgaagctgttgcttatggtgcagctgtccaggcagccatcttgtctggagacaagtctgagaatgttcaagatttgctgctcttggatgtcactcctctttcccttggtattgaaactgctggtggagtcatgactgtcctcatcaagcgtaataccaccattcctaccaagcagacacagaccttcactacctattctgacaaccagcctggtgtgcttattcaggtttatgaaggcgagcgtgccatgacaaaggataacaacctgcttggcaagtttgaactcacaggcatacctcctgcaccccgaggtgttcctcagattgaagtcacttttgacattgatgccaatggtatactcaatgtctctgctgtggacaagagtacgggaaaagagaacaagattactatcactaatgacaagggccgtttgagcaaggaagacattgaacgtatggtccaggaagctgagaagtacaaagctgaagatgagaagcagagggacaaggtgtcatccaagaattcacttgagtcctatgccttcaacatgaaagcaactgttgaagatgagaaacttcaaggcaagattaacgatgaggacaaacagaagattctggacaagtgtaatgaaattatcaactggcttgataagaatcagactgctgagaaggaagaatttgaacatcaacagaaagagctggagaaagtttgcaaccccatcatcaccaagctgtaccagagtgcaggaggcatgccaggaggaatgcctgggggatttcctggtggtggagctcctccctctggtggtgcttcctcagggcccaccattgaagaggttgattaagccaaccaagtgtagatgtagcattgttccacacatttaaaacatttgaaggacctaaattcgtagcaaattctgtggcagttttaaaaagttaagctgctatagtaagttactgggcattctcaatacttgaatatggaacatatgcacaggggaaggaaataacattgcactttataaacactgtattgtaagtggaaaatgcaatgtcttaaataaaactatttaaaattggcaccatacaa

SEQ ID NO: 13352 - DNA, 1826 bp, Homo sapiens
  source 1..1826: mol_type = unassigned DNA
ctcattgaactcgcctgcagctcttgggttttttgtggcttccttcgttattggagccaggcctacaccccagcaaccatgtccaagggacctgcagttggtattgatcttggcaccacctactcttgtgtgggtgttttccagcacggaaaagtcgagataattgccaatgatcagggaaaccgaaccactccaagctatgtcgcctttacggacactgaacggttgatcggtgatgccgcaaagaatcaagttgcaatgaaccccaccaacacagtttttgatgccaaacgtctgattggacgcagatttgatgatgctgttgtccagtctgatatgaaacattggccctttatggtggtgaatgatgctggcaggcccaagcataagaaggacatcagtgagaacaagagagctgtaagacgcctccgtactgcttgtgaacgtgctaagcgtaccctctcttccagcacccaggccagtattgagatcgattctctctatgaaggaatcgacttctatacctccattacccgtgcccgatttgaagaactgaatgctgacctgttccgtggcaccctggacccagtagagaaagcccttcgagatgccaaactagacaagtcacagattcatgatattgtcctggttggtggttctactcgtatccccaagattcagaagcttctccaagacttcttcaatggaaaagaactgaataagagcatcaaccctgatgaagctgttgcttatggtgcagctgtccaggcagccatcttgtctggagacaagtctgagaatgttcaagatttgctgctcttggatgtcactcctctttcccttggtattgaaactgctggtggagtcatgactgtcctcatcaagcgtaataccaccattcctaccaagcagacacagaccttcactacctattctgacaaccagcctggtgtgcttattcaggtttatgaaggcgagcgtgccatgacaaaggataacaacctgcttggcaagtttgaactcacaggcatacctcctgcaccccgaggtgttcctcagattgaagtcacttttgacattgatgccaatggtatactcaatgtctctgctgtggacaagagtacgggaaaagagaacaagattactatcactaatgacaagggccgtttgagcaaggaagacattgaacgtatggtccaggaagctgagaagtacaaagctgaagatgagaagcagagggacaaggtgtcatccaagaattcacttgagtcctatgccttcaacatgaaagcaactgttgaagatgagaaacttcaaggcaagattaacgatgaggacaaacagaagattctggacaagtgtaatgaaattatcaactggcttgataagaatcagactgctgagaaggaagaatttgaacatcaacagaaagagctggagaaagtttgcaaccccatcatcaccaagctgtaccagagtgcaggaggcatgccaggaggaatgcctgggggatttcctggtggtggagctcctccctctggtggtgcttcctcagggcccaccattgaagaggttgattaagccaaccaagtgtagatgtagcattgttccacacatttaaaacatttgaaggacctaaattcgtagcaaattctgtggcagttttaaaaagttaagctgctatagtaagttactgggcattctcaatacttgaatatggaacatatgcacaggggaaggaaataacattgcactttataaacactgtattgtaagtggaaaatgcaatgtcttaaataaaactatttaaaattggcaccatacaa

SEQ ID NO: 13353 - DNA, 1884 bp, Homo sapiens
  source 1..1884: mol_type = unassigned DNA
tacattttggtggggggggtgctccagctgttctttcaccagcattaatccatttgctggagtttgcatatatgtaagtataatagttaccaatctgtggtcttttccttattcctagactgttaccaatgctgtggtcacagtgccagcttactttaatgactctcagcgtcaggctaccaaagatgctggaactattgctggtctcaatgtacttagaattattaatgagccaactgctgctgctattgcttacggcttagacaaaaaggttggagcagaaagaaacgtgctcatctttgacctgggaggtggcacttttgatgtgtcaatcctcactattgaggatggaatctttgaggtcaagtctacagctggagacacccacttgggtggagaagattttgacaaccgaatggtcaaccattttattgctgagtttaagcgcaagcataagaaggacatcagtgagaacaagagagctgtaagacgcctccgtactgcttgtgaacgtgctaagcgtaccctctcttccagcacccaggccagtattgagatcgattctctctatgaaggaatcgacttctatacctccattacccgtgcccgatttgaagaactgaatgctgacctgttccgtggcaccctggacccagtagagaaagcccttcgagatgccaaactagacaagtcacagattcatgatattgtcctggttggtggttctactcgtatccccaagattcagaagcttctccaagacttcttcaatggaaaagaactgaataagagcatcaaccctgatgaagctgttgcttatggtgcagctgtccaggcagccatcttgtctggagacaagtctgagaatgttcaagatttgctgctcttggatgtcactcctctttcccttggtattgaaactgctggtggagtcatgactgtcctcatcaagcgtaataccaccattcctaccaagcagacacagaccttcactacctattctgacaaccagcctggtgtgcttattcaggtttatgaaggcgagcgtgccatgacaaaggataacaacctgcttggcaagtttgaactcacaggcatacctcctgcaccccgaggtgttcctcagattgaagtcacttttgacattgatgccaatggtatactcaatgtctctgctgtggacaagagtacgggaaaagagaacaagattactatcactaatgacaagggccgtttgagcaaggaagacattgaacgtatggtccaggaagctgagaagtacaaagctgaagatgagaagcagagggacaaggtgtcatccaagaattcacttgagtcctatgccttcaacatgaaagcaactgttgaagatgagaaacttcaaggcaagattaacgatgaggacaaacagaagattctggacaagtgtaatgaaattatcaactggcttgataagaatcagactgctgagaaggaagaatttgaacatcaacagaaagagctggagaaagtttgcaaccccatcatcaccaagctgtaccagagtgcaggaggcatgccaggaggaatgcctgggggatttcctggtggtggagctcctccctctggtggtgcttcctcagggcccaccattgaagaggttgattaagccaaccaagtgtagatgtagcattgttccacacatttaaaacatttgaaggacctaaattcgtagcaaattctgtggcagttttaaaaagttaagctgctatagtaagttactgggcattctcaatacttgaatatggaacatatgcacaggggaaggaaataacattgcactttataaacactgtattgtaagtggaaaatgcaatgtcttaaataaaactatttaaaattggc

SEQ ID NO: 13354 - DNA, 2463 bp, Homo sapiens
  source 1..2463: mol_type = unassigned DNA
atcgtgaggcggagcgcggtggggtgggtgcggaagggggcgaggcccgaggagtggagccgggcttgtgattgggtcttgtaagggcagccgggcgtctattggccggggaagccgtaatggcaggcagcaggggcgggccccttctggaaggttctaagatagggtataagaggcagggtggcgggcggaaaccggtctcattgaactcgcctgcagctcttgggttttttgtggcttccttcgttattggagccaggcctacaccccagcaaccatgtccaagggacctgcagttggtattgatcttggcaccacctactcttgtgtgggtgttttccagcacggaaaagtcgagataattgccaatgatcagggaaaccgaaccactccaagctatgtcgcctttacggacactgaacggttgatcggtgatgccgcaaagaatcaagttgcaatgaaccccaccaacacagtttttgatgccaaacgtctgattggacgcagatttgatgatgctgttgtccagtctgatatgaaacattggccctttatggtggtgaatgatgctggcaggcccaaggtccaagtagaatacaagggagagaccaaaagcttctatccagaggaggtgtcttctatggttctgacaaagatgaaggaaattgcagaagcctaccttgggaagactgttaccaatgctgtggtcacagtgccagcttactttaatgactctcagcgtcaggctaccaaagatgctggaactattgctggtctcaatgtacttagaattattaatgagccaactgctgctgctattgcttacggcttagacaaaaaggttggagcagaaagaaacgtgctcatctttgacctgggaggtggcacttttgatgtgtcaatcctcactattgaggatggaatctttgaggtcaagtctacagctggagacacccacttgggtggagaagattttgacaaccgaatggtcaaccattttattgctgagtttaagcgcaagcataagaaggacatcagtgagaacaagagagctgtaagacgcctccgtactgcttgtgaacgtgctaagcgtaccctctcttccagcacccaggccagtattgagatcgattctctctatgaaggaatcgacttctatacctccattacccgtgcccgatttgaagaactgaatgctgacctgttccgtggcaccctggacccagtagagaaagcccttcgagatgccaaactagacaagtcacagattcatgatattgtcctggttggtggttctactcgtatccccaagattcagaagcttctccaagacttcttcaatggaaaagaactgaataagagcatcaaccctgatgaagctgttgcttatggtgcagctgtccaggcagccatcttgtctggagacaagtctgagaatgttcaagatttgctgctcttggatgtcactcctctttcccttggtattgaaactgctggtggagtcatgactgtcctcatcaagcgtaataccaccattcctaccaagcagacacagaccttcactacctattctgacaaccagcctggtgtgcttattcaggtttatgaaggcgagcgtgccatgacaaaggataacaacctgcttggcaagtttgaactcacaggcatacctcctgcaccccgaggtgttcctcagattgaagtcacttttgacattgatgccaatggtatactcaatgtctctgctgtggacaagagtacgggaaaagagaacaagattactatcactaatgacaagggccgtttgagcaaggaagacattgaacgtatggtccaggaagctgagaagtacaaagctgaagatgagaagcagagggacaaggtgtcatccaagaattcacttgagtcctatgccttcaacatgaaagcaactgttgaagatgagaaacttcaaggcaagattaacgatgaggacaaacagaagattctggacaagtgtaatgaaattatcaactggcttgataagaatcagactgctgagaaggaagaatttgaacatcaacagaaagagctggagaaagtttgcaaccccatcatcaccaagctgtaccagagtgcaggaggcatgccaggaggaatgcctgggggatttcctggtggtggagctcctccctctggtggtgcttcctcagggcccaccattgaagaggttgattaagccaaccaagtgtagatgtagcattgttccacacatttaaaacatttgaaggacctaaattcgtagcaaattctgtggcagttttaaaaagttaagctgctatagtaagttactgggcattctcaatacttgaatatggaacatatgcacaggggaaggaaataacattgcactttataaacactgtattgtaagtggaaaatgcaatgtcttaaataaaactatttaaaattggcaccatacaa

SEQ ID NO: 13355 - DNA, 3321 bp, Homo sapiens
  source 1..3321: mol_type = unassigned DNA
gtgaccaacccccgcccctcaccccacgtggttggaggtttccagaagcgctgccgccaccgcatcgcgcagctctttgccgtcggagcgcttgtttgctgcctcgtactcctccatttatccgccatgataagtgccagccgagctgcagcagcccgtctcgtgggcgccgcagcctcccggggccctacggccgcccgccaccaggatagctggaatggccttagtcatgaggcttttagacttgtttcaaggcgggattatgcatcagaagcaatcaagggagcagttgttggtattgatttgggtactaccaactcctgcgtggcagttatggaaggtaaacaagcaaaggtgctggagaatgccgaaggtgccagaaccaccccttcagttgtggcctttacagcagatggtgagcgacttgttggaatgccggccaagcgacaggctgtcaccaacccaaacaatacattttatgctaccaagcgtctcattggccggcgatatgatgatcctgaagtacagaaagacattaaaaatgttccctttaaaattgtccgtgcctccaatggtgatgcctgggttgaggctcatgggaaattgtattctccgagtcagattggagcatttgtgttgatgaagatgaaagagactgcagaaaattacttggggcacacagcaaaaaatgctgtgatcacagtcccagcttatttcaatgactcgcagagacaggccactaaagatgctggccagatatctggactgaatgtgcttcgggtgattaatgagcccacagctgctgctcttgcctatggtctagacaaatcagaagacaaagtcattgctgtatatgatttaggtggtggaacttttgatatttctatcctggaaattcagaaaggagtatttgaggtgaaatccacaaatggggataccttcttaggtggggaagactttgaccaggccttgctacggcacattgtgaaggagttcaagagagagacaggggttgatttgactaaagacaacatggcacttcagagggtacgggaagctgctgaaaaggctaaatgtgaactctcctcatctgtgcagactgacatcaatttgccctatcttacaatggattcttctggacccaagcatttgaatatgaagttgacccgtgctcaatttgaagggattgtcactgatctaatcagaaggactatcgctccatgccaaaaagctatgcaagatgcagaagtcagcaagagtgacataggagaagtgattcttgtgggtggcatgactaggatgcccaaggttcagcagactgtacaggatctttttggcagagccccaagtaaagctgtcaatcctgatgaggctgtggccattggagctgccattcagggaggtgtgttggccggcgatgtcacggatgtgctgctccttgatgtcactcccctgtctctgggtattgaaactctaggaggtgtctttaccaaacttattaataggaataccactattccaaccaagaagagccaggtattctctactgccgctgatggtcaaacgcaagtggaaattaaagtgtgtcagggtgaaagagagatggctggagacaacaaactccttggacagtttactttgattggaattccaccagcccctcgtggagttcctcagattgaagttacatttgacattgatgccaatgggatagtacatgtttctgctaaagataaaggcacaggacgtgagcagcagattgtaatccagtcttctggtggattaagcaaagatgatattgaaaatatggttaaaaatgcagagaaatatgctgaagaagaccggcgaaagaaggaacgagttgaagcagttaatatggctgaaggaatcattcacgacacagaaaccaagatggaagaattcaaggaccaattacctgctgatgagtgcaacaagctgaaagaagagatttccaaaatgagggagctcctggctagaaaagacagcgaaacaggagaaaatattagacaggcagcatcctctcttcagcaggcatcactgaagctgttcgaaatggcatacaaaaagatggcatctgagcgagaaggctctggaagttctggcactggggaacaaaaggaagatcaaaaggaggaaaaacagtaataatagcagaaattttgaagccagaaggacaacatatgaagcttaggagtgaagagacttcctgagcagaaatgggcgaacttcagtctttttactgtgtttttgcagtattctatatataatttccttaatttgtaaatttagtgaccattagctagtgatcatttaatggacagtgattctaacagtataaagttcacaatattctatgtccctagcctgtcatttttcagctgcatgtaaaaggaggtaggatgaattgatcattataaagatttaactattttatgctgaagtgaccatattttcaaggggtgaaaccatctcgcacacagcaatgaaggtagtcatccatagacttgaaatgagaccacatatggggatgagatccttctagttagcctagtactgctgtactggcctgtatgtacatggggtccttcaactgaggccttgcaagtcaagctggctgtgccatgtttgtagatggggcagaggaatctagaacaatgggaaacttagctatttatattaggtacagctattaaaacaaggtaggaatgaggctagacctttaacttccctaaggcatacttttctagctaccttctgccctgtgtctggcacctacatccttgatgattgttctcttacccattctggaatttttttttttttaaataaatacagaaagcatcttgatctcttgtttgtgaggggtgatgccctgagatttagcttcaagaatatgccatggctcatgcttcccatatttcccaaagagggaaatacaggatttgctaacactggttaaaaatgcaaattcaagatttggaagggctgttataatgaaataatgagcagtatcagcatgtgcaaatcttgtttgaaggattttattttctccccttagacctttggtacatttagaatcttgaaagtttctagatctctaacatgaaagtttctagatctctaacatgaaagtttttagatctctaacatgaaaaccaaggtggctattttcaggttgctttcagctccaagtagaaataaccagaattggcttacattaaagaaactgcatctagaaataagtcctaagatactatttctatggctcaaaaataaaaggaacccagatttctttcccta

SEQ ID NO: 13356 - DNA, 2260 bp, Homo sapiens
  source 1..2260: mol_type = unassigned DNA
ctctttgccgtcggagcgcttgtttgctgcctcgtactcctccatttatccgccatgataagtgccagccgagctgcagccgcccgccaccaggatagctggaatggccttagtcatgaggcttttagacttgtttcaaggcgggattatgcatcagaagcaatcaagggagcagttgttggtattgatttgggtactaccaactcctgcgtggcagttatggaaggtaaacaagcaaaggtgctggagaatgccgaaggtgccagaaccaccccttcagttgtggcctttacagcagatggtgagcgacttgttggaatgccggccaagcgacaggctgtcaccaacccaaacaatacattttatgctaccaagcgtctcattggccggcgatatgatgatcctgaagtacagaaagacattaaaaatgttccctttaaaattgtccgtgcctccaatggtgatgcctgggttgaggctcatgggaaattgtattctccgagtcagattggagcatttgtgttgatgaagatgaaagagactgcagaaaattacttggggcacacagcaaaaaatgctgtgatcacagtcccagcttatttcaatgactcgcagagacaggccactaaagatgctggccagatatctggactgaatgtgcttcgggtgattaatgagcccacagctgctgctcttgcctatggtctagacaaatcagaagacaaagtcattgctgtatatgatttaggtggtggaacttttgatatttctatcctggaaattcagaaaggagtatttgaggtgaaatccacaaatggggataccttcttaggtggggaagactttgaccaggccttgctacggcacattgtgaaggagttcaagagagagacaggggttgatttgactaaagacaacatggcacttcagagggtacgggaagctgctgaaaaggctaaatgtgaactctcctcatctgtgcagactgacatcaatttgccctatcttacaatggattcttctggacccaagcatttgaatatgaagttgacccgtgctcaatttgaagggattgtcactgatctaatcagaaggactatcgctccatgccaaaaagctatgcaagatgcagaagtcagcaagagtgacataggagaagtgattcttgtgggtggcatgactaggatgcccaaggttcagcagactgtacaggatctttttggcagagccccaagtaaagctgtcaatcctgatgaggctgtggccattggagctgccattcagggaggtgtgttggccggcgatgtcacggatgtgctgctccttgatgtcactcccctgtctctgggtattgaaactctaggaggtgtctttaccaaacttattaataggaataccactattccaaccaagaagagccaggtattctctactgccgctgatggtcaaacgcaagtggaaattaaagtgtgtcagggtgaaagagagatggctggagacaacaaactccttggacagtttactttgattggaattccaccagcccctcgtggagttcctcagattgaagttacatttgacattgatgccaatgggatagtacatgtttctgctaaagataaaggcacaggacgtgagcagcagattgtaatccagtcttctggtggattaagcaaagatgatattgaaaatatggttaaaaatgcagagaaatatgctgaagaagaccggcgaaagaaggaacgagttgaagcagttaatatggctgaaggaatcattcacgacacagaaaccaagatggaagaattcaaggaccaattacctgctgatgagtgcaacaagctgaaagaagagatttccaaaatgagggagctcctggctagaaaagacagcgaaacaggagaaaatattagacaggcagcatcctctcttcagcaggcatcactgaagctgttcgaaatggcatacaaaaagatggcatctgagcgagaaggctctggaagttctggcactggggaacaaaaggaagatcaaaaggaggaaaaacagtaataatagcagaaattttgaagccagaaggacaacatatgaagcttaggagtgaagagacttcctgagcagaaatgggcgaacttcagtctttttactgtgtttttgcagtattctatatataatttccttaatttgtaaatttagtgaccattagctagtgatcatttaatggacagtgattctaacagtataaagttcacaatattct

SEQ ID NO: 13357 - DNA, 2733 bp, Homo sapiens
  source 1..2733: mol_type = unassigned DNA
ggagcgcttgtttgctgcctcgtactcctccatttatccgccatgataagtgccagccgagctgcagcagcccgtctcgtgggcgccgcagcctcccggggccctacggccgcccgccaccaggatagctggaatggccttagtcatgaggcttttagacttgtttcaaggcgggattatgcatcagaagcaatcaagggagcagttgttggtattgatttgggtactaccaactcctgcgtggcagttatggaaggtaaacaagcaaaggtgctggagaatgccgaaggtgccagaaccaccccttcagttgtggcctttacagcagatggtgagcgacttgttggaatgccggccaagcgacaggctgtcaccaacccaaacaatacattttatgctaccaagcgtctcattggccggcgatatgatgatcctgaagtacagaaagacattaaaaatgttccctttaaaattgtccgtgcctccaatggtgatgcctgtgttgatgaagatgaaagagactgcagaaaattacttggggcacacagcaaaaaatgctgtgatcacagtcccagcttatttcaatgactcgcagagacaggccactaaagatgctggccagatatctggactgaatgtgcttcgggtgattaatgagcccacagctgctgctcttgcctatggtctagacaaatcagaagacaaagtcattgctgtatatgatttaggtggtggaacttttgatatttctatcctggaaattcagaaaggagtatttgaggtgaaatccacaaatggggataccttcttaggtggggaagactttgaccaggccttgctacggcacattgtgaaggagttcaagagagagacaggggttgatttgactaaagacaacatggcacttcagagggtacgggaagctgctgaaaaggctaaatgtgaactctcctcatctgtgcagactgacatcaatttgccctatcttacaatggattcttctggacccaagcatttgaatatgaagttgacccgtgctcaatttgaagggattgtcactgatctaatcagaaggactatcgctccatgccaaaaagctatgcaagatgcagaagtcagcaagagtgacataggagaagtgattcttgtgggtggcatgactaggatgcccaaggttcagcagactgtacaggatctttttggcagagccccaagtaaagctgtcaatcctgatgaggctgtggccattggagctgccattcagggaggtgtgttggccggcgatgtcacggatgtgctgctccttgatgtcactcccctgtctctgggtattgaaactctaggaggtgtctttaccaaacttattaataggaataccactattccaaccaagaagagccaggtattctctactgccgctgatggtcaaacgcaagtggaaattaaagtgtgtcagggtgaaagagagatggctggagacaacaaactccttggacagtttactttgattggaattccaccagcccctcgtggagttcctcagattgaagttacatttgacattgatgccaatgggatagtacatgtttctgctaaagataaaggcacaggacgtgagcagcagattgtaatccagtcttctggtggattaagcaaagatgatattgaaaatatggttaaaaatgcagagaaatatgctgaagaagaccggcgaaagaaggaacgagttgaagcagttaatatggctgaaggaatcattcacgacacagaaaccaagatggaagaattcaaggaccaattacctgctgatgagtgcaacaagctgaaagaagagatttccaaaatgagggagctcctggctagaaaagacagcgaaacaggagaaaatattagacaggcagcatcctctcttcagcaggcatcactgaagctgttcgaaatggcatacaaaaagatggcatctgagcgagaaggctctggaagttctggcactggggaacaaaaggaagatcaaaaggaggaaaaacagtaataatagcagaaattttgaagccagaaggacaacatatgaagcttaggagtgaagagacttcctgagcagaaatgggcgaacttcagtctttttactgtgtttttgcagtattctatatataatttccttaatttgtaaatttagtgaccattagctagtgatcatttaatggacagtgattctaacagtataaagttcacaatattctatgtccctagcctgtcatttttcagctgcatgtaaaaggaggtaggatgaattgatcattataaagatttaactattttatgctgaagtgaccatattttcaaggggtgaaaccatctcgcacacagcaatgaaggtagtcatccatagacttgaaatgagaccacatatggggatgagatccttctagttagcctagtactgctgtactggcctgtatgtacatggggtccttcaactgaggccttgcaagtcaagctggctgtgccatgtttgtagatggggcagaggaatctagaacaatgggaaacttagctatttatattaggtacagctattaaaacaaggtaggaatgaggctagacctttaacttccctaaggcatacttttctagctaccttctgccctgtgtctggcacctacatccttgatgattgttctcttacccattctggaatttttttttttttaaataaatacagaaagcatcttg

SEQ ID NO: 13358 - DNA, 2582 bp, Homo sapiens
  source 1..2582: mol_type = unassigned DNA
ggcacgcagtagctctctcgagtcactccggcgcagtgttgggactgtctgggtatcggaaagcaagcctacgttgctcactattacgtataatccttttcttttcaagatttttattttagatgcctgaggaagtgcaccatggagaggaggaggtggagacttttgcctttcaggcagaaattgcccaactcatgtccctcatcatcaataccttctattccaacaaggagattttccttcgggagttgatctctaatgcttctgatgccttggacaagattcgctatgagagcctgacagacccttcgaagttggacagtggtaaagagctgaaaattgacatcatccccaaccctcaggaacgtaccctgactttggtagacacaggcattggcatgaccaaagctgatctcataaataatttgggaaccattgccaagtctggtactaaagcattcatggaggctcttcaggctggtgcagacatctccatgattgggcagtttggtgttggcttttattctgcctacttggtggcagagaaagtggttgtgatcacaaagcacaacgatgatgaacagtatgcttgggagtcttctgctggaggttccttcactgtgcgtgctgaccatggtgagcccattggcaggggtaccaaagtgatcctccatcttaaagaagatcagacagagtacctagaagagaggcgggtcaaagaagtagtgaagaagcattctcagttcataggctatcccatcaccctttatttggagaaggaacgagagaaggaaattagtgatgatgaggcagaggaagagaaaggtgagaaagaagaggaagataaagatgatgaagaaaaacccaagatcgaagatgtgggttcagatgaggaggatgacagcggtaaggataagaagaagaaaactaagaagatcaaagagaaatacattgatcaggaagaactaaacaagaccaagcctatttggaccagaaaccctgatgacatcacccaagaggagtatggagaattctacaagagcctcactaatgactgggaagaccacttggcagtcaagcacttttctgtagaaggtcagttggaattcagggcattgctatttattcctcgtcgggctccctttgacctttttgagaacaagaagaaaaagaacaacatcaaactctatgtccgccgtgtgttcatcatggacagctgtgatgagttgataccagagtatctcaattttatccgtggtgtggttgactctgaggatctgcccctgaacatctcccgagaaatgctccagcagagcaaaatcttgaaagtcattcgcaaaaacattgttaagaagtgccttgagctcttctctgagctggcagaagacaaggagaattacaagaaattctatgaggcattctctaaaaatctcaagcttggaatccacgaagactccactaaccgccgccgcctgtctgagctgctgcgctatcatacctcccagtctggagatgagatgacatctctgtcagagtatgtttctcgcatgaaggagacacagaagtccatctattacatcactggtgagagcaaagagcaggtggccaactcagcttttgtggagcgagtgcggaaacggggcttcgaggtggtatatatgaccgagcccattgacgagtactgtgtgcagcagctcaaggaatttgatgggaagagcctggtctcagttaccaaggagggtctggagctgcctgaggatgaggaggagaagaagaagatggaagagagcaaggcaaagtttgagaacctctgcaagctcatgaaagaaatcttagataagaaggttgagaaggtgacaatctccaatagacttgtgtcttcaccttgctgcattgtgaccagcacctacggctggacagccaatatggagcggatcatgaaagcccaggcacttcgggacaactccaccatgggctatatgatggccaaaaagcacctggagatcaaccctgaccaccccattgtggagacgctgcggcagaaggctgaggccgacaagaatgataaggcagttaaggacctggtggtgctgctgtttgaaaccgccctgctatcttctggcttttcccttgaggatccccagacccactccaaccgcatctatcgcatgatcaagctaggtctaggtattgatgaagatgaagtggcagcagaggaacccaatgctgcagttcctgatgagatcccccctctcgagggcgatgaggatgcgtctcgcatggaagaagtcgattaggttaggagttcatagttggaaaacttgtgcccttgtatagtgtccccatgggctcccactgcagcctcgagtgcccctgtcccacctggctccccctgctggtgtctagtgtttttttccctctcctgtccttgtgttgaaggcagtaaactaagggtgtcaagccccattccctctctactcttgacagcaggattggatgttgtgtattgtggtttattttattttcttcattttgttctgaaattaaagtatgcaaaataaagaatatgccgtttttataca

SEQ ID NO: 13359 - DNA, 2674 bp, Homo sapiens
  source 1..2674: mol_type = unassigned DNA
gtgcccggatgctggggcgagggagggtgcactgcggcgccccctcctcgcgtggtcctggccgacgcatgtccggcagtgacgagtgtcggcctggtggctacggccaccatctttcttgggtttggtcctgttctgtaattttgtgctgtgaaagggtcgtggtggagcttttggcttaagaattctttgtccggatttaattgctcctccgatgcctgaggaagtgcaccatggagaggaggaggtggagacttttgcctttcaggcagaaattgcccaactcatgtccctcatcatcaataccttctattccaacaaggagattttccttcgggagttgatctctaatgcttctgatgccttggacaagattcgctatgagagcctgacagacccttcgaagttggacagtggtaaagagctgaaaattgacatcatccccaaccctcaggaacgtaccctgactttggtagacacaggcattggcatgaccaaagctgatctcataaataatttgggaaccattgccaagtctggtactaaagcattcatggaggctcttcaggctggtgcagacatctccatgattgggcagtttggtgttggcttttattctgcctacttggtggcagagaaagtggttgtgatcacaaagcacaacgatgatgaacagtatgcttgggagtcttctgctggaggttccttcactgtgcgtgctgaccatggtgagcccattggcaggggtaccaaagtgatcctccatcttaaagaagatcagacagagtacctagaagagaggcgggtcaaagaagtagtgaagaagcattctcagttcataggctatcccatcaccctttatttggagaaggaacgagagaaggaaattagtgatgatgaggcagaggaagagaaaggtgagaaagaagaggaagataaagatgatgaagaaaaacccaagatcgaagatgtgggttcagatgaggaggatgacagcggtaaggataagaagaagaaaactaagaagatcaaagagaaatacattgatcaggaagaactaaacaagaccaagcctatttggaccagaaaccctgatgacatcacccaagaggagtatggagaattctacaagagcctcactaatgactgggaagaccacttggcagtcaagcacttttctgtagaaggtcagttggaattcagggcattgctatttattcctcgtcgggctccctttgacctttttgagaacaagaagaaaaagaacaacatcaaactctatgtccgccgtgtgttcatcatggacagctgtgatgagttgataccagagtatctcaattttatccgtggtgtggttgactctgaggatctgcccctgaacatctcccgagaaatgctccagcagagcaaaatcttgaaagtcattcgcaaaaacattgttaagaagtgccttgagctcttctctgagctggcagaagacaaggagaattacaagaaattctatgaggcattctctaaaaatctcaagcttggaatccacgaagactccactaaccgccgccgcctgtctgagctgctgcgctatcatacctcccagtctggagatgagatgacatctctgtcagagtatgtttctcgcatgaaggagacacagaagtccatctattacatcactggtgagagcaaagagcaggtggccaactcagcttttgtggagcgagtgcggaaacggggcttcgaggtggtatatatgaccgagcccattgacgagtactgtgtgcagcagctcaaggaatttgatgggaagagcctggtctcagttaccaaggagggtctggagctgcctgaggatgaggaggagaagaagaagatggaagagagcaaggcaaagtttgagaacctctgcaagctcatgaaagaaatcttagataagaaggttgagaaggtgacaatctccaatagacttgtgtcttcaccttgctgcattgtgaccagcacctacggctggacagccaatatggagcggatcatgaaagcccaggcacttcgggacaactccaccatgggctatatgatggccaaaaagcacctggagatcaaccctgaccaccccattgtggagacgctgcggcagaaggctgaggccgacaagaatgataaggcagttaaggacctggtggtgctgctgtttgaaaccgccctgctatcttctggcttttcccttgaggatccccagacccactccaaccgcatctatcgcatgatcaagctaggtctaggtattgatgaagatgaagtggcagcagaggaacccaatgctgcagttcctgatgagatcccccctctcgagggcgatgaggatgcgtctcgcatggaagaagtcgattaggttaggagttcatagttggaaaacttgtgcccttgtatagtgtccccatgggctcccactgcagcctcgagtgcccctgtcccacctggctccccctgctggtgtctagtgtttttttccctctcctgtccttgtgttgaaggcagtaaactaagggtgtcaagccccattccctctctactcttgacagcaggattggatgttgtgtattgtggtttattttattttcttcattttgttctgaaattaaagtatgcaaaataaagaatatgccgtttttataca

SEQ ID NO: 13360 - DNA, 1616 bp, Homo sapiens
  source 1..1616: mol_type = unassigned DNA
ctctcgagtcactccggcgcagtgttgggactgtctgggtatcggaaagcaagcctacgttgctcactattacgtataatccttttcttttcaagatgcctgaggaagtgcaccatggagaggaggaggtggagacttttgcctttcaggcagaaattgcccaactcatgtccctcatcatcaataccttctattccaacaaggagattttccttcgggagttgatctctaatgcttctgatgccttggacaagattcgctatgagagcctgacagacccttcgaagttggacagtggtaaagagctgaaaattgacatcatccccaaccctcaggaacgtaccctgactttggtagacacaggcattggcatgaccaaagctgatctcataaataatttgggaaccattgccaagtctggtactaaagcattcatggaggctcttcagtttggtgttggcttttattctgcctacttggtggcagagaaagtggttgtgatcacaaagcacaacgatgatgaacagtatgcttgggagtcttctgctggaggttccttcactgtgcgtgctgaccatggtgagcccattggcaggggtaccaaagtgatcctccatcttaaagaagatcagacagagtacctagaagagaggcgggtcaaagaagtagtgaagaagcattctcagttcataggctatcccatcaccctttatttggagaaggaacgagagaaggaaattagtgatgatgaggcagaggaagagaaaggtgagaaagaagaggaagataaagatgatgaagaaaaacccaagatcgaagatgtgggttcagatgaggaggatgacagcggtaaggataagaagaagaaaactaagaagatcaaagagaaatacattgatcaggaagaactaaacaagaccaagcctatttggaccagaaaccctgatgacatcacccaagaggagtatggagaattctacaagagcctcactaatgactgggaagaccacttggcagtcaagcacttttctgtagaaggtcagttggaattcagggcattgctatttattcctcgtcgggctccctttgacctttttgagaacaagaagaaaaagaacaacatcaaactctatgtccgccgtgtgttcatcatggacagctgtgatgagttgataccagagtatctcaattttatccgtggtgtggttgactctgaggatctgcccctgaacatctcccgagaaatgctccagcagagcaaaatcttgaaagtcattcgcaaaaacattgttaagaagtgccttgagctcttctctgagctggcagaagacaaggagaattacaagaaattctatgaggcattctctaaaaatctcaagcttggaatccacgaagactccactaaccgccgccgcctgtctgagctgctgcgctatcatacctcccagtctggagatgagatgacatctctgtcagagtatgtttctcgcatgaaggagacacagaagtccatctattacatcactggtgagagcaaagagcaggtgtgcccctgtcccacctggctccccctgctggtgtctagtgtttttttccctctcctgtccttgtgttga

SEQ ID NO: 13361 - DNA, 1640 bp, Homo sapiens
  source 1..1640: mol_type = unassigned DNA
ctctcgagtcactccggcgcagtgttgggactgtctgggtatcggaaagcaagcctacgttgctcactattacgtataatccttttcttttcaagatgcctgaggaagtgcaccatggagaggaggaggtggagacttttgcctttcaggcagaaattgcccaactcatgtccctcatcatcaataccttctattccaacaaggagattttccttcgggagttgatctctaatgcttctgatgccttggacaagattcgctatgagagcctgacagacccttcgaagttggacagtggtaaagagctgaaaattgacatcatccccaaccctcaggaacgtaccctgactttggtagacacaggcattggcatgaccaaagctgatctcataaataatttgggaaccattgccaagtctggtactaaagcattcatggaggctcttcagtttggtgttggcttttattctgcctacttggtggcagagaaagtggttgtgatcacaaagcacaacgatgatgaacagtatgcttgggagtcttctgctggaggttccttcactgtgcgtgctgaccatggtgagcccattggcaggggtaccaaagtgatcctccatcttaaagaagatcagacagagtacctagaagagaggcgggtcaaagaagtagtgaagaagcattctcagttcataggctatcccatcaccctttatttggagaaggaacgagagaaggaaattagtgatgatgaggcagaggaagagaaaggtgagaaagaagaggaagataaagatgatgaagaaaaacccaagatcgaagatgtgggttcagatgaggaggatgacagcggtaaggataagaagaagaaaactaagaagatcaaagagaaatacattgatcaggaagaactaaacaagaccaagcctatttggaccagaaaccctgatgacatcacccaagaggagtatggagaattctacaagagcctcactaatgactgggaagaccacttggcagtcaagcacttttctgtagaaggtcagttggaattcagggcattgctatttattcctcgtcgggctccctttgacctttttgagaacaagaagaaaaagaacaacatcaaactctatgtccgccgtgtgttcatcatggacagctgtgatgagttgataccagagtatctcaattttatccgtggtgtggttgactctgaggatctgcccctgaacatctcccgagaaatgctccagcagagcaaaatcttgaaagtcattcgcaaaaacattgttaagaagtgccttgagctcttctctgagctggcagaagacaaggagaattacaagaaattctatgaggcattctctaaaaatctcaagcttggaatccacgaagactccactaaccgccgccgcctgtctgagctgctgcgctatcatacctcccagtctggagatgagatgacatctctgtcagagtatgtttctcgcatgaaggagacacagaagtccatctattacatcactggtgagagcaaagagcaggtggccaactcagcttttgtggagcgatgcccctgtcccacctggctccccctgctggtgtctagtgtttttttccctctcctgtccttgtgttga

SEQ ID NO: 13362 - DNA, 1703 bp, Homo sapiens
  source 1..1703: mol_type = unassigned DNA
ctctcgagtcactccggcgcagtgttgggactgtctgggtatcggaaagcaagcctacgttgctcactattacgtataatccttttcttttcaagatgcctgaggaagtgcaccatggagaggaggaggtggagacttttgcctttcaggcagaaattgcccaactcatgtccctcatcatcaataccttctattccaacaaggagattttccttcgggagttgatctctaatgcttctgatgccttggacaagattcgctatgagagcctgacagacccttcgaagttggacagtggtaaagagctgaaaattgacatcatccccaaccctcaggaacgtaccctgactttggtagacacaggcattggcatgaccaaagctgatctcataaataatttgggaaccattgccaagtctggtactaaagcattcatggaggctcttcagtttggtgttggcttttattctgcctacttggtggcagagaaagtggttgtgatcacaaagcacaacgatgatgaacagtatgcttgggagtcttctgctggaggttccttcactgtgcgtgctgaccatggtgagcccattggcaggggtaccaaagtgatcctccatcttaaagaagatcagacagagtacctagaagagaggcgggtcaaagaagtagtgaagaagcattctcagttcataggctatcccatcaccctttatttggagaaggaacgagagaaggaaattagtgatgatgaggcagaggaagagaaaggtgagaaagaagaggaagataaagatgatgaagaaaaacccaagatcgaagatgtgggttcagatgaggaggatgacagcggtaaggataagaagaagaaaactaagaagatcaaagagaaatacattgatcaggaagaactaaacaagaccaagcctatttggaccagaaaccctgatgacatcacccaagaggagtatggagaattctacaagagcctcactaatgactgggaagaccacttggcagtcaagcacttttctgtagaaggtcagttggaattcagggcattgctatttattcctcgtcgggctccctttgacctttttgagaacaagaagaaaaagaacaacatcaaactctatgtccgccgtgtgttcatcatggacagctgtgatgagttgataccagagtatctcaattttatccgtggtgtggttgactctgaggatctgcccctgaacatctcccgagaaatgctccagcagagcaaaatcttgaaagtcattcgcaaaaacattgttaagaagtgccttgagctcttctctgagctggcagaagacaaggagaattacaagaaattctatgaggcattctctaaaaatctcaagcttggaatccacgaagactccactaaccgccgccgcctgtctgagctgctgcgctatcatacctcccagtctggagatgagatgacatctctgtcagagtatgtttctcgcatgaaggagacacagaagtccatctattacatcactggctccccctgctggtgtctagtgtttttttccctctcctgtccttgtgttgaaggcagtaaactaagggtgtcaagccccattccctctctactcttgacagcaggattggatgttgtgtattgtggtttattttattttcttcattttgttctgaaattaaagtatgcaaaataa

SEQ ID NO: 13363 - DNA, 2569 bp, Homo sapiens
  source 1..2569: mol_type = unassigned DNA
ggcacgcagtagctctctcgagtcactccggcgcagtgttgggactgtctgggtatcggaaagcaagcctacgttgctcactattacgtataatccttttcttttcaagatgcctgaggaagtgcaccatggagaggaggaggtggagacttttgcctttcaggcagaaattgcccaactcatgtccctcatcatcaataccttctattccaacaaggagattttccttcgggagttgatctctaatgcttctgatgccttggacaagattcgctatgagagcctgacagacccttcgaagttggacagtggtaaagagctgaaaattgacatcatccccaaccctcaggaacgtaccctgactttggtagacacaggcattggcatgaccaaagctgatctcataaataatttgggaaccattgccaagtctggtactaaagcattcatggaggctcttcaggctggtgcagacatctccatgattgggcagtttggtgttggcttttattctgcctacttggtggcagagaaagtggttgtgatcacaaagcacaacgatgatgaacagtatgcttgggagtcttctgctggaggttccttcactgtgcgtgctgaccatggtgagcccattggcaggggtaccaaagtgatcctccatcttaaagaagatcagacagagtacctagaagagaggcgggtcaaagaagtagtgaagaagcattctcagttcataggctatcccatcaccctttatttggagaaggaacgagagaaggaaattagtgatgatgaggcagaggaagagaaaggtgagaaagaagaggaagataaagatgatgaagaaaaacccaagatcgaagatgtgggttcagatgaggaggatgacagcggtaaggataagaagaagaaaactaagaagatcaaagagaaatacattgatcaggaagaactaaacaagaccaagcctatttggaccagaaaccctgatgacatcacccaagaggagtatggagaattctacaagagcctcactaatgactgggaagaccacttggcagtcaagcacttttctgtagaaggtcagttggaattcagggcattgctatttattcctcgtcgggctccctttgacctttttgagaacaagaagaaaaagaacaacatcaaactctatgtccgccgtgtgttcatcatggacagctgtgatgagttgataccagagtatctcaattttatccgtggtgtggttgactctgaggatctgcccctgaacatctcccgagaaatgctccagcagagcaaaatcttgaaagtcattcgcaaaaacattgttaagaagtgccttgagctcttctctgagctggcagaagacaaggagaattacaagaaattctatgaggcattctctaaaaatctcaagcttggaatccacgaagactccactaaccgccgccgcctgtctgagctgctgcgctatcatacctcccagtctggagatgagatgacatctctgtcagagtatgtttctcgcatgaaggagacacagaagtccatctattacatcactggtgagagcaaagagcaggtggccaactcagcttttgtggagcgagtgcggaaacggggcttcgaggtggtatatatgaccgagcccattgacgagtactgtgtgcagcagctcaaggaatttgatgggaagagcctggtctcagttaccaaggagggtctggagctgcctgaggatgaggaggagaagaagaagatggaagagagcaaggcaaagtttgagaacctctgcaagctcatgaaagaaatcttagataagaaggttgagaaggtgacaatctccaatagacttgtgtcttcaccttgctgcattgtgaccagcacctacggctggacagccaatatggagcggatcatgaaagcccaggcacttcgggacaactccaccatgggctatatgatggccaaaaagcacctggagatcaaccctgaccaccccattgtggagacgctgcggcagaaggctgaggccgacaagaatgataaggcagttaaggacctggtggtgctgctgtttgaaaccgccctgctatcttctggcttttcccttgaggatccccagacccactccaaccgcatctatcgcatgatcaagctaggtctaggtattgatgaagatgaagtggcagcagaggaacccaatgctgcagttcctgatgagatcccccctctcgagggcgatgaggatgcgtctcgcatggaagaagtcgattaggttaggagttcatagttggaaaacttgtgcccttgtatagtgtccccatgggctcccactgcagcctcgagtgcccctgtcccacctggctccccctgctggtgtctagtgtttttttccctctcctgtccttgtgttgaaggcagtaaactaagggtgtcaagccccattccctctctactcttgacagcaggattggatgttgtgtattgtggtttattttattttcttcattttgttctgaaattaaagtatgcaaaataaagaatatgccgtttttataca

SEQ ID NO: 13364 - DNA, 573 bp, Homo sapiens
  source 1..573: mol_type = unassigned DNA
attttatccgtggtgtggttgactctgaggatctgcccctgaacatctcccgagaaatgctccagcagagcaaaatcttgaaagtcattcgcaaaaacattgttaagaagtgccttgagctcttctctgagctggcagaagacaaggagaattacaagaaattctatgaggcattctctaaaaatctcaagcttggaatccacgaagactccactaaccgccgccgcctgtctgagctgctgcgctatcatacctcccagtctggagatgagatgacatctctgtcagagtatgtttctcgcatgaaggagacacagaagtccatctattacatcactggtgagagcaaagagcaggtgtgcccctgtcccacctggctccccctgctggtgtctagtgtttttttccctctcctgtccttgtgttgaaggcagtaaactaagggtgtcaagccccattccctctctactcttgacagcaggattggatgttgtgtattgtggtttattttattttcttcattttgttctgaaattaaagtatgcaaaataaagaatatgccgtttttataca

SEQ ID NO: 13365 - DNA, 597 bp, Homo sapiens
  source 1..597: mol_type = unassigned DNA
attttatccgtggtgtggttgactctgaggatctgcccctgaacatctcccgagaaatgctccagcagagcaaaatcttgaaagtcattcgcaaaaacattgttaagaagtgccttgagctcttctctgagctggcagaagacaaggagaattacaagaaattctatgaggcattctctaaaaatctcaagcttggaatccacgaagactccactaaccgccgccgcctgtctgagctgctgcgctatcatacctcccagtctggagatgagatgacatctctgtcagagtatgtttctcgcatgaaggagacacagaagtccatctattacatcactggtgagagcaaagagcaggtggccaactcagcttttgtggagcgatgcccctgtcccacctggctccccctgctggtgtctagtgtttttttccctctcctgtccttgtgttgaaggcagtaaactaagggtgtcaagccccattccctctctactcttgacagcaggattggatgttgtgtattgtggtttattttattttcttcattttgttctgaaattaaagtatgcaaaataaagaatatgccgtttttataca

SEQ ID NO: 13366 - DNA, 536 bp, Homo sapiens
  source 1..536: mol_type = unassigned DNA
attttatccgtggtgtggttgactctgaggatctgcccctgaacatctcccgagaaatgctccagcagagcaaaatcttgaaagtcattcgcaaaaacattgttaagaagtgccttgagctcttctctgagctggcagaagacaaggagaattacaagaaattctatgaggcattctctaaaaatctcaagcttggaatccacgaagactccactaaccgccgccgcctgtctgagctgctgcgctatcatacctcccagtctggagatgagatgacatctctgtcagagtatgtttctcgcatgaaggagacacagaagtccatctattacatcactggctccccctgctggtgtctagtgtttttttccctctcctgtccttgtgttgaaggcagtaaactaagggtgtcaagccccattccctctctactcttgacagcaggattggatgttgtgtattgtggtttattttattttcttcattttgttctgaaattaaagtatgcaaaataaagaatatgccgtttttataca

SEQ ID NO: 13367 - DNA, 613 bp, Homo sapiens
  source 1..613: mol_type = unassigned DNA
ggcacgcagtagctctctcgagtcactccggcgcagtgttgggactgtctgggtatcggaaagcaagcctacgttgctcactattacgtataatccttttcttttcaagatgcctgaggaagtgcaccatggagaggaggaggtggagacttttgcctttcaggcagaaattgcccaactcatgtccctcatcatcaataccttctattccaacaaggagattttccttcgggagttgatctctaatgcttctgatgccttggacaagattcgctatgagagcctgacagacccttcgaagttggacagtggtaaagagctgaaaattgacatctccatgattgggcagtttggtgttggcttttattctgcctacttggtggcagagaaagtggttgtgatcacaaagcacaacgatgatgaacagtatgcttgggagtcttctgctggaggttccttcactgtgcgtgctgaccatggtgagcccattggcaggggtaccaaagtgatcctccatcttaaagaagatcagacagagtacctagaagagaggcgggtcaaagaagtagtgaagaagcattctcagttcataggctatcccatcaccctttat

SEQ ID NO: 13368 - DNA, 1634 bp, Homo sapiens
  source 1..1634: mol_type = unassigned DNA
gaccaatgaaagagaggaaacagaagtacccggagggaggtgtttcaggattggctgggacgactgcctgcccgacagggcgtgtttgattggagaacctgccgagtgtagcagtaattggcaagaccgtgcaccaatgggaaggatctgaggctgggcttgcggttaggaggggcactgcaacgcggaggagcaggatggagatccctgtgcctgtgcagccgtcttggctgcgccgcgcctcggccccgttgcccggactttcggcgcccggacgcctctttgaccagcgcttcggcgaggggctgctggaggccgagctggctgcgctctgccccaccacgctcgccccctactacctgcgcgcacccagcgtggcgctgcccgtcgcccaggtgccgacggaccccggccacttttcggtgctgctagacgtgaagcacttctcgccggaggaaattgctgtcaaggtggtgggcgaacacgtggaggtgcacgcgcgccacgaggagcgcccggatgagcacggattcgtcgcgcgcgagttccaccgtcgctaccgcctgccgcctggcgtggatccggctgccgtgacgtccgcgctgtcccccgagggcgtcctgtccatccaggccgcaccagcgtcggcccaggccccaccgccagccgcagccaagtaggagggggctgggccgcgcccgcaccccgggagcctcctcaggctccctctattaaagccgatctgactccgcccagccagatgtcccgagtgcgccaaggactgtcctctcacccactcctggattctgccctgacctccatcctggacactgccttgataacatagacccttccactgacaccctcgctctcacaccccctccagctttccgaccccacaccgacaactccccggcttccagaccctaccagcactaccctaaccctcagccgacagtctcagccccaccgacccactttcttggcatatagccccacttaagacccctcctctacttccttctgagtcctctacaaagacatccgggtactacatttccatcccttccctattttgacaccaaattatggtgtagacagccctcccccaaccccaggccagtcaggcacaatccccccaccccccaaacgtcctggactgcacagacctcccactccagaccatccaggcctggttcccaagacccgatccttcccctgcaaccagacagtctacaactgccccctccagcccattttctgccgtgaaaccccagccagccacaccagactctggaaccctttttcgactgccccaactcttggacaccaggccaactagaacacccaacaccaaactgtacagactctcccaccccaacctccccagactctgcacggatgtcctaggccccctccccaactctaaccagaccccatccccctaagtccctttgtcttgacccccaagtcttcaaccagatatcctcggcaacccacctcccaccctcctcctcttctccttcaagacccaactgagcacccgctctgattccccacagcctttctccctgccaccactcccttagtctttcccaggcttactctcccaataaatgtgctagagctctgcc

SEQ ID NO: 13369 - DNA, 1457 bp, Homo sapiens
  source 1..1457: mol_type = unassigned DNA
actgcaacgcggaggagcaggatggagatccctgtgcctgtgcagccgtcttggctgcgccgcgcctcggccccgttgcccggactttcggcgcccggacgcctctttgaccagcgcttcggcgaggggctgctggaggccgagctggctgcgctctgccccaccacgctcgccccctactacctgcgcgcacccagcgtggcgctgcccgtcgcccaggtgccgacggaccccggccacttttcggtgctgctagacgtgaagcacttctcgccggaggaaattgctgtcaaggtggtgggcgaacacgtggaggtgcacgcgcgccacgaggagcgcccggatgagcacggattcgtcgcgcgcgagttccaccgtcgctaccgcctgccgcctggcgtggatccggctgccgtgacgtccgcgctgtcccccgagggcgtcctgtccatccaggccgcaccagcgtcggcccaggccccaccgccagccgcagccaagtaggagggggctgggccgcgcccgcaccccgggagcctcctcaggctccctctattaaagccgatctgactccgcccagccagatgtcccgagtgcgccaaggactgtcctctcacccactcctggattctgccctgacctccatcctggacactgccttgataacatagacccttccactgacaccctcgctctcacaccccctccagctttccgaccccacaccgacaactccccggcttccagaccctaccagcactaccctaaccctcagccgacagtctcagccccaccgacccactttcttggcatatagccccacttaagacccctcctctacttccttctgagtcctctacaaagacatccgggtactacatttccatcccttccctattttgacaccaaattatggtgtagacagccctcccccaaccccaggccagtcaggcacaatccccccaccccccaaacgtcctggactgcacagacctcccactccagaccatccaggcctggttcccaagacccgatccttcccctgcaaccagacagtctacaactgccccctccagcccattttctgccgtgaaaccccagccagccacaccagactctggaaccctttttcgactgccccaactcttggacaccaggccaactagaacacccaacaccaaactgtacagactctcccaccccaacctccccagactctgcacggatgtcctaggccccctccccaactctaaccagaccccatccccctaagtccctttgtcttgacccccaagtcttcaaccagatatcctcggcaacccacctcccaccctcctcctcttctccttcaagacccaactgagcacccgctctgattccccacagcctttctccctgccaccactcccttagtctttcccaggcttactctcccaataaatgtgctagagctctgc

SEQ ID NO: 13370 - DNA, 1391 bp, Homo sapiens
  source 1..1391: mol_type = unassigned DNA
aacgcggaggagcaggatggagatccctgtgcctgtgcagccgtcttggctgcgccgcgcctcggccccgttgcccggactttcggcgcccggacgcctctttgaccagcgcttcggcgaggggctgctggaggccgagctggctgcgctctgccccaccacgctcgccccctactacctgcgcgcacccagcgtggcgctgcccgtcgcccaggtgccgacggaccccggccacttttcggtgctgctagacgtgaagcacttctcgccggaggaaattgctgtcaaggtggtgggcgaacacgtggaggtgcacgcgcgccacgaggagcgcccggatgagcacggattcgtcgcgcgcgagttccaccgtcgctaccgcctgccgcctggcgtggatccggctgccgtgacgtccgcgctgtcccccgagggcgtcctgtccatccaggccgcaccagcaccccgggagcctcctcaggctccctctattaaagccgatctgactccgcccagccagatgtcccgagtgcgccaaggactgtcctctcacccactcctggattctgccctgacctccatcctggacactgccttgataacatagacccttccactgacaccctcgctctcacaccccctccagctttccgaccccacaccgacaactccccggcttccagaccctaccagcactaccctaaccctcagccgacagtctcagccccaccgacccactttcttggcatatagccccacttaagacccctcctctacttccttctgagtcctctacaaagacatccgggtactacatttccatcccttccctattttgacaccaaattatggtgtagacagccctcccccaaccccaggccagtcaggcacaatccccccaccccccaaacgtcctggactgcacagacctcccactccagaccatccaggcctggttcccaagacccgatccttcccctgcaaccagacagtctacaactgccccctccagcccattttctgccgtgaaaccccagccagccacaccagactctggaaccctttttcgactgccccaactcttggacaccaggccaactagaacacccaacaccaaactgtacagactctcccaccccaacctccccagactctgcacggatgtcctaggccccctccccaactctaaccagaccccatccccctaagtccctttgtcttgacccccaagtcttcaaccagatatcctcggcaacccacctcccaccctcctcctcttctccttcaagacccaactgagcacccgctctgattccccacagcctttctccctgccaccactcccttagtctttcccaggcttactctcccaataaatgtgctagagctct

SEQ ID NO: 13371 - DNA, 2142 bp, Homo sapiens
  source 1..2142: mol_type = unassigned DNA
cgcgcccgttgcaagatggcggcggccatgctgggccccggggctgtgtgtgcgcagcgggcggcggcgcggcccggaaggctggcgcggcgacggcgttagcccggccctcggcccctctttgcggccgctccctccgcctattccctccttgctcgagatggatctgcccgtgggccccggcgcggcggggcccagcaacgtcccggccttcctgaccaagctgtggaccctcgtgagcgacccggacaccgacgcgctcatctgctggagcccgagcgggaacagcttccacgtgttcgaccagggccagtttgccaaggaggtgctgcccaagtacttcaagcacaacaacatggccagcttcgtgcggcagctcaacatgtatggcttccggaaagtggtccacatcgagcagggcggcctggtcaagccagagagagacgacacggagttccagcacccatgcttcctgcgtggccaggagcagctccttgagaacatcaagaggaaagtgaccagtgtgtccaccctgaagagtgaagacataaagatccgccaggacagcgtcaccaagctgctgacggacgtgcagctgatgaaggggaagcaggagtgcatggactccaagctcctggccatgaagcatgagaatgaggctctgtggcgggaggtggccagccttcggcagaagcatgcccagcaacagaaagtcgtcaacaagctcattcagttcctgatctcactggtgcagtcaaaccggatcctgggggtgaagagaaagatccccctgatgctgaacgacagtggctcagcacattccatgcccaagtatagccggcagttctccctggagcacgtccacggctcgggcccctactcggccccctccccagcctacagcagctccagcctctacgcccctgatgctgtggccagctctggacccatcatctccgacatcaccgagctggctcctgccagccccatggcctcccccggcgggagcatagacgagaggcccctatccagcagccccctggtgcgtgtcaaggaggagccccccagcccgcctcagagcccccgggtagaggaggcgagtcccgggcgcccatcttccgtggacaccctcttgtccccgaccgccctcattgactccatcctgcgggagagtgaacctgcccccgcctccgtcacagccctcacggacgccaggggccacacggacaccgagggccggcctccctcccccccgcccacctccacccctgaaaagtgcctcagcgtagcctgcctggacaagaatgagctcagtgaccacttggatgctatggactccaacctggataacctgcagaccatgctgagcagccacggcttcagcgtggacaccagtgccctgctggacctgttcagcccctcggtgaccgtgcccgacatgagcctgcctgaccttgacagcagcctggccagtatccaagagctcctgtctccccaggagccccccaggcctcccgaggcagagaacagcagcccggattcagggaagcagctggtgcactacacagcgcagccgctgttcctgctggaccccggctccgtggacaccgggagcaacgacctgccggtgctgtttgagctgggagagggctcctacttctccgaaggggacggcttcgccgaggaccccaccatctccctgctgacaggctcggagcctcccaaagccaaggaccccactgtctcctagaggccccggaggagctgggccagccgcccacccccacccccagtgcagggctggtcttggggaggcagggcagcctcgcggtcttgggcactggtgggtcggccgccatagccccagtaggacaaacgggctcgggtctgggcagcacctctggtcaggagggtcaccctggcctgccagtctgccttcccccaaccccgtgtcctgtggtttggttggggcttcacagccacacctggactgaccctgcaggttgttcatagtcagaattgtattttggatttttacacaactgtcccgttccccgctccacagagatacacagatatatacacacagtggatggacggacaagacaggcagagatctataaacagacaggctctatgcta

SEQ ID NO: 13372 - DNA, 2549 bp, Homo sapiens
  source 1..2549: mol_type = unassigned DNA
cggagacttgtccgtcacgtgcggccgcccggcctctcggccttgccgcgcgcctggcggggttgggggggcggggaccaagatctgctgcgcctgcgttgtgggcgttctcggggagctgctgccgtagctgccgccgccgctaccaccgcgttcgggtgtagaatttggaatccctgcgccgcgttaacaatgaagcagagttcgaacgtgccggctttcctcagcaagctgtggacgcttgtggaggaaacccacactaacgagttcatcacctggagccagaatggccaaagttttctggtcttggatgagcaacgatttgcaaaagaaattcttcccaaatatttcaagcacaataatatggcaagctttgtgaggcaactgaatatgtatggtttccgtaaagtagtacatatcgactctggaattgtaaagcaagaaagagatggtcctgtagaatttcagcatccttacttcaaacaaggacaggatgacttgttggagaacattaaaaggaaggtttcatcttcaaaaccagaagaaaataaaattcgtcaggaagatttaacaaaaattataagtagtgctcagaaggttcagataaaacaggaaactattgagtccaggctttctgaattaaaaagtgagaatgagtccctttggaaggaggtgtcagaattacgagcaaagcatgcacaacagcaacaagttattcgaaagattgtccagtttattgttacattggttcaaaataaccaacttgtgagtttaaaacgtaaaaggcctctacttctaaacactaatggagcccaaaagaagaacctgtttcagcacatagtcaaagaaccaactgataatcatcatcataaagttccacacagtaggactgaaggtttaaagccaagggagaggatttcagatgacatcattatttatgatgttactgatgataatgcagatgaagaaaatatcccagttattccagaaactaatgaggatgttatatctgatccctccaactgtagccagtaccctgatattgtcatcgttgaagatgacaatgaagatgagtatgcacctgtcattcagagtggagagcagaatgaaccagccagagaatccctaagttcaggcagtgatggcagcagccctctcatgtctagtgctgtccagctaaatggctcatccagtctgacctcagaagatccagtgaccatgatggattccattttgaatgataacatcaatcttttgggaaaggttgagctgttggattatcttgacagtattgactgcagtttagaggacttccaggccatgctatcaggaagacaatttagcatagacccagatctcctggttgatcttttcactagttctgtgcagatgaatcccacagattacatcaataatacaaaatctgagaataaaggattagaaactaccaagaacaatgtagttcagccagtttcggaagagggaagaaaatctaaatccaaaccagataagcagcttatccagtataccgcctttccacttcttgcattcctcgatgggaaccctgcttcttctgttgaacaggcgagtacaacagcatcatcagaagttttgtcctctgtagataaacccatagaagttgatgagcttctggatagcagcctagacccagaaccaacccaaagtaagcttgttcgcctggagccattgactgaagctgaagctagtgaagctacactgttttatttatgtgaacttgctcctgcacctctggatagtgatatgccacttttagatagctaaatccccaggaagtggactttacatgtatatattcatcaaaatgatgaactatttattttaaagtatcatttggtactttttttgtaaattgctttgttttgtttaatcagatactgtggaataaaagcaccttttgcttttctcactaaccacacactcttgcagagctttcaggtgttactcagctgcatagttacgcagatgtaatgcacattattggcgtatctttaagttggattcaaatggccatttttctccaattttggtaaattggatatcttttttttacaaatacgaccattaacctcagttaaatttttgtttgttttcctgtttgatgctgtctatttgcattgagtgtaagtcatttgaactaatggtataactcctaaagctttctctgctccagttatttttattaaatatttttcacttggcttatttttaaaactgggaacataaagtgcctgtatcttgtaaaacttcatttgtttcttttggttcagagaagttcatttatgttcaaagacgtttattcatgttcaacaggaaagacaaagtgtacgtgaatgctcgctgtctgatagggttccagctccatatatatagaaagatcgggggtgggatgggatggagtgagccccatccagttagttggactagttttaaataaaggttttccggtttgtgtttttttgaaccatactgtttagtaaaataaatacaatgaatgttgagtactagtg

SEQ ID NO: 13373 - DNA, 2643 bp, Homo sapiens
  source 1..2643: mol_type = unassigned DNA
acttgtccgtcacgtgcggccgcccggcctctcggccttgccgcgcgcctggcggggttgggggggcggggaccaagatctgctgcgcctgcgttgtgggcgttctcggggagctgctgccgtagctgccgccgccgctaccaccgcgttcgggtgtagaatttggaatccctgcgccgcgttaacaatgaagcagagttcgaacgtgccggctttcctcagcaagctgtggacgcttgtggaggaaacccacactaacgagttcatcacctggagccagaatggccaaagttttctggtcttggatgagcaacgatttgcaaaagaaattcttcccaaatatttcaagcacaataatatggcaagctttgtgaggcaactgaatatgtatggtttccgtaaagtagtacatatcgactctggaattgtaaagcaagaaagagatggtcctgtagaatttcagcatccttacttcaaacaaggacaggatgacttgttggagaacattaaaaggaaggtttcatcttcaaaaccagaagaaaataaaattcgtcaggaagatttaacaaaaattataagtagtgctcagaaggttcagataaaacaggaaactattgagtccaggctttctgaattaaaaagtgagaatgagtccctttggaaggaggtgtcagaattacgagcaaagcatgcacaacagcaacaagttattcgaaagattgtccagtttattgttacattggttcaaaataaccaacttgtgagtttaaaacgtaaaaggcctctacttctaaacactaatggagcccaaaagaagaacctgtttcagcacatagtcaaagaaccaactgataatcatcatcataaagttccacacagtaggactgaaggtttaaagccaagggagaggatttcagatgacatcattatttatgatgttactgatgataatgcagatgaagaaaatatcccagttattccagaaactaatgaggatgttatatctgatccctccaactgtagccagtaccctgatattgtcatcgttgaagatgacaatgaagatgagtatgcacctgtcattcagagtggagagcagaatgaaccagccagagaatccctaagttcaggcagtgatggcagcagccctctcatgtctagtgctgtccagctaaatggctcatccagtctgacctcagaagatccagtgaccatgatggattccattttgaatgataacatcaatcttttgggaaaggttgagctgttggattatcttgacagtattgactgcagtttagaggacttccaggccatgctatcaggaagacaatttagcatagacccagatctcctggttgattctgagaataaaggattagaaactaccaagaacaatgtagttcagccagtttcggaagagggaagaaaatctaaatccaaaccagataagcagcttatccagtataccgcctttccacttcttgcattcctcgatgggaaccctgcttcttctgttgaacaggcgagtacaacagcatcatcagaagttttgtcctctgtagataaacccatagaagttgatgagcttctggatagcagcctagacccagaaccaacccaaagtaagcttgttcgcctggagccattgactgaagctgaagctagtgaagctacactgttttatttatgtgaacttgctcctgcacctctggatagtgatatgccacttttagatagctaaatccccaggaagtggactttacatgtatatattcatcaaaatgatgaactatttattttaaagtatcatttggtactttttttgtaaattgctttgttttgtttaatcagatactgtggaataaaagcaccttttgcttttctcactaaccacacactcttgcagagctttcaggtgttactcagctgcatagttacgcagatgtaatgcacattattggcgtatctttaagttggattcaaatggccatttttctccaattttggtaaattggatatcttttttttacaaatacgaccattaacctcagttaaatttttgtttgttttcctgtttgatgctgtctatttgcattgagtgtaagtcatttgaactaatggtataactcctaaagctttctctgctccagttatttttattaaatatttttcacttggcttatttttaaaactgggaacataaagtgcctgtatcttgtaaaacttcatttgtttcttttggttcagagaagttcatttatgttcaaagacgtttattcatgttcaacaggaaagacaaagtgtacgtgaatgctcgctgtctgatagggttccagctccatatatatagaaagatcgggggtgggatgggatggagtgagccccatccagttagttggactagttttaaataaaggttttccggtttgtgtttttttgaaccatactgtttagtaaaataaatacaatgaatgttgagtactagtgtctgttatgtgtcttctttagaggtgacactcacatgaaacaattttttcttctcataggaagcagtagctttaaactgtctgtggttcattattctcaatatgaatcataccaagatatttgtgcctcatctcgaaaatatattgtatattg

SEQ ID NO: 13374 - DNA, 1899 bp, Homo sapiens
  source 1..1899: mol_type = unassigned DNA
ggagtgagcgcggcagtggccctggcagctggcggagcggcccagcccgtgtgcacgtggcgccggcgctgcctttcggttgccaaaattcaggctgtagacggcgagataacaagtttaaaaccccggctaagccagaagagccaaagagggacctcgccaaggccactcctcgctctctaggccgagaatactgcgcaaattctgggaggtttgggcctggcggctctccgttcccgacccccggcgtggattcgttcccgcgctttctggcgtgaggggtcagagggcgcgccgacgctcaggcgaacggagcggaggcggcagcggccatgggcgaagcgggcgccgctgaggaggcctgccggcacatgggaactaaagaggaatttgttaaagtcagaaagaaggatctggaacggctgacaactgaagtgatgcaaatacgggacttcttacccagaatactaaatggggaggtgctggagagcttccagaaattaaagattgtagaaaaaaacctggaaaggaaagagcaagaattagagcagctgaaaatggattgtgagcactttaaagcccgcctggaaaccgtgcaggccgacaacataagagagaagaaggagaaactggctcttcgacagcagttgaatgaagcgaagcagcaactcctgcagcaggcagagtattgtacagaaatgggagcagcagcgtgtaccctcttgtggggtgtctccagcagtgaggaagtcgtcaaggccattttgggaggagataaagctttgaagtttttcagcatcactggtcaaacaatggagagttttgtgaagtcgttagacggtgatgtccaggagctggattcggatgaaagtcagtttgttttcgctctggctggaattgtcacgaatgttgctgctatagcatgtggtcgtgaattcttggttaattcaagccgggtgctcttggacaccatattgcagcttctgggagacttgaagccaggacagtgtaccaaactcaaagtgctaatgctgatgtccctatacaatgtaagcatcaatttgaaaggcttgaaatacatcagcgagagtccaggattcatccctttgctgtggtggcttttgagtgatccagatgcagaggtgtgccttcatgtactgaggcttgtccagtctgtggttctggaacctgaagtcttctccaagtcggcctctgagttccggagctccctgcccctgcaacgcatcctggcaatgtccaagagccgcaacccccgcctgcaaaccgcagcccaggagctcctggaagatctccgcactctggagcataatgtgtaggtgtgctcggccaccagggttttggtgaaaatgccggtgtcccttctccccagatccctcatttgatactccaaaaccatcaccatgtaccatgtgttagagttggcaaaatgtgattgactagagatggacatgaattgatatgtatcccacataactttgtcttggaagtgagagtgcttgtaggtggttggttaagcttgccaaaggagaggccatgaaagaacctgtccttctggaaaagtggtccatgtctgtgctggctggaagagggcttgcttagggcagcttcttgctgctcagcagaccatgacctgtaggttcacctataaaacagggaaattgaataaccatctaccccattagtcagcattttcttgagatacatttctttgaaaagcaattcattctctctctagtaattgtaattaatccccccaaaatgcaagtttacttttataaccttttggtgaacctgctatttcggatgacattgggcattttagttctatattttttgtgcctcttttatttttgaataaagaaaatcagaagagttgta

SEQ ID NO: 13375 - DNA, 1454 bp, Homo sapiens
  source 1..1454: mol_type = unassigned DNA
agagggcgcgccgacgctcaggcgaacggagcggaggcggcagcggccatgggcgaagcgggcgccgctgaggaggcctgccggacctggaaaggaaagagcaagaattagagcagctgaaaatggattgtgagcactttaaagcccgcctggaaaccgtgcaggccgacaacataagagagaagaaggagaaactggctcttcgacagcagttgaatgaagcgaagcagcaactcctgcagcaggcagagtattgtacagaaatgggagcagcagcgtgtaccctcttgtggggtgtctccagcagtgaggaagtcgtcaaggccattttgggaggagataaagctttgaagtttttcagcatcactggtcaaacaatggagagttttgtgaagtcgttagacggtgatgtccaggagctggattcggatgaaagtcagtttgttttcgctctggctggaattgtcacgaatgttgctgctatagcatgtggtcgtgaattcttggttaattcaagccgggtgctcttggacaccatattgcagcttctgggagacttgaagccaggacagtgtaccaaactcaaagtgctaatgctgatgtccctatacaatgtaagcatcaatttgaaaggcttgaaatacatcagcgagagtccaggattcatccctttgctgtggtggcttttgagtgatccagatgcagaggtgtgccttcatgtactgaggcttgtccagtctgtggttctggaacctgaagtcttctccaagtcggcctctgagttccggagctccctgcccctgcaacgcatcctggcaatgtccaagagccgcaacccccgcctgcaaaccgcagcccaggagctcctggaagatctccgcactctggagcataatgtgtaggtgtgctcggccaccagggttttggtgaaaatgccggtgtcccttctccccagatccctcatttgatactccaaaaccatcaccatgtaccatgtgttagagttggcaaaatgtgattgactagagatggacatgaattgatatgtatcccacataactttgtcttggaagtgagagtgcttgtaggtggttggttaagcttgccaaaggagaggccatgaaagaacctgtccttctggaaaagtggtccatgtctgtgctggctggaagagggcttgcttagggcagcttcttgctgctcagcagaccatgacctgtaggttcacctataaaacagggaaattgaataaccatctaccccattagtcagcattttcttgagatacatttctttgaaaagcaattcattctctctctagtaattgtaattaatccccccaaaatgcaagtttacttttataaccttttggtgaacctgctatttcggatgacattgggcattttagttctatattttttgtgcctcttttatttttgaataaagaaaatcag

SEQ ID NO: 13376 - DNA, 2604 bp, Homo sapiens
  source 1..2604: mol_type = unassigned DNA
agatgcacgcgcgtccccgctgcccaacgaagcctgggtcgcgttgcgccgccgccaccctgggctggcagtggagctggagctggagcccgcgctgcccgctgagagcgtgacgcgcgtcctgcagccagccgtccccgtggctgcgctgcgcctcaacctctcaggcgacaccgtaggcccagtgcgcttcgcagcacaccactacgccgcaaccctgtgcgcgctcgaggtgcgcgcagccgcttcggccgagctgaacgccgcgctggaggagctggcggcgcgctgcgcggccctgcgcgaggtgcattgtttctgcgtggtgagccactcggtgctggacgccttccgcgcgcactgcccgcgcctgcgcacctataccctcaagctcacgcgcgagccgcatccctggaggcctacgctcgtggcgtgattgggcgacttctctcccccgtccccgtggacacgccccacccgctcggtcctggacacactgcccccctctcttgcctccacccctctgcggactctgcagctccgcggccccggcgcagggagagggagggcacgggcgcgggccgggcctcaagggacttgcccagcccacaccaggtcgcgcaccggcgatttctcctgtagaacaaagaaggaaatagagggaccgagaggggtgggactcgaacccaagtctcccactcatctcaccccaccccaccccactccaccccaccccacccctccactccactccactccacacatcccatccagccagccttttctgcctgctggtgcctcggccgctgtccgagccccgccccgcgggcttgcacgtggcccccgcctgacccggcgccccggggcggagtagggcggagcgggcggcaaacgcagcactttccgcggctttgacgagcccgcagcggccgggcccgagcgcagagccgggccgagactgcaccatgcaggaagcgccagctgcgctgcccacggagccaggccccagccccgtgcctgccttcctcggcaagctatgggcgctggtgggggacccaggcacagaccacctgatccgctggagcccgagcgggaccagtttcctcgtaagcgaccagagccgtttcgccaaggaagtgctgccccagtatttcaagcatagcaacatggcgagcttcgtgcgccaactcaacatgtacggttttcggaaggtggtgagcatcgagcagggcggcctgcttaggccggagcgcgaccacgtcgagttccagcacccgagcttcgtgcgcggccgcgagcagctactggagcgcgtgcggcgcaaggtgcccgcgctgcgcggcgacgacggccgctggcgcccggaggacctgggtcgactactgggcgaggtgcaggctttgcggggagtgcaggagagcaccgaggcgcggctgcgggagctcaggcagcagaacgagatcttgtggcgggaggtggtgacacttcggcagagccacggtcagcagcaccgggtcattggcaagctgatccagtgtctctttgggccacttcaggcggggccgagcaatgcaggaggcaagagaaagctgtccctgatgctggatgaggggagctcatgcccaacacctgccaagttcaacacctgccctctacctggtgcccttctgcaggacccctacttcatccagtcgcctctcccagagacaaatttgggccttagccctcacagggccaggggccccatcatctctgacatcccagaagactctccatcccctgaggggaccaggctttctccctccagtgatggcaggagggagaagggcctggcactgctcaaagaagagccggccagtccagggggggatggcgaggccgggctggccctggccccaaacgagtgtgacttctgcgtgacagcccccccgccactgcctgtggctgtggtgcaggccatcctggaagggaaagggagcttcagccccgaggggcccaggaatgcccaacagcctgaaccaggggatcccagggagatacctgacagggggcctctgggcctggaaagcggggacaggagcccagagagtctgctgcctccgatgctgcttcagccccctcaagaaagtgtggaacctgcagggcctctagatgtgctgggccccagtctccaagggcgagaatggaccctgatggacttggacatggagctgtccttgatgcagcccttggttccagagcggggtgagcctgagctggcggtcaaggggttaaattctccaagcccagggaaggaccccacgctcggggccccactcctgctggatgtccaggcggccttgggaggcccagccctgggcctgcctggggctttaaccatttatagcactcctgagagccggactgcctcctacttgggcccggaagccagtccctccccctaagaccccgcgcctctgaaggggcttggaaccagtccgccgctgcacatccttcttggcttcctggcgccccctatcgggggtgagcgaagcccccactactaaatggcctctctccactaccccgactatccctgcacataaactccgttttttttttttc

SEQ ID NO: 13377 - DNA, 2514 bp, Homo sapiens
  source 1..2514: mol_type = unassigned DNA
agatgcacgcgcgtccccgctgcccaacgaagcctgggtcgcgttgcgccgccgccaccctgggctggcagtggagctggagctggagcccgcgctgcccgctgagagcgtgacgcgcgtcctgcagccagccgtccccgtggctgcgctgcgcctcaacctctcaggcgacaccgtaggcccagtgcgcttcgcagcacaccactacgccgcaaccctgtgcgcgctcgaggtgcgcgcagccgcttcggccgagctgaacgccgcgctggaggagctggcggcgcgctgcgcggccctgcgcgaggtgcattgtttctgcgtggtgagccactcggtgctggacgccttccgcgcgcactgcccgcgcctgcgcacctataccctcaagctcacgcgcgagccgcatccctggaggcctacgctcgtggcgtgattgggcgacttctctcccccgtccccgtggacacgccccacccgctcggtcctggacacactgcccccctctcttgcctccacccctctgcggactctgcagctccgcggccccggcgcagggagagggagggcacgggcgcgggccgggcctcaagggacttgcccagcccacaccaggtcgcgcaccggcgatttctcctgtagaacaaagaaggaaatagagggaccgagaggggtgggactcgaacccaagtctcccactcatctcaccccaccccaccccactccaccccaccccacccctccactccactccactccacacatcccatccagccagccttttctgcctgctggtgcctcggccgctgtccgagccccgccccgcgggcttgcacgtggcccccgcctgacccggcgccccggggcggagtagggcggagcgggcggcaaacgcagcactttccgcggctttgacgagcccgcagcggccgggcccgagcgcagagccgggccgagactgcaccatgcaggaagcgccagctgcgctgcccacggagccaggccccagccccgtgcctgccttcctcggcaagctatgggcgctggtgggggacccaggcacagaccacctgatccgctggagcccgagcgggaccagtttcctcgtaagcgaccagagccgtttcgccaaggaagtgctgccccagtatttcaagcatagcaacatggcgagcttcgtgcgccaactcaacatgtacggttttcggaaggtggtgagcatcgagcagggcggcctgcttaggccggagcgcgaccacgtcgagttccagcacccgagcttcgtgcgcggccgcgagcagctactggagcgcgtgcggcgcaaggtgcccgcgctgcgcggcgacgacggccgctggcgcccggaggacctgggtcgactactgggcgaggtgcaggctttgcggggagtgcaggagagcaccgaggcgcggctgcgggagctcaggcagcagaacgagatcttgtggcgggaggtggtgacacttcggcagagccacggtcagcagcaccgggtcattggcaagctgatccagtgtctctttgggccacttcaggcggggccgagcaatgcaggaggcaagagaaagctgtccctgatgctggatgaggggagctcatgcccaacacctgccaagttcaacacctgccctctacctggtgcccttctgcaggacccctacttcatccagtcgccttctacttacagcctctcccagagacaaatttgggccttagccctcacagggccaggggccccatcatctctgacatcccagaagactctccatcccctgaggggaccaggctttctccctccagtgatggcaggagcccccccgccactgcctgtggctgtggtgcaggccatcctggaagggaaagggagcttcagccccgaggggcccaggaatgcccaacagcctgaaccaggggatcccagggagatacctgacagggggcctctgggcctggaaagcggggacaggagcccagagagtctgctgcctccgatgctgcttcagccccctcaagaaagtgtggaacctgcagggcctctagatgtgctgggccccagtctccaagggcgagaatggaccctgatggacttggacatggagctgtccttgatgcagcccttggttccagagcggggtgagcctgagctggcggtcaaggggttaaattctccaagcccagggaaggaccccacgctcggggccccactcctgctggatgtccaggcggccttgggaggcccagccctgggcctgcctggggctttaaccatttatagcactcctgagagccggactgcctcctacttgggcccggaagccagtccctccccctaagaccccgcgcctctgaaggggcttggaaccagtccgccgctgcacatccttcttggcttcctggcgccccctatcgggggtgagcgaagcccccactactaaatggcctctctccactaccccgactatccctgcacataaactccgttttttttttttc

SEQ ID NO: 13378 - DNA, 1249 bp, Homo sapiens
  source 1..1249: mol_type = unassigned DNA
atgcaggaagcgccagctgcgctgcccacggagccaggccccagccccgtgcctgccttcctcggcaagctatgggcgctggtgggggacccaggcacagaccacctgatccgctggagcccgagcgggaccagtttcctcgtaagcgaccagagccgtttcgccaaggaagtgctgccccagtatttcaagcatagcaacatggcgagcttcgtgcgccaactcaacatgtacggttttcggaaggtggtgagcatcgagcagggcggcctgcttaggccggagcgcgaccacgtcgagttccagcacccgagcttcgtgcgcggccgcgagcagctactggagcgcgtgcggcgcaaggtgcccgcgctgcgcggcgacgacggccgctggcgcccggaggacctgggtcgactactgggcgaggtgcaggctttgcggggagtgcaggagagcaccgaggcgcggctgcgggagctcaggcagcagaacgagatcttgtggcgggaggtggtgacacttcggcagagccacggtcagcagcaccgggtcattggcaagctgatccagtgtctctttgggccacttcaggcggggccgagcaatgcaggaggcaagagaaagctgtccctgatgctggatgaggggagctcatgcccaacacctgccaagttcaacacctgccctctacctggtgcccttctgcaggacccctacttcatccagtcgcctctcccagagacaaatttgggccttagccctcacagggccaggggccccatcatctctgacatcccagaagactctccatcccctgaggggaccaggctttctccctccagtgatggcaggagggggcctctgggcctggaaagcggggacaggagcccagagagtctgctgcctccgatgctgcttcagccccctcaagaaagtgtggaacctgcagggcctctagatgtgctgggccccagtctccaagggcgagaatggaccctgatggacttggacatggagctgtccttgatgcagcccttggttccagagcggggtgagcctgagctggcggtcaaggggttaaattctccaagcccagggaaggaccccacgctcggggccccactcctgctggatgtccaggcggccttgggaggcccagccctgggcctgcctggggctttaaccatttatagcactcctgagagccggactgcctcctacttgggcccggaagccagtccctccccct

SEQ ID NO: 13379 - DNA, 1515 bp, Homo sapiens
  source 1..1515: mol_type = unassigned DNA
atgcaggaagcgccagctgcgctgcccacggagccaggccccagccccgtgcctgccttcctcggcaagctatgggcgctggtgggggacccaggcacagaccacctgatccgctggagcccgagcgggaccagtttcctcgtaagcgaccagagccgtttcgccaaggaagtgctgccccagtatttcaagcatagcaacatggcgagcttcgtgcgccaactcaacatgtacggttttcggaaggtggtgagcatcgagcagggcggcctgcttaggccggagcgcgaccacgtcgagttccagcacccgagcttcgtgcgcggccgcgagcagctactggagcgcgtgcggcgcaaggtgcccgcgctgcgcggcgacgacggccgctggcgcccggaggacctgggtcgactactgggcgaggtgcaggctttgcggggagtgcaggagagcaccgaggcgcggctgcgggagctcaggcagcagaacgagatcttgtggcgggaggtggtgacacttcggcagagccacggtcagcagcaccgggtcattggcaagctgatccagtgtctctttgggccacttcaggcggggccgagcaatgcaggaggcaagagaaagctgtccctgatgctggatgaggggagctcatgcccaacacctgccaagttcaacacctgccctctacctggtgcccttctgcaggacccctacttcatccagtcgcctctcccagagacaaatttgggccttagccctcacagggccaggggccccatcatctctgacatcccagaagactctccatcccctgaggggaccaggctttctccctccagtgatggcaggagggagaagggcctggcactgctcaaagaagagccggccagtccagggggggatggcgaggccgggctggccctggccccaaacgagtgtgacttctgcgtgacagcccccccgccactgcctgtggctgtggtgcaggccatcctggaagggaaagggagcttcagccccgaggggcccaggaatgcccaacagcctgaaccaggggatcccagggagatacctgacagggggcctctgggcctggaaagcggggacaggagcccagagagtctgctgcctccgatgctgcttcagccccctcaagaaagtgtggaacctgcagggcctctagatgtgctgggccccagtctccaagggcgagaatggaccctgatggacttggacatggagctgtccttgatgcagcccttggttccagagcggggtgagcctgagctggcggtcaaggggttaaattctccaagcccagggaaggaccccacgctcggggccccactcctgctggatgtccaggcggccttgggaggcccagccctgggcctgcctggggctttaaccatttatagcactcctgagagccggactgcctcctacttgggcccggaagccagtccctccccctaagaccccgcgcctctgaaggggcttggaaccagtccg

SEQ ID NO: 13380 - DNA, 499 bp, Homo sapiens
  source 1..499: mol_type = unassigned DNA
aagggtgagtgtgaaataaacaaatcctgcagtgtttctgcgtcctattaaaggcggggtcggatctgaaagggaaggacagggaacgcgcggggtaccggaggagccatcccggcagaggacttgcccagcccacaccaggtcgcgcaccggcgatttctcctgtagaacaaagaaggaaatagagggaccgagaggggtgggactcgaacccaagtctcccactcatctcaccccaccccaccccactccaccccaccccacccctccactccactccactccacacatcccatccagccagccttttctgcctgctggtgcctcggccgctgtccgagccccgccccgcgggcttgcacgtggcccccgcctgacccggcgccccggggcggagtagggcggagcgggcggcaaacgcagcactttccgcggctttgacgagcccgcagcggccgggcccgagcgcagagccgggccgagactgcaccatgcagga

SEQ ID NO: 13381 - DNA, 1057 bp, Homo sapiens
  source 1..1057: mol_type = unassigned DNA
agttcccagaatgccgcacgagcccgcccccagcgggagctgtggggcagaggcgctgctgtggttggtcagtccagtaagaagccagcagggctggtgctggggcttcttctcctgaaggggctgcaagagggaaggcttagccatgtcgtccttgatcagaagggtgatcagcaccgcgaaagccccaggggccattggaccctacagtcaagctgtattagtcgacaggaccatttacatttcaggacagataggcatggacccttcaagtggacagcttgtgtcaggaggggtagcagaagaagctaaacaagctcttaaaaacatgggtgaaattctgaaagctgcaggctgtgacttcactaacgtggtgaaaacaactgttcttctggctgacataaatgacttcaatactgtcaatgaaatctacaaacagtatttcaagagtaattttcctgctagagctgcttaccaagttgctgctttacccaaaggcagccgaattgaaattgaagcagtagctatccaaggaccactgacaacggcatcactataagtgggcccagtgctgtgtagtctggaattgttaacattttaatttttacaattgatgtaacatcttaattaaccttttaattttcacaattgatgacagtgtgagtttgatgaaaatatctgaagctattatggaaataccatgtaatagggagagttgaacatgaatattagagaaggaatccagttacttttttaaattacacctgtgtgcacctgtattactgaatataggaaagagatacccattacatagttactcagtaaacaaaagagaaataccaggtaggaaagaagagttactattcctgagaaataatcaagaacatatttaatttaaactaatgatgtgaactatttagttttgatgtccgttatgtgattctgcttttacttgagtaaaattaaagtgtttaaatttgagatcaaggagaagatagtggaacaaaatgttatatagataatatttttctaatggaaataaaataggcagatttcc

SEQ ID NO: 13382 - DNA, 15337 bp, Homo sapiens
  source 1..15337: mol_type = unassigned DNA
gcgccggctgagccagcggctcttgggaggctgcgtccgcgcgccggcgaggcgaggcggccgggccctgcgcgtcaggcctgagacctgggaggaagctggagaaaagatgccctctgaatctttctgtttggctgcccaggctcgcctcgactccaaatggttgaaaacagatatacagcttgcattcacaagagatgggctctgtggtctgtggaatgaaatggttaaagatggagaaattgtatacactggaacagaatcaacccagaacggagagctccctcctagaaaagatgatagtgtcgaaccaagtggaacaaagaaagaagatctgaatgacaaagagaaaaaagatgaagaagaaactcctgcacctatatatagggccaagtcaattctggacagctgggtatggggcaagcaaccagatgtgaatgaactgaaggagtgtctttctgtgctggttaaagagcagcaggccctggccgtccagtcagccaccaccaccctctcagccctgcgactcaagcagaggctggtgatcttggagcgctatttcattgccttgaatagaaccgtttttcaggagaatgtcaaagttaagtggaaaagcagcggtatttctctgcctcctgtggacaaaaaaagttcccggcctgcgggcaaaggtgtggaggggctcgccagagtgggatcccgagcggcgctgtcttttgcctttgccttcctgcgcagggcctggcgatcaggcgaggatgcggacctctgcagtgagctgttgcaggagtccctggacgccctgcgagcacttcccgaggcctcgctctttgacgagagcaccgtgtcctctgtgtggctggaggtggtggagagagcgaccaggttcctcaggtccgtcgtgacgggggatgttcacggaacgccagccaccaaagggccaggaagcatccccctgcaggaccagcacttggccctggccatcctgctggagctggctgtgcagagaggcacgctgagccaaatgttgtctgccatcctgttgttgcttcagctgtgggacagcggggcacaggagactgacaatgagcgttccgcccagggcaccagcgccccacttttgcccttgctgcaaaggttccagagcatcatttgcaggaaggatgcaccccactccgagggcgacatgcaccttttgtctggccctctgagccccaatgagagtttcctgaggtacctcacccttccacaagacaacgagcttgccattgatctgcgacaaacggcggttgttgtcatggcccatttagaccgtctggctacgccctgtatgcctccgctgtgtagctctccgacatctcataagggatcattgcaagaggtcataggttgggggttaataggatggaaatactatgccaatgtgattggtccaatccagtgcgaaggcctggccaacctgggagtcacacagattgcctgtgcagagaagcgtttcctgattctgtcacgcaatggccgcgtgtacacacaggcctataatagtgacacgctggccccacagctggtccaaggccttgcctccagaaacattgtaaaaattgctgcccattctgatggtcaccactacctagccttggctgctactggagaggtgtactcctggggctgtggggacggcggacggctgggccatggggacactgtgcctttggaggagcctaaggtgatctccgccttctctggaaagcaggccgggaagcacgtggtgcacatcgcttgcgggagcacttacagtgcggccatcactgccgagggggagctgtacacctggggccgcgggaactacggccggctgggccatggctccagtgaggacgaggccattccgatgctggtagccgggcttaaaggactgaaggtcatcgatgtggcgtgtgggagtggggatgctcaaaccctggctgtcactgagaacgggcaagtgtggtcttggggagatggtgactatgggaaattgggcagaggtggtagtgatggctgcaaaaccccaaagctgattgaaaagcttcaagacttggatgtggtcaaagtccgctgtggaagtcagttttccattgctttgacgaaagatggccaagtttattcatggggaaaaggtgacaaccagagacttggacatggaacagaggaacatgttcgttatccaaaactcttagaaggcttgcaagggaagaaggtgattgatgtggctgcaggctccacccactgcctggctctgactgaggacagcgaggtccacagctgggggagcaacgaccagtgccagcactttgacaccttgcgcgtgaccaagccagaacctgcagcattgccaggactggacaccaaacacatagtgggaattgcctgtgggcctgcccagagctttgcttggtcatcatgttctgagtggtccattggcctccgtgtcccttttgtggtggacatctgctcaatgacttttgagcagctggatctcctgcttcggcaggtgagtgaggggatggatggttccgcggactggcccccgccccaggagaaagagtgtgtggccgtggcaacgctgaatcttctacgacttcagttgcatgctgccattagtcaccaggttgacccggaattccttggtttaggtctgggcagcatcctcctgaacagcctgaagcagacggtggtgaccctggccagcagtgcgggcgtgctgagcaccgtgcagtcggccgcccaggccgtgctgcagagtggctggtccgtgctgctgcccaccgcggaggagcgggcccgggcactctctgctctcctgccctgcgcagtttcaggcaatgaagtgaacataagtccaggtcgtcgattcatgattgatcttctggtgggcagcttgatggctgatggagggttggagtcagccttacacgcagccattactgcagagatccaggatattgaagccaaaaaagaagcacagaaggaaaaagaaattgatgaacaggaagcgaatgcctcaacatttcatagaagcaggactccactggataaagaccttattaatacggggatctgtgagtcttctggcaaacagtgtttgcctctggttcagctcatacaacagcttcttagaaacattgcttctcagactgtagccagattgaaagatgttgcccgtcggatttcatcatgtctggactttgagcaacacagtcgtgaaagatctgcttcattggatttgttactgcgttttcaacgtttgcttattagtaaactttatccaggagaaagtattggtcagacctcagatatttctagtccagagctaatgggtgttggttccttgctgaagaagtacacagccctcctgtgcacgcacattggagatatactgcctgtggccgccagcattgcttctaccagctggcggcacttcgcggaggtggcttacattgtggaaggggactttactggtgttctccttccagaactagtagtttctatagtgcttctgctcagtaaaaatgctggtctcatgcaagaggctggagctgtacctctgctgggtggcctgttggaacatctggatcggttcaaccatctggcaccaggaaaggaacgggatgatcatgaagagttagcctggcctggcataatggagtcattttttacaggtcagaactgtagaaataatgaggaagtgacacttatacgcaaagctgatttggagaaccataataaagatggaggcttctggactgtgattgacgggaaggtgtatgatataaaggacttccagacacagtcgttaacaggaaatagtattcttgctcagtttgcaggggaagacccagtggtagctttggaagctgctttgcagtttgaagacacccgggaatccatgcacgcgttttgtgttggccagtatttggagcctgaccaagaaatcgtcaccataccagatctggggagtctctcttcacctctgatagacacagagaggaatctgggcctgcttctcggattacacgcttcgtatttggcaatgagcacaccgctgtctcctgtcgagattgaatgtgccaaatggcttcagtcatccatcttctctggaggcctgcagaccagccagatccactacagctacaacgaggagaaagacgaggaccactgcagctccccagggggcacacctgccagcaaatctcgactctgctcccacagacgggccctgggggaccattcccaggcatttctgcaagccattgcagacaacaacattcaggatcacaacgtgaaggactttttgtgtcaaatagaaaggtactgtaggcagtgccatttgaccacaccgatcatgtttccccccgagcatcccgtggaagaggtcggtcgcttgttgttatgttgcctcttaaaacatgaagatttaggtcatgtggcattatctttagttcatgcaggtgcacttggtattgagcaagtaaagcacagaacgttgcctaagtcagtggtggatgtttgtagagttgtctaccaagcaaaatgttcgctcattaagactcatcaagaacagggccgttcttacaaggaggtctgcgctcctgtcatcgaacgtttgagattcctctttaatgaattgagacctgctgtttgtaatgacctctctataatgtctaagtttaaattgttaagttctttgccccgttggaggaggatagctcaaaagataattcgagaacgaaggaaaaagagagttcctaagaagccagaatctacggatgatgaagaaaaaattggaaacgaagagagtgatttagaagaagcttgcattttgcctcatagtccaataaatgtggacaagagacccattgcaattaaatcacccaaggacaaatggcagccgctgttgagtactgttacaggtgttcacaaatacaagtggttgaagcagaatgtgcagggtctttatccgcagtctccactcctcagtacaattgctgaatttgcccttaaagaagagccagtggatgtggaaaaaatgagaaagtgcctactaaaacagttggagagagcagaggttcgcctggaagggatagatacaattttaaaactggcgagcaagaatttcttacttccatctgtgcagtatgcgatgttttgtggatggcaaagacttattcctgagggaatcgatataggggaacctcttactgattgtttaaaggatgttgatttgatcccgccttttaatcggatgctgctggaagtcacctttggcaagctgtacgcttgggctgtacagaacattcgaaatgttttgatggatgccagtgccaaatttaaagagcttggtatccagccggttcccctgcaaaccatcaccaatgagaacccgtcaggaccgagcctggggaccatcccgcaagcccgcttcctcctggtgatgctcagcatgctcaccctgcagcacggcgcaaacaacctcgaccttctgctcaattccggcatgctggccctcacgcagacggcactgcgcctgattggccccagttgtgacaacgttgaggaagatatgaatgcttctgctcaaggtgcttctgccacagttttggaagaaacaaggaaggaaacggctcctgtgcagctccctgtttcaggaccagaactggctgccatgatgaagattggaacaagggtcatgagaggtgtggactggaaatggggcgatcaggatgggcctcctccaggcctaggccgcgtgattggtgagctgggagaggacggatggataagagtccagtgggacacaggcagcaccaactcctacaggatggggaaagaaggaaaatacgacctcaagctggcagagctgccggctgctgcacagccctcagcagaggattcggacacagaggatgactctgaagccgaacaaactgaaaggaacattcaccccactgcaatgatgtttaccagcactattaacttactgcagactctttgtctgtctgctggagttcatgctgagatcatgcagagcgaagccaccaagactttatgcggactgctgcgaatgttagtggaaagcggaacgacggacaagacatcttctccaaacaggctggtgtacagggagcaacaccggagctggtgcacgctggggtttgtgcggagcatcgctctcacgccgcaggtatgcggcgccctcagctccccgcagtggatcacgctgctcatgaaggtcgtggaagggcacgcacccttcactgccacctcgctgcagaggcagatcttagctgtgcatttgttgcaagcagtccttccatcatgggacaagaccgaaagggcgagggacatgaaatgcctcgtggagaagctgtttgacttcttgggaagcttgctcactacctgctcctctgacgtgccattactcagagagtccacgctgaggcggcgcagggtgcgcccgcaggcctcgctgactgccacccacagcagcacactggcggaggaggtggtggcactgctgcgcacgctgcactccctgactcagtggaatgggctcatcaacaagtacatcaactcccagctccgctccatcacccacagctttgtgggaaggccttccgaaggggcccagttagaggactacttccccgactccgagaaccctgaagtggggggcctcatggcagtcctggctgtgattggaggcatcgatggtcgcctgcgcctgggcggtcaagttatgcacgatgagtttggagaaggcactgtgactcgcatcaccccaaagggcaaaatcaccgtgcagttctctgacatgcggacgtgtcgcgtttgcccattgaatcagctgaaaccactccctgccgtggcctttaatgtgaacaacctgcccttcacagagcccatgctgtctgtctgggctcagttggtgaacctcgctggaagcaagttagaaaagcacaaaataaagaaatcgactaaacaggcctttgcaggacaagtggacctggacctgctgcggtgccagcagttgaagctatacatcctgaaagcaggtcgggcgctgctctcccaccaggataaactgcggcagatcctgtctcagccagctgttcaggagactggaactgttcacacagatgatggagcagtggtatcacctgaccttggggacatgtctcctgaagggccgcagccccccatgatcctcttgcagcagctgctggcctcggccacccagccgtctcctgtgaaggccatatttgataaacaggaacttgaggctgctgcactggccgtttgccagtgcttggctgtggagtccactcacccttcgagcccaggatttgaagactgcagctccagtgaggccaccacgcctgtcgccgtgcagcacatccgccctgccagagtgaagaggcgcaagcagtcgcccgttcccgctctgccgatcgtggtgcagctcatggagatgggattttccagaaggaacatcgagtttgccctgaagtctctcactggtgcttccgggaatgcatccagcttgcctggtgtggaagccttggtcgggtggctgctggaccactccgacatacaggtcacggagctctcagatgcagacacggtgtccgacgagtattctgacgaggaggtggtggaggacgtggatgatgccgcctactccatgtctactggtgctgttgtgacggagagccagacgtacaaaaaacgagctgatttcttgagtaatgatgattatgctgtatatgtgagagagaatattcaggtgggaatgatggttagatgctgccgagcgtatgaagaagtgtgcgaaggtgatgttggcaaagtcatcaagctggacagagatggattgcatgatctcaatgtgcagtgtgactggcagcagaaagggggcacctactgggttaggtacattcatgtggaacttataggctatcctccaccaagttcttcttctcacatcaagattggtgataaagtgcgggtcaaagcctctgtcaccacaccaaaatacaaatggggatctgtgactcatcagagtgtgggggttgtgaaagctttcagtgccaatggaaaagatatcattgtcgactttccccagcagtctcactggactgggttgctatcagaaatggagttggtacccagtattcatcctggggttacgtgtgatggatgtcagatgtttcctatcaatggatccagattcaaatgcagaaactgtgatgactttgatttttgtgaaacgtgtttcaagaccaaaaaacacaataccaggcatacatttggcagaataaatgaaccaggtcagtctgcggtattttgtggccgttctggaaaacagctgaagcgttgccacagcagccagccaggcatgctgctggacagctggtcccgcatggtgaagagcctgaatgtgtcgtcctccgtgaaccaggcatcccgtctcattgacggcagcgagccctgctggcagtcatcggggtcgcaaggaaagcactggattcgtttggagattttcccagatgttcttgttcatagattaaaaatgatcgtagatcctgctgacagtagctacatgccgtccctggttgtagtgtcaggtggaaattccctgaataaccttattgaactaaagacaatcaatattaacccttctgacaccacagtgccccttctgaatgactgcacagagtatcacaggtatattgaaattgctataaagcagtgcaggagctcaggaatcgattgtaaaatccatggtctcatcctgctgggacggatccgtgcagaagaggaagatttggctgcagttcctttcttagcttcggataatgaagaggaggaggatgagaaaggcaacagcggaagcctcattagaaagaaggctgctgggctggaatcagcagctacgataagaaccaaggtgtttgtgtggggcctgaatgacaaggaccagctgggcgggctgaaaggctccaagataaaggttccttcgttctctgagacactgtcagctttgaatgtggtacaggtggctggtggatctaaaagtttgtttgcagtgactgtggaagggaaggtgtatgcctgtggagaagccacgaatggccggctggggctgggcatttccagcgggacggtgcccatcccacggcagatcacagctctcagcagctacgtggtcaagaaggtggctgttcactcaggtggccggcacgcgacggctttaactgtcgatggaaaagtgttttcgtggggcgaaggtgacgatggaaaacttggacacttcagcagaatgaactgtgacaaaccaaggctgatcgaggccctgaaaaccaagcgtatccgggatatcgcctgtgggagctcgcacagcgcagccctcacatccagcggagaactgtacacctggggcctcggcgagtacggccggctgggacatggggataatacgacacagctaaagcccaaaatggtgaaagtccttctcggtcacagagtaatccaggttgcatgtgggagtagagacgcgcagaccctggctctgaccgatgaaggtttggtattttcctggggtgatggtgactttggaaaactgggccggggcggaagtgaaggctgtaacattccccagaacattgagagactaaatggacagggggtgtgccagattgagtgtggagctcagttctccctggcgctcaccaagtctggagtggtgtggacatggggaaagggggattacttcagattgggccacggctctgacgtgcacgtgcggaaaccacaggtggtggaagggctgagagggaagaagatcgtgcatgtggctgtcggggccctgcactgcctggcggtcacggactcggggcaggtgtatgcttggggtgacaacgaccacggccagcagggcaatggcacgaccacggttaacaggaagcccacactcgtgcaaggcttagaaggccagaagatcacacgcgtggcttgtgggtcgtcccacagtgtggcgtggacaactgtggatgtggccacgccctctgtccacgagcccgtcctcttccagactgcaagagaccctttaggtgcttcctatttaggcgtgccttcagatgctgattcttctgctgccagtaataaaataagtggtgcaagtaattctaagccaaatcgcccttctcttgccaagattctcttgtcattggatggaaatctggccaaacagcaggccttatcacatattcttacagcattgcaaatcatgtatgccagagatgctgttgtcggggccctgatgccggccgccatgatcgccccggtggagtgcccctcgttctcctcggcggccccttccgacgcatctgcgatggctagtcccatgaatggagaagaatgcatgctggctgttgatatcgaagacagactgagtccaaatccatggcaagaaaagagagagattgtttcctctgaggacgcagtgaccccctctgcagtgactccgtcggccccctcagcctccgctcggccttttatcccagtgacggatgacctgggagccgcaagcatcattgcagaaaccatgaccaaaaccaaagaggatgttgaaagccaaaataaagcagcaggtccggagcctcaggccttggatgagttcaccagtctgctgattgcggatgacactcgtgtggtggtagacctgctcaagctgtcagtgtgcagccgggccggggacaggggcagggatgtgctctccgcggtgctttccggcatggggaccgcctacccacaggtggcagatatgctgttggagctctgtgtcaccgagttggaggatgtggccacagactcgcagagcggccgcctctcttctcagcctgtggtggtggagagtagccacccttacaccgacgacacctccaccagtggcacagtgaagataccaggtgcagaaggactcagggtagaatttgaccggcagtgctccacagagaggcgccacgaccctctcacagtcatggacggcgtcaacaggatcgtctccgtgcggtcaggccgagagtggtccgactggtccagcgagctgcgcatcccaggggatgagttaaagtggaagttcatcagcgatgggtctgtgaatggctggggctggcgcttcaccgtctatcccatcatgccagctgctggccctaaagaactcctctctgaccgctgcgtcctctcctgtccatccatggacttggtgacgtgtctgttagacttccgactcaaccttgcctctaacagaagcatcgtccctcgccttgcggcctcgctggcagcttgtgcacagctgagtgccctagctgccagtcacagaatgtgggcccttcagagactgaggaagctgcttacaactgaatttgggcagtcaattaacataaataggctgcttggagaaaatgatggggaaacaagagctttgagttttacaggtagtgctcttgctgctttggtgaaaggtcttccagaagctttgcaaaggcagtttgaatatgaagatcctattgtgaggggtggcaaacagctgctccacagcccattctttaaggtactggtagctcttgcttgtgacctggagctggacactctgccttgctgtgccgagacgcacaagtgggcctggttccggaggtactgcatggcctcccgtgttgctgtggcccttgacaaaagaacaccgttgccccgtctgtttcttgatgaggtggctaagaaaattcgtgaattaatggcagacagcgaaaacatggatgttctgcatgagagccatgacatttttaaaagagagcaagacgaacaacttgtgcagtggatgaacaggcgaccagatgactggactctctctgctggtggcagtggaacaatttatggatggggacataatcacaggggccagctcgggggcattgaaggcgcaaaagtcaaagttcccactccctgtgaagcccttgcaactctcagacccgtgcagttaatcggaggggaacagaccctctttgctgtgacggctgatgggaagctgtatgccactgggtatggtgcaggtggcagactaggcattggagggacagagtcggtgtccaccccaacattgcttgaatccattcagcatgtgtttattaagaaagtagctgtgaactctggaggaaagcactgccttgccctgtcttcagaaggagaagtttactcttggggtgaggcagaagatgggaagttggggcatggcaacagaagtccgtgtgaccgccctcgtgtcatcgagtctctgagaggaattgaagtggtcgatgttgctgctggcggagcccacagcgcctgtgtcacagcagccggggacctctacacatggggcaaaggccgctacggccggctggggcacagcgacagtgaggaccagctgaagccgaagctggtggaggcgctgcagggccaccgtgtggttgacatcgcctgtggcagtggagatgcccagaccctctgcctcacagatgacgacactgtctggtcctggggggacggggactacggcaagctcggccggggaggcagcgatggctgtaaagtgcctatgaagattgattctcttactggtcttggagtagttaaagtggaatgcggatcccagttttctgttgcccttaccaaatctggagctgtttatacctggggcaaaggcgattatcacaggttgggccatggatcagatgaccatgttcgaaggcctcggcaggtccaagggttgcaggggaagaaagtcatcgccatcgccactggctccctgcactgtgtgtgctgcacagaggatggtgaggtttatacatggggcgacaatgatgagggacaactgggagacggaaccaccaatgccatccagaggcctcggttggtagctgcccttcagggtaagaaggtcaaccgtgtggcctgtggctcagcacataccctcgcctggtcgaccagcaagcccgccagtgctggcaaactccctgcacaggtccccatggagtacaatcacctgcaggagatccccatcattgcgctgaggaaccgtctgctgctgctgcaccacctctccgagctcttctgcccctgcatccccatgttcgacctggaaggctcgctcgacgaaactggactcgggccttctgttgggttcgacactctccgaggaattctgatatcccagggaaaggaggcggctttccggaaagtagtacaagcaactatggtacgcgatcgtcagcatggccccgtcgtggagctgaaccgcatccaggtcaaacgatcaaggagcaaaggcgggctggccggccccgacggcaccaagtctgtctttgggcagatgtgtgctaagatgagctcgtttggtcccgacagcctcctccttcctcaccgtgtctggaaagtcaagtttgtgggtgaatctgtggatgactgtgggggcggctacagcgagtccatagctgagatctgtgaggagctgcagaacggactcacgcccctgctgatcgtgacacccaacgggagggatgagtctggggccaaccgagactgctacctgctcagcccggccgccagagcacccgtgcacagcagcatgttccgcttcctgggtgtgttgctgggcattgccatccgaaccgggagtcccctgagcctcaaccttgccgagcctgtctggaagcagctggctgggatgagcctcaccatcgcggacctcagtgaggttgataaggattttattcctggactcatgtacatccgagacaatgaagccacctcagaggagtttgaagccatgagcctgcccttcacagtgccaagtgccagtggccaggacattcagttgagctccaagcacacacacatcaccctggacaaccgcgcggagtacgtgcggctggcgataaactatagactccatgaatttgatgagcaggtggctgctgttcgggaaggaatggcccgcgttgtgcctgttcccctcctctctctgttcaccggctacgaactggagacgatggtgtgtggcagccctgacatcccgctgcaccttctcaagtcggtggccacctataaaggcatcgagccttccgcatcgctgatccagtggttctgggaggtgatggagtccttctccaacacagagcgctctcttttccttcgcttcgtctggggccggacgaggctgcccaggaccatcgccgacttccggggccgagacttcgtcatccaggtgttggataaatacaaccctccagaccacttcctccctgagtcctacacctgtttcttcttgctgaagctgcccaggtattcctgcaagcaggtgctggaggagaagctcaagtacgccatccacttctgcaagtccatagacacagatgactacgctcgcatcgcacttacaggagagccagccgccgacgacagcagcgacgattcagataacgaggatgtcgactcctttgcttcggactctacacaagattatttaacaggacactaagatggggaaacgtcctcgtgagatgagagcctgagccaggcagcagagcgctcgctgctgtgtagactgtaggctgcctggtgtgtctgatgagaagcgtccgtcctcgagccaggcgggaggagggagtggagagactgactggccgtgatgggaatgacagtgagaaggtccgcctgtgcgcgtggaacactgtggacgctcgacttccaagggtcttctcacccgtaatgctgcattacatgtaggactgtgtttactaaagtgtgtaaatgtttatataaataccaaattgcagcatccccaaaatgaataaagcctttttacttgtgggtgcaatcgattttttttctttctcctttctttcaagtgtcgtgagtcgtcttgattgtatattggaaataactgtgtaacaaatcgtattataaatatttcaattaattttactctgaatttgtttattaaaagacttttgaacatgaaatgattagtattacttgaatgcatccagaggatatttaaaccaaaatgaaaaaccagaaggccatttggtgtcccccctcccaggtgtccccttgtagcatatgcattatgtcatctgaattgaggcctttctgtgaacagcatcataacttctatcatggaaagtgtactatatataatgtttgtgtcatgtatatgcctaaattttaattatctataaataaaacatctgacataaaa

SEQ ID NO: 13383 - DNA, 3513 bp, Homo sapiens
  source 1..3513: mol_type = unassigned DNA
tcagtagctgaggctgcggttccccgacgccacgcagctgcgcgcagctggttcccgctctgcagcgcaacgcctgaggcagtgggcgcgctcagtcccgggaccaggcgttctctcctctcgcctctgggcctgggaccccgcaaagcggcgatggagcggaggtcgcggaggaagtcgcggcgcaacgggcgctcgaccgcgggcaaggccgccgcgacccagcccgcgaagtctccgggcgcacagctctggctctttcccagcgccgcgggcctccaccgcgcgctgctccggagggtggaggtgacgcgccaactctgctgctcgccggggcgcctcgcggtcttggaacgcggcggggcgggcgtccaggttcaccagctgctcgccgggagcggcggcgcccggacgccgaaatgcattaaattaggaaaaaacatgaagatacattccgtggaccaaggagcagagcacatgctgattctctcatcagatggaaaaccatttgagtatgacaactatagcatgaaacatctaaggtttgaaagcattttacaagaaaaaaaaataattcagatcacatgtggagattaccattctcttgcactctcaaaaggtggtgagctttttgcctggggacagaacctgcatgggcagcttggagttggaaggaaatttccctcaaccaccacaccacagattgtggagcacctcgcaggagtacccttggctcagatttctgccggagaagcccacagcatggccttatccatgtctggcaacatttattcatggggaaaaaatgaatgtggacaactaggcctgggccacactgagagtaaagatgatccatcccttattgaaggactagacaatcagaaagttgaatttgtcgcttgtggtggctctcacagtgccctactcacacaggatgggctgctgtttactttcggtgctggaaaacatgggcaacttggtcataattcaacacagaatgagctaagaccctgtttggtggctgagcttgttgggtatagagtgactcagatagcatgtggaaggtggcacacacttgcctatgtttctgatttgggaaaggtcttttcctttggttctggaaaagatggacaactgggaaatggtggaacacgtgaccagctgatgccgcttccagtgaaagtatcatcaagtgaagaactcaaacttgaaagccatacctcagaaaaggagttaataatgattgctggagggaatcaaagcattttgctctggataaagaaagagaattcatatgttaatctgaagaggacaattcctactctgaatgaagggactgtaaagagatggattgctgatgtggagactaaacggtggcagagcacaaaaagggaaatccaagagatattttcatctcctgcttgtctaactggaagttttttaaggaaaagaagaactacagaaatgatgcctgtttatttggacttaaataaagcaagaaacatcttcaaggagttaacccaaaaggactggattactaacatgataaccacctgcctcaaagataatctgctcaaaagacttccatttcattctccaccccaagaagctttagaaattttcttccttctcccagaatgtcctatgatgcatatttccaacaactgggagagccttgtggttccatttgcaaaggttgtttgtaaaatgagtgaccagtcttcactggttctggaagagtattgggcaactctgcaagaatccactttcagcaaactggtccagatgtttaaaacagccgtcatatgccagttggattactgggatgaaagtgctgaggagaatggtaatgttcaagctctcctagaaatgttgaagaagctgcacagggtaaaccaggtgaaatgtcaactacctgaaagtattttccaagtagacgaactcttgcaccgtctcaatttttttgtagaagtatgcagaaggtacttgtggaaaatgactgtggacgcttcagaaaatgtacaatgctgcgtcatattcagtcactttccatttatctttaataatctgtcgaaaattaaactactacatacagacacacttttaaaaatagagagtaaaaaacataaagcttatcttaggtcggcagcaattgaggaagaaagagagtctgaattcgctttgaggcccacgtttgatctaacagtcagaaggaatcacttgattgaggatgttttgaatcagctaagtcaatttgagaatgaagacctgaggaaagagttatgggtttcatttagtggagaaattgggtatgacctcggaggagtcaagaaagagttcttctactgtctgtttgcagagatgatccagccggaatatgggatgttcatgtatcctgaaggggcttcctgcatgtggtttcctgtcaagcctaaatttgagaagaaaagatacttcttttttggggttctatgtggactttccctgttcaattgcaatgttgccaaccttcctttcccactggcactgtttaagaaacttttggaccaaatgccatcattggaagacttgaaagaactcagtcctgatttgggaaagaatttgcaaacacttctggatgatgaaggtgataactttgaggaagtattttacatccattttaatgtgcactgggacagaaacgacacaaacttaattcctaatggaagtagcataactgtcaaccagactaacaagagagactatgtttctaagtatatcaattacattttcaacgactctgtaaaggcggtttatgaagaatttcggagaggattttataaaatgtgcgacgaagacattatcaaattattccaccccgaagaactgaaggatgtgattgttggaaatacagattatgattggaaaacatttgaaaagaatgcacgttatgaaccaggatataacagttcacatcccaccatagtgatgttttggaaggctttccacaaattgactctggaagaaaagaaaaaattccttgtatttcttacaggaactgacagactacaaatgaaagatttaaataatatgaaaataacattttgctgtcctgaaagttggaatgaaagagaccctataagagcactgacatgtttcagtgtcctcttcctccctaaatattctacaatggaaacagttgaagaagcgcttcaagaagccatcaacaacaacagaggatttggctgaccagcttgcttgtccaacagccttattttgttgttgttatcgttgttgttgttgttgttgttgttgtttctctactttgttttgttttaggcttttagcagcctgaagccatggtttttcatttctgtctctagtgataagcaggaaagagggatgaagaagagggtttactggccggttagaacccgtgactgtattctctcccttggatacccctatgcctacatcatattccttacctcttttgggaaatatttttcaaaaataaaataaccgaaaaattaa

SEQ ID NO: 13384 - DNA, 5488 bp, Homo sapiens
  source 1..5488: mol_type = unassigned DNA
gaggctttcgactgagggctagcgaggggagcacggctggagcagggctggagcagggctggagcagggctggagcagggctgaagcagggccgcggaccccgcacgctcctgcgggccccgcggagccattgcggccgaggcctcggcaggcgccagcggagagctagccgcatcttcgggggcagcccggcagctgccggcggcgcggcgagagagcggctgacagaggggatgcgaggtcctccagcagcctgacctgagtgggttagtgatccagagaaaccagcaggccaacttggtcaggaaggttcgggaagctgttggagcagtgtggggaatttcccaccaggatgagtatgattggctgtgattttagatcgtaaagctgaaaattgaaatcatgaaagtagacaggactaaactgaagaagacacctactgaggctcctgcagactgcagagccttaatagacaaactcaaagtttgtaatgatgagcaacttctcttggaactgcagcagatcaaaacatggaacattggaaagtgcgagttatatcactgggtggacctgttggaccgcttcgatggaatactggcagatgctggacagacagtggagaatatgtcatggatgctcgtatgtgataggccagaaagagagcaactgaaaatgcttctcttggctgtgttgaacttcacagccttgctcattgagtacagcttttcccggcatctgtacagttccatagagcatttgacaactttattggcttcctctgatatgcaagtggtgctggcagtcctcaatctcctatatgtatttagcaaaagatcaaactacatcactcgtctgggatctgacaagaggaccccgctgctaactcggctacaacatttggcagagagctggggtggaaaggagaatggctttggacttgcagaatgttgcagagacttgcatatgatgaaatatccacccagtgcaactacactacactttgaattctatgcagatcctggggccgaggtcaaaattgagaaaaggacaactagtaacacactacattatattcacatagagcaacttgacaagatttcagaaagcccttctgaaatcatggaatctcttaccaaaatgtacagcattcctaaggataagcagatgctgttatttacacacatacgactggcccatggcttttctaatcacaggaagcgattgcaggcagttcaggccagactgcatgcaatatctatattagtgtattccaatgccttgcaggaatcagcaaacagtatcttgtataatggcttgatagaggagttggtagatgtccttcagataacggataagcagcttatggagattaaagcagcttctttacgaacattaacatcaattgtccacttggagagaactcccaaactcagcagtattattgactgtactggaactgcctcctaccatggatttttgccagtgcttgtaaggaactgtatccaggccatgattgatccttccatggatccataccctcaccagtttgccactgctctcttctcttttttataccatctggccagctacgatgctggtggtgaagccttggtctcctgtggaatgatggaagccttattgaaggtcataaagtttcttggcgatgaacaggaccagataacatttgtcaccagagccgtcagagtggttgaccttatcaccaacctggatatggcagcttttcaatcccatagtggactttctatcttcatttatagacttgagcatgaagtagatttgtgccgaaaagaatgtccgtttgtgatcaagccaaagatccagagacccaatactacacaagaaggagaggaaatggaaactgatatggatggagtccagtgtattccacaacgagcagcacttctgaaatccatgttgaatttcctcaagaaggccatccaagaccctgctttctcagatggcatacgacatgtgatggatggttctctgcctacctccctgaaacacatcatcagcaatgcagaatactatggcccatcactcttcctcctagctactgaagtggtgactgtgtttgtatttcaagaaccatcactgctctcctcactccaggacaatggattgacagatgtcatgctgcatgcactgcttatcaaagatgttcctgctacccgtgaagtccttggctccctcccaaatgtattcagtgcactctgtttgaatgcccgaggtcttcagtcttttgttcagtgtcagccttttgaacgcctcttcaaagttcttctgtctccagattacctcccagccatgcggaggaggagaagttctgatccccttggggatactgcatccaacctggggagtgctgtcgatgagctcatgagacatcagcccacccttaaaacagatgcaacgactgccatcatcaagttacttgaagaaatctgtaatcttggaagggaccccaaatacatctgtcagaagccatcaatccagaaggcagatggcactgccactgctcctcccccaaggtctaatcatgccgcagaagaagcctctagtgaggatgaggaggaagaggaagtacaggccatgcagagctttaattctacccagcaaaatgaaactgagcctaatcagcaggttgttggtacagaggaacgtattcctattcccctcatggattacatccttaatgtgatgaaatttgtggaatctattctgagcaacaatacaacagatgaccactgccaggaatttgtgaatcagaaaggactgttgcctttggttaccattttgggtcttcccaatctgcccattgactttcccacatctgctgcctgtcaggctgttgcaggtgtctgcaaatccatattgacactgtcacatgaacccaaagtccttcaagagggtctccttcagttggactccatcctctcctccctggagcccttacaccgccccattgaatcccctgggggctcagtgttgttgcgagaactggcttgcgcaggcaatgttgctgatgctaccctctcagcccaggccacacctctgctgcatgcactcactgctgcccatgcctacatcatgatgtttgttcatacttgcagagttggacagagtgaaattcgttccatctccgtaaaccagtggggctctcaattgggtctgagtgttttgagcaagctgagccagttatactgttccctggtgtgggaaagcactgtcctcctctctctgtgtaccccaaacagcctaccatctgggtgtgaatttggccaggcagatatgcagaaactggttccaaaggatgagaaggcaggtacgacccagggcggaaaaagatcagatggggaacaggatggagcagctggaagtatggatgcttctacccagggcttattagaaggcattgggctagatggtgacacattggctcccatggagacagatgaacctactgcttcagactctaagggcaaatctaaaatcacaccagcaatggctgccagaattaagcaaatcaagcctttgttatcagcttcctccagattaggccgagcacttgctgagctatttggacttcttgttaaactttgtgtgggatctcctgtccgccagagaaggagccatcatgctgccagcaccactacagcaccgacacctgccgcgcgatcaacagcctcagctctcactaagctcttgactaaggggttatcttggcagcccccaccatatacacctactccccgattcaggctgacattcttcatctgttcagttggtttcacatccccaatgctgtttgatgagaggaagtatccctaccacctcatgctgcaaaaatttctctgctccggaggccacaatgctctttttgaaactttcaactgggctctgtccatgggaggtaaagttcctgtttctgagggattggaacactcagacttgcctgatggcacaggagaattcctagatgcctggcttatgctggtggagaagatggtgaatcccaccacggtgcttgaatctccacattcgctgcctgccaaattgcctggaggtgtccagaactttccccagttcagtgcactgcgcttccttgtggtaactcagaaagcagcctttacttgcatcaaaaacttatggaaccggaaacccctgaaggtatatggtggacgaatggctgaatcgatgctggccattctatgccacatcctccgaggagaacctgtgattcgagagagactaagcaaggagaaggaggggtctcgaggagaagaggatacagggcaagaggaaggtggctcccgccgggaacctcaagtcaaccagcaacaactgcaacagctcatggacatgggcttcacaagggaacatgcaatggaggcactgttgaacaccagcaccatggagcaggccacagagtaccttttaacccaccctcctccaatcatgggaggagttgttcgggatctcagcatgtctgaagaggaccagatgatgagagcaattgctatgtctctgggacaggatattccaatggatcaaagggcagagtcacctgaggaagttgcttgccggaaggaggaagaggaacggaaagctcgggaaaagcaggaggaggaagaggctaaatgtctagagaagttccaggatgctgacccgttggaacaagatgagctccacactttcacagatactatgttgccaggctgcttccaccttcttgatgagctgccagacacagtataccgtgtgtgtgacctgatcatgacagcaatcaaacgtaatggagcagattatcgtgacatgattctgaagcaagtagtcaatcaggtgtgggaagctgctgatgtattgatcaaagctgctcttcccctgacaacaagtgacacaaaaaccgtgtcagagtggataagtcagatggccacactgccccaggcctccaatttggctactagaatcttgcttttaacgctactttttgaggagttgaagctaccttgtgcttgggtggttgaatcaagtggcatccttaatgtcctaatcaaactcttggaagtggttcagccctgcctccaggcagccaaggagcagaaggaagtccagaccccaaagtggatcacaccagtgttgctcctgattgatttctatgaaaagacagccatctcctcaaaaaggagagcccagatgactaagtacctgcaatccaacagcaacaactggcgctggtttgatgatcgctctgggcgttggtgtagttacagtgcaagcaacaatagcactattgattctgcctggaaatctggagagacaagcgtgcgattcactgcaggccgaagaagatacacggtccaattcactacaatggtgcagggtacctcggctgaataaaaattcaaaaaacagcaatggacaggaactagagaagacgctggaagaaagcaaagaaatggatatc

SEQ ID NO: 13385 - DNA, 14692 bp, Homo sapiens
  source 1..14692: mol_type = unassigned DNA
gaggctttcgactgagggctagcgaggggagcacggctggagcagggctggagcagggctggagcagggctggagcagggctgaagcagggccgcggaccccgcacgctcctgcgggccccgcggagccattgcggccgaggcctcggcaggcgccagcggagagctagccgcatcttcgggggcagcccggcagctgccggcggcgcggcgagagagcggctgacagaggggatgcgaggtcctccagcagcctgacctgagtgggttagtgatccagagaaaccagcaggccaacttggtcaggaaggttcgggaagctgttggagcagtgtggggaatttcccaccaggatgagtatgattggctgtgattttagatcgtaaagctgaaaattgaaatcatgaaagtagacaggactaaactgaagaagacacctactgaggctcctgcagactgcagagccttaatagacaaactcaaagtttgtaatgatgagcaacttctcttggaactgcagcagatcaaaacatggaacattggaaagtgcgagttatatcactgggtggacctgttggaccgcttcgatggaatactggcagatgctggacagacagtggagaatatgtcatggatgctcgtatgtgataggccagaaagagagcaactgaaaatgcttctcttggctgtgttgaacttcacagccttgctcattgagtacagcttttcccggcatctgtacagttccatagagcatttgacaactttattggcttcctctgatatgcaagtggtgctggcagtcctcaatctcctatatgtatttagcaaaagatcaaactacatcactcgtctgggatctgacaagaggaccccgctgctaactcggctacaacatttggcagagagctggggtggaaaggagaatggctttggacttgcagaatgttgcagagacttgcatatgatgaaatatccacccagtgcaactacactacactttgaattctatgcagatcctggggccgaggtcaaaattgagaaaaggacaactagtaacacactacattatattcacatagagcaacttgacaagatttcagaaagcccttctgaaatcatggaatctcttaccaaaatgtacagcattcctaaggataagcagatgctgttatttacacacatacgactggcccatggcttttctaatcacaggaagcgattgcaggcagttcaggccagactgcatgcaatatctatattagtgtattccaatgccttgcaggaatcagcaaacagtatcttgtataatggcttgatagaggagttggtagatgtccttcagataacggataagcagcttatggagattaaagcagcttctttacgaacattaacatcaattgtccacttggagagaactcccaaactcagcagtattattgactgtactggaactgcctcctaccatggatttttgccagtgcttgtaaggaactgtatccaggccatgattgatccttccatggatccataccctcaccagtttgccactgctctcttctcttttttataccatctggccagctacgatgctggtggtgaagccttggtctcctgtggaatgatggaagccttattgaaggtcataaagtttcttggcgatgaacaggaccagataacatttgtcaccagagccgtcagagtggttgaccttatcaccaacctggatatggcagcttttcaatcccatagtggactttctatcttcatttatagacttgagcatgaagtagatttgtgccgaaaagaatgtccgtttgtgatcaagccaaagatccagagacccaatactacacaagaaggagaggaaatggaaactgatatggatggagtccagtgtattccacaacgagcagcacttctgaaatccatgttgaatttcctcaagaaggccatccaagaccctgctttctcagatggcatacgacatgtgatggatggttctctgcctacctccctgaaacacatcatcagcaatgcagaatactatggcccatcactcttcctcctagctactgaagtggtgactgtgtttgtatttcaagaaccatcactgctctcctcactccaggacaatggattgacagatgtcatgctgcatgcactgcttatcaaagatgttcctgctacccgtgaagtccttggctccctcccaaatgtattcagtgcactctgtttgaatgcccgaggtcttcagtcttttgttcagtgtcagccttttgaacgcctcttcaaagttcttctgtctccagattacctcccagccatgcggaggaggagaagttctgatccccttggggatactgcatccaacctggggagtgctgtcgatgagctcatgagacatcagcccacccttaaaacagatgcaacgactgccatcatcaagttacttgaagaaatctgtaatcttggaagggaccccaaatacatctgtcagaagccatcaatccagaaggcagatggcactgccactgctcctcccccaaggtctaatcatgccgcagaagaagcctctagtgaggatgaggaggaagaggaagtacaggccatgcagagctttaattctacccagcaaaatgaaactgagcctaatcagcaggttgttggtacagaggaacgtattcctattcccctcatggattacatccttaatgtgatgaaatttgtggaatctattctgagcaacaatacaacagatgaccactgccaggaatttgtgaatcagaaaggactgttgcctttggttaccattttgggtcttcccaatctgcccattgactttcccacatctgctgcctgtcaggctgttgcaggtgtctgcaaatccatattgacactgtcacatgaacccaaagtccttcaagagggtctccttcagttggactccatcctctcctccctggagcccttacaccgccccattgaatcccctgggggctcagtgttgttgcgagaactggcttgcgcaggcaatgttgctgatgctaccctctcagcccaggccacacctctgctgcatgcactcactgctgcccatgcctacatcatgatgtttgttcatacttgcagagttggacagagtgaaattcgttccatctccgtaaaccagtggggctctcaattgggtctgagtgttttgagcaagctgagccagttatactgttccctggtgtgggaaagcactgtcctcctctctctgtgtaccccaaacagcctaccatctgggtgtgaatttggccaggcagatatgcagaaactggttccaaaggatgagaaggcaggtacgacccagggcggaaaaagatcagatggggaacaggatggagcagctggaagtatggatgcttctacccagggcttattagaaggcattgggctagatggtgacacattggctcccatggagacagatgaacctactgcttcagactctaagggcaaatctaaaatcacaccagcaatggctgccagaattaagcaaatcaagcctttgttatcagcttcctccagattaggccgagcacttgctgagctatttggacttcttgttaaactttgtgtgggatctcctgtccgccagagaaggagccatcatgctgccagcaccactacagcaccgacacctgccgcgcgatcaacagcctcagctctcactaagctcttgactaaggggttatcttggcagcccccaccatatacacctactccccgattcaggctgacattcttcatctgttcagttggtttcacatccccaatgctgtttgatgagaggaagtatccctaccacctcatgctgcaaaaatttctctgctccggaggccacaatgctctttttgaaactttcaactgggctctgtccatgggaggtaaagttcctgtttctgagggattggaacactcagacttgcctgatggcacaggagaattcctagatgcctggcttatgctggtggagaagatggtgaatcccaccacggtgcttgaatctccacattcgctgcctgccaaattgcctggaggtgtccagaactttccccagttcagtgcactgcgcttccttgtggtaactcagaaagcagcctttacttgcatcaaaaacttatggaaccggaaacccctgaaggtatatggtggacgaatggctgaatcgatgctggccattctatgccacatcctccgaggagaacctgtgattcgagagagactaagcaaggagaaggaggggtctcgaggagaagaggatacagggcaagaggaaggtggctcccgccgggaacctcaagtcaaccagcaacaactgcaacagctcatggacatgggcttcacaagggaacatgcaatggaggcactgttgaacaccagcaccatggagcaggccacagagtaccttttaacccaccctcctccaatcatgggaggagttgttcgggatctcagcatgtctgaagaggaccagatgatgagagcaattgctatgtctctgggacaggatattccaatggatcaaagggcagagtcacctgaggaagttgcttgccggaaggaggaagaggaacggaaagctcgggaaaagcaggaggaggaagaggctaaatgtctagagaagttccaggatgctgacccgttggaacaagatgagctccacactttcacagatactatgttgccaggctgcttccaccttcttgatgagctgccagacacagtataccgtgtgtgtgacctgatcatgacagcaatcaaacgtaatggagcagattatcgtgacatgattctgaagcaagtagtcaatcaggtgtgggaagctgctgatgtattgatcaaagctgctcttcccctgacaacaagtgacacaaaaaccgtgtcagagtggataagtcagatggccacactgccccaggcctccaatttggctactagaatcttgcttttaacgctactttttgaggagttgaagctaccttgtgcttgggtggttgaatcaagtggcatccttaatgtcctaatcaaactcttggaagtggttcagccctgcctccaggcagccaaggagcagaaggaagtccagaccccaaagtggatcacaccagtgttgctcctgattgatttctatgaaaagacagccatctcctcaaaaaggagagcccagatgactaagtacctgcaatccaacagcaacaactggcgctggtttgatgatcgctctgggcgttggtgtagttacagtgcaagcaacaatagcactattgattctgcctggaaatctggagagacaagcgtgcgattcactgcaggccgaagaagatacacggtccaattcactacaatggtgcaggttaatgaggaaacagggaaccgacgccctgtgatgctgactctcctcagggtacctcggctgaataaaaattcaaaaaacagcaatggacaggaactagagaagacgctggaagaaagcaaagaaatggatatcaaacgtaaagaaaataaaggcaatgatacccctttggccctagagagtacaaacactgaaaaggagacaagcctggaggaaacaaaaatcggggagatcctgatccagggcttgacagaagatatggtgactgttttaatccgggcctgcgtgagcatgctgggagtccctgtggacccagatactttgcatgccacccttcgtctctgtctgaggctcacccgggaccacaaatatgccatgatgtttgcagaactgaagagtacccgcatgatcttgaatttgacccagagctcaggcttcaatgggtttactcccctggtcacccttctcttaagacacatcattgaggacccctgtacccttcgtcataccatggaaaaggttgttcgctcagcagctacaagtggagctggtagcactacctctggtgttgtgtctggcagcctcggctctcgggagatcaactacatccttcgtgtccttgggccagccgcatgccgcaatccagacatattcacagaagtggccaactgctgtatccgcatcgcccttcctgcccctcgaggctcaggaactgcttcagatgatgaatttgagaatcttagaattaaaggccctaatgctgtacagctggtgaagaccacccctttgaagccctcacctctgcctgtcatccctgatactatcaaggaagtgatctatgatatgctgaatgctctggctgcataccatgctccagaggaagcagataaatctgatcctaaacctggggttatgacccaagaggttggccagctcctgcaagacatgggtgatgatgtataccagcagtaccggtcacttacgcgtcagagcagtgactttgatacgcagtcaggtttttccattaatagtcaggtctttgctgcagatggtgcctccactgagacttccgcatctgggacctcccaaggagaggcttcaactccagaggagtctcgagatgggaagaaagataaagaaggggaccgggcctctgaggaaggcaaacagaaaggcaagggcagcaaacctttaatgcctacctccactatccttcgtcttctggcagagttggtgaggtcctatgttggtattgctaccctgattgccaactacagctacactgtgggccagtctgaactgatcaaagaggactgcagtgtgctagcttttgttctggaccacctgctcccacatacccagaatgcagaagacaaggacacccctgccttggcccgcctgttcctcgcaagcctggctgctgcagggagtggcacagatgcccaggtggccctagtgaatgaagtaaaagcagcccttggacgggcactggctatggctgagagtacagagaaacatgccaggcttcaggcagtgatgtgtatcatcagtactatcatggagtcctgcccctccacctccagcttctacagcagtgccacagcgaagacccagcacaatggcatgaacaacatcattcggcttttcctgaagaagggactggttaatgacctggccagagtacctcacagcttagacctgtccagtcccaacatggccaacacagtcaatgctgctctgaagcctttggaaacactttcccggattgtgaaccagcccagtagcctttttggcagcaagagtgcttctagcaagaacaagtctgagcaggatgcccaaggagcctctcaagattccagtagcaaccagcaggacccaggcgagcctggggaagcagaagtgcaggaggaggatcatgatgtcactcagacagaggtggcagatggggatatcatggatggggaggctgaaaccgactcagtggtgattgctgggcagcctgaggtgctcagttcacaagagatgcaggttgagaatgagctggaggacctgatagatgagttgcttgagagggatggcggatctgggaacagtacaattatagtgagcagaagtggagaggatgaatcacaagaggacgtgctgatggatgaagctccttccaacctcagccaagcttccaccttgcaggccaaccgagaagattccatgaatatcctggaccctgaggatgaggaggagcacactcaggaagaggacagcagtggcagtaacgaggatgaggatgatagtcaggatgaagaggaggaggaggaggaagatgaggaagatgatcaggaggatgatgaaggtgaagagggagatgaagacgatgacgacgatggctctgagatggaattggatgaggattatcctgatatgaacgcttctcccttggtccgatttgagcgctttgaccgggaggatgatctcatcattgagtttgacaacatgttctccagtgctacagacatccccccatccccaggaaatatccctaccacccatccactgatggtgcgccatgcagaccacagttctctgacactgggcagtggctcttcaacaactcgtctcacccagggcatcgggcgcagtcagaggaccctaaggcagctgacggccaatactggccacaccattcatgttcactaccctgggaatcgccagcccaaccctcctcttatactgcagaggttgcttggtccctcagctgctgctgacatccttcagctgagcagcagccttcccctacaaagccggggtcgggcccgcctcctggtaggcaacgatgacgtccacatcatcgcccgttctgatgatgagctgctggatgactttttccatgatcagagcacagctaccagccaagcaggaaccctgtccagcatccccacagccctgacccgctggacagaagaatgcaaagttctcgatgctgagagcatgcatgactgtgtttcagtggttaaagtgtccattgtcaatcacctggaattcctgagggatgaggagctggaagaaaggcgagagaagcgcaggaaacaactggctgaggaagaaacaaagataactgataaaggcaaagaagataaggagaacagggatcagagtgcacagtgtactgcatctaagtcaaatgactccactgaacagaatctctcagatgggacgcctatgcctgacagctacccaacaaccccatcttcaactgatgcagctacatctgagtccaaggagacccttggcactctgcaatcctcacaacagcaaccaacactcccaaccccaccagctttgggagaggttcctcaggagctgcagtctccagctggagaagggggcagctctacacagctattgatgcctgtagagccagaggaattgggtcccacaaggccaagtggggaagcagaaacaactcagatggagttatccccagctcccactataacctcactttccccagagagagctgaggattctgatgcactgacggctgtcagcagtcagctagaaggctctcctatggatacaagcagcctggcttcctgtaccttagaggaggctgtgggtgacacttcagcagctggcagttctgagcagcccagagcaggcagctccactcctggggatgccccaccagctgtggcggaagtgcaaggcaggagtgatgggtcaggggaatctgcccagccacctgaggacagctccccacctgcatcctctgagagctcttccaccagagattctgccgtggccatttctggagcagattcccgaggaatcctagaagagccgttgccttcaacaagcagtgaagaagaagatccccttgcgggtatcagtctccctgaaggtgtggacccctcttttctggctgccctgcctgatgacatccgtcgggaagttctacagaaccagctaggcattcgtccaccaacccggactgccccctccacaaatagctcagcgcctgcagtggtggggaatcctggtgtgactgaagtgagccctgagtttctggctgccctgcctccagccattcaggaggaagtactggcacagcagagagctgagcagcagcgacgagaactagcacagaatgccagctcagacacccctatggaccctgtgaccttcatccagactctgccctcagacctgcgccgtagtgtcctagaggatatggaggacagtgtgttagctgtgatgccacctgacattgcagctgaggctcaagccctgagacgagagcaagaagcccggcagcgacagctcatgcatgagcgtctgtttgggcacagtagcacctccgcactctctgctattctccgaagcccggctttcaccagtcgcttaagtggcaaccgtggggtccagtatactcgccttgctgtgcagagaggtggcaccttccagatggggggtagcagcagccataacaggccttctggcagtaatgtagatactctcctccgcctccgaggacggctccttctggaccacgaagccctttcttgtctcttggtcctactttttgtggatgagccaaagctcaatactagccgtctacaccgagtactgagaaatctctgctaccatgcccagacccgccactgggtcatccgcagtctgctctccatcttgcagcgcagcagtgagagtgagctatgcattgaaacacccaaactcactacaagtgaggaaaagggcaaaaagtcgagcaagagctgtgggtcaagtagccatgagaaccgtcccctggacctgctacacaagatggagtcaaagagctccaaccagctttcctggctctcagtatccatggatgcagccctaggctgcaggactaatatatttcagatccagcgttcaggggggcgtaaacataccgagaagcatgcaagcggtggctccaccgtccacatccatccccaagctgctcctgttgtctgcagacacgttttggatacactcattcaattggccaaggtatttcccagccacttcacacagcagcggaccaaagaaacaaactgtgagagtgatcgggaaaggggcaataaggcctgtagcccatgctcctcacagtcctccagcagtggcatttgcacagacttctgggacttattggtaaaactggacaacatgaatgtcagccggaaaggcaagaactccgtgaagtcagtgccagtgagcgctggcggtgagggggaaacctctccatacagcctcgaggcctctccactggggcagctcatgaacatgttgtcacacccagtcatccgccggagctctctcttaactgagaaactcctcagactcctttctctcatctcaattgctctcccagaaaacaaggtgtcagaagcacaggctaattctggcagcggtgcttcctccaccaccactgccacctcaaccacatctaccaccaccaccactgccgcctccaccacgcccacaccccctactgcacccacccctgtcacttctgctccagccctggttgctgccacggctatttccaccattgtcgtagctgcttcgaccacagtgactacccccacgactgctaccactactgtttcaatttctcccactactaagggcagcaaatctccagcgaaggtgagtgatgggggcagcagcagtacagactttaagatggtgtcctctggcctcactgaaaaccagctacagctctctgtagaggtgttgacatcccactcttgttctgaggaaggcttagaggatgcagccaacgtactactgcagctctcccggggggactctgggacccgggacactgttctcaagctgctactgaatggagcccgccatctgggttataccctttgtaaacaaataggtaccctgctggccgagctgcgggaatacaacctcgagcagcagcggcgagcccaatgtgaaaccctctctcctgatggcctgcctgaggagcagccacagaccaccaagctgaagggcaaaatgcagagcaggtttgacatggctgagaatgtggtaattgtggcatctcagaagcgacctttgggtggccgggagctccagctgccttctatgtccatgttgacatccaagacatctacccagaagttcttcttgagggtactacaggtcatcatccagctccgggacgacacgcgccgggctaacaagaaagccaagcagacaggcaggctaggttcctccggtttaggctcagctagcagcatccaggcagctgttcggcagctggaggctgaggctgatgccattatacaaatggtacgtgagggtcaaagggcgcggagacagcaacaagcagcaacgtcggagtctagccagtcagaggcgtctgtccggagggaggaatcacccatggatgtggaccagccatctcccagtgctcaagatactcaatccattgcctccgatggaaccccacagggggagaaggaaaaggaagaaagaccacctgagttacccctgctcagcgagcagctgagtttggacgagctgtgggacatgcttggggagtgtctaaaggaactagaggaatcccatgaccagcatgcggtgctagtgctacagcctgctgtcgaggccttctttctggtccatgccacagagcgggagagcaagcctcctgtccgagacacccgtgagagccagctggcacacatcaaggacgagcctcctccactctcccctgcccccttaaccccagccacgccttcctcccttgacccattcttctcccgggagccctcatctatgcacatctcctcaagcctgccccctgacacacagaagttccttcgctttgcagagactcaccgcactgtgttaaaccagatcctacggcagtccacgacccaccttgctgatgggccttttgctgtcctggtagactacattcgtgtcctcgactttgatgtcaagcgcaaatatttccgccaagagctggagcgtttagatgaggggctccggaaagaagacatggctgtgcatgtccgtcgtgaccatgtgtttgaagactcctatcgtgagctgcatcgcaaatcccccgaagaaatgaagaatcgattgtatatagtatttgaaggagaagaagggcaggatgctggtgggctcctgcgggagtggtatatgatcatctctcgagagatgtttaaccctatgtatgccttgttccgtacctcacctggtgatcgagtcacctacaccatcaatccatcttcccactgcaaccccaaccacctcagctacttcaagtttgtcggacgcattgtggccaaagctgtatatgacaaccgtcttctggagtgctactttactcgatccttttacaaacacatcttgggcaagtcagtcagatatacagatatggagagtgaagattaccacttctaccaaggtctggtttatctgctggaaaatgatgtctccacactaggctatgacctcaccttcagcactgaggtccaagagtttggagtttgtgaagttcgtgacctcaaacccaatggggccaacatcttggtaacagaggagaataagaaggagtatgtacacctggtatgccagatgagaatgacaggagccatccgcaagcagttggcggctttcttagaaggcttctatgagatcattccaaagcgcctcatttccatcttcactgagcaggagttagagctgcttatatcaggactgcccaccattgacatcgatgatctgaaatccaacactgaataccacaagtaccagtccaactctattcagatccagtggttctggagagcattgcgttctttcgatcaagctgaccgtgccaagttcctccagtttgtcacgggtacttccaaggtacccctgcaaggctttgctgccctcgaaggcatgaatggcattcagaagtttcagatccatcgagatgacaggtccacagatcgcctgccttcagctcacacatgttttaatcagctggatctgcctgcctatgagagctttgagaagctccgccacatgctactgttggctatccaggagtgctctgaaggctttgggctggcctaataaggccctgcccaactccgtggggttttttttaccattgttggacctggggaggggggagttaaaaaaagaaccagaaagaaattgtcaaaaaccaataaatgaaatccaccaactcaccgtgtgtgtcccagctgccccatcttccccagcgcatacctgttcctcttctcattctctccccgccgcctgtttcctcaccttctctcccctttccatgccgtccatgatccccaccccatgtgttttaaaaaggcagtagcctttgcagggacctgtctgtcccaactgtttgaacagtgtgctcctcagattctgtgttcagaaggatttgctgcattgagacttgaaacctttggataggggaaaaaattatatatatatatatttttttgttctgtttgcatttcttaatttgtgcttggaatgtgttgatgtgcacagctaatgattcaatgcgagacaagattggcgtctgtgttgtggaggtttcaaataaagagcactcttcataactcacttttcacaatggagtttttttcaaacttaaaaaaaaaaacaaaaaactcttaagcacatgctaggcatctggagaaaagatggattctccaggaaaccatccctgccctacccgcttgcccacctgcctccaccactggtgcaacttcctccttcagagtcagtttctgcagtcaggagagatgagcagttcaccaggaattgggggtgggggcatctgttttttttttttagaatgggagctgcacttggggatggtgatggtgttagagattgcagcccaggacaaagcatcaccttgctcaaggggaacaaactgcagcaggttgtacaaaacattcagagagctcacttgacccaaccgagggttttacttggtgagcctttctagtagtcttgagtctggggctcagttttagatttttatttcattaatgtttgtttatttctaataaattttaataagcgagtaatttaactaggtcgccagaagaccattatttttgtttgtctatttttgttgtcgtcactccctctctcgtcatctgtctgccagtctgttcacagatcaccttgtagtcccttgtggtttttactccatccagtgcttaaagctgatctaaggacttcgatggttccagccttc

SEQ ID NO: 13386 - DNA, 14796 bp, Homo sapiens
  source 1..14796: mol_type = unassigned DNA
tccgcccctcactgcttcgttaggttgtgcgtcatttgcttttcgcttcgcgtagggtgaagctgtagctacttcggctttggtgggagggaggaggggtctggaaagggctgggctcaggcttttcccgtccggtagaggttctcgcgggatcgcgcggaggcggcggtggctcggttactgactgcagtagccgcggaggcggcggcaaggtcttcggctcgtgccgttctaagccggagaattctcgcgggagcagggttacgtcctcgtgggattcgttggcggtggctgaggtcctccagcagcctgacctgagtgggttagtgatccagagaaaccagcaggccaacttggtcaggaaggttcgggaagctgttggagcagtgtggggaatttcccaccaggatgagtatgattggctgtgattttagatcgtaaagctgaaaattgaaatcatgaaagtagacaggactaaactgaagaagacacctactgaggctcctgcagactgcagagccttaatagacaaactcaaagtttgtaatgatgagcaacttctcttggaactgcagcagatcaaaacatggaacattggaaagtgcgagttatatcactgggtggacctgttggaccgcttcgatggaatactggcagatgctggacagacagtggagaatatgtcatggatgctcgtatgtgataggccagaaagagagcaactgaaaatgcttctcttggctgtgttgaacttcacagccttgctcattgagtacagcttttcccggcatctgtacagttccatagagcatttgacaactttattggcttcctctgatatgcaagtggtgctggcagtcctcaatctcctatatgtatttagcaaaagatcaaactacatcactcgtctgggatctgacaagaggaccccgctgctaactcggctacaacatttggcagagagctggggtggaaaggagaatggctttggacttgcagaatgttgcagagacttgcatatgatgaaatatccacccagtgcaactacactacactttgaattctatgcagatcctggggccgaggtcaaaattgagaaaaggacaactagtaacacactacattatattcacatagagcaacttgacaagatttcagaaagcccttctgaaatcatggaatctcttaccaaaatgtacagcattcctaaggataagcagatgctgttatttacacacatacgactggcccatggcttttctaatcacaggaagcgattgcaggcagttcaggccagactgcatgcaatatctatattagtgtattccaatgccttgcaggaatcagcaaacagtatcttgtataatggcttgatagaggagttggtagatgtccttcagataacggataagcagcttatggagattaaagcagcttctttacgaacattaacatcaattgtccacttggagagaactcccaaactcagcagtattattgactgtactggaactgcctcctaccatggatttttgccagtgcttgtaaggaactgtatccaggccatgattgatccttccatggatccataccctcaccagtttgccactgctctcttctcttttttataccatctggccagctacgatgctggtggtgaagccttggtctcctgtggaatgatggaagccttattgaaggtcataaagtttcttggcgatgaacaggaccagataacatttgtcaccagagccgtcagagtggttgaccttatcaccaacctggatatggcagcttttcaatcccatagtggactttctatcttcatttatagacttgagcatgaagtagatttgtgccgaaaagaatgtccgtttgtgatcaagccaaagatccagagacccaatactacacaagaaggagaggaaatggaaactgatatggatggagtccagtgtattccacaacgagcagcacttctgaaatccatgttgaatttcctcaagaaggccatccaagaccctgctttctcagatggcatacgacatgtgatggatggttctctgcctacctccctgaaacacatcatcagcaatgcagaatactatggcccatcactcttcctcctagctactgaagtggtgactgtgtttgtatttcaagaaccatcactgctctcctcactccaggacaatggattgacagatgtcatgctgcatgcactgcttatcaaagatgttcctgctacccgtgaagtccttggctccctcccaaatgtattcagtgcactctgtttgaatgcccgaggtcttcagtcttttgttcagtgtcagccttttgaacgcctcttcaaagttcttctgtctccagattacctcccagccatgcggaggaggagaagttctgatccccttggggatactgcatccaacctggggagtgctgtcgatgagctcatgagacatcagcccacccttaaaacagatgcaacgactgccatcatcaagttacttgaagaaatctgtaatcttggaagggaccccaaatacatctgtcagaagccatcaatccagaaggcagatggcactgccactgctcctcccccaaggtctaatcatgccgcagaagaagcctctagtgaggatgaggaggaagaggaagtacaggccatgcagagctttaattctacccagcaaaatgaaactgagcctaatcagcaggttgttggtacagaggaacgtattcctattcccctcatggattacatccttaatgtgatgaaatttgtggaatctattctgagcaacaatacaacagatgaccactgccaggaatttgtgaatcagaaaggactgttgcctttggttaccattttgggtcttcccaatctgcccattgactttcccacatctgctgcctgtcaggctgttgcaggtgtctgcaaatccatattgacactgtcacatgaacccaaagtccttcaagagggtctccttcagttggactccatcctctcctccctggagcccttacaccgccccattgaatcccctgggggctcagtgttgttgcgagaactggcttgcgcaggcaatgttgctgatgctaccctctcagcccaggccacacctctgctgcatgcactcactgctgcccatgcctacatcatgatgtttgttcatacttgcagagttggacagagtgaaattcgttccatctccgtaaaccagtggggctctcaattgggtctgagtgttttgagcaagctgagccagttatactgttccctggtgtgggaaagcactgtcctcctctctctgtgtaccccaaacagcctaccatctgggtgtgaatttggccaggcagatatgcagaaactggttccaaaggatgagaaggcaggtacgacccagggcggaaaaagatcagatggggaacaggatggagcagctggaagtatggatgcttctacccagggcttattagaaggcattgggctagatggtgacacattggctcccatggagacagatgaacctactgcttcagactctaagggcaaatctaaaatcacaccagcaatggctgccagaattaagcaaatcaagcctttgttatcagcttcctccagattaggccgagcacttgctgagctatttggacttcttgttaaactttgtgtgggatctcctgtccgccagagaaggagccatcatgctgccagcaccactacagcaccgacacctgccgcgcgatcaacagcctcagctctcactaagctcttgactaaggggttatcttggcagcccccaccatatacacctactccccgattcaggctgacattcttcatctgttcagttggtttcacatccccaatgctgtttgatgagaggaagtatccctaccacctcatgctgcaaaaatttctctgctccggaggccacaatgctctttttgaaactttcaactgggctctgtccatgggaggtaaagttcctgtttctgagggattggaacactcagacttgcctgatggcacaggagaattcctagatgcctggcttatgctggtggagaagatggtgaatcccaccacggtgcttgaatctccacattcgctgcctgccaaattgcctggaggtgtccagaactttccccagttcagtgcactgcgcttccttgtggtaactcagaaagcagcctttacttgcatcaaaaacttatggaaccggaaacccctgaaggtatatggtggacgaatggctgaatcgatgctggccattctatgccacatcctccgaggagaacctgtgattcgagagagactaagcaaggagaaggaggggtctcgaggagaagaggatacagggcaagaggaaggtggctcccgccgggaacctcaagtcaaccagcaacaactgcaacagctcatggacatgggcttcacaagggaacatgcaatggaggcactgttgaacaccagcaccatggagcaggccacagagtaccttttaacccaccctcctccaatcatgggaggagttgttcgggatctcagcatgtctgaagaggaccagatgatgagagcaattgctatgtctctgggacaggatattccaatggatcaaagggcagagtcacctgaggaagttgcttgccggaaggaggaagaggaacggaaagctcgggaaaagcaggaggaggaagaggctaaatgtctagagaagttccaggatgctgacccgttggaacaagatgagctccacactttcacagatactatgttgccaggctgcttccaccttcttgatgagctgccagacacagtataccgtgtgtgtgacctgatcatgacagcaatcaaacgtaatggagcagattatcgtgacatgattctgaagcaagtagtcaatcaggtgtgggaagctgctgatgtattgatcaaagctgctcttcccctgacaacaagtgacacaaaaaccgtgtcagagtggataagtcagatggccacactgccccaggcctccaatttggctactagaatcttgcttttaacgctactttttgaggagttgaagctaccttgtgcttgggtggttgaatcaagtggcatccttaatgtcctaatcaaactcttggaagtggttcagccctgcctccaggcagccaaggagcagaaggaagtccagaccccaaagtggatcacaccagtgttgctcctgattgatttctatgaaaagacagccatctcctcaaaaaggagagcccagatgactaagtacctgcaatccaacagcaacaactggcgctggtttgatgatcgctctgggcgttggtgtagttacagtgcaagcaacaatagcactattgattctgcctggaaatctggagagacaagcgtgcgattcactgcaggccgaagaagatacacggtccaattcactacaatggtgcaggttaatgaggaaacagggaaccgacgccctgtgatgctgactctcctcagggtacctcggctgaataaaaattcaaaaaacagcaatggacaggaactagagaagacgctggaagaaagcaaagaaatggatatcaaacgtaaagaaaataaaggcaatgatacccctttggccctagagagtacaaacactgaaaaggagacaagcctggaggaaacaaaaatcggggagatcctgatccagggcttgacagaagatatggtgactgttttaatccgggcctgcgtgagcatgctgggagtccctgtggacccagatactttgcatgccacccttcgtctctgtctgaggctcacccgggaccacaaatatgccatgatgtttgcagaactgaagagtacccgcatgatcttgaatttgacccagagctcaggcttcaatgggtttactcccctggtcacccttctcttaagacacatcattgaggacccctgtacccttcgtcataccatggaaaaggttgttcgctcagcagctacaagtggagctggtagcactacctctggtgttgtgtctggcagcctcggctctcgggagatcaactacatccttcgtgtccttgggccagccgcatgccgcaatccagacatattcacagaagtggccaactgctgtatccgcatcgcccttcctgcccctcgaggctcaggaactgcttcagatgatgaatttgagaatcttagaattaaaggccctaatgctgtacagctggtgaagaccacccctttgaagccctcacctctgcctgtcatccctgatactatcaaggaagtgatctatgatatgctgaatgctctggctgcataccatgctccagaggaagcagataaatctgatcctaaacctggggttatgacccaagaggttggccagctcctgcaagacatgggtgatgatgtataccagcagtaccggtcacttacgcgtcagagcagtgactttgatacgcagtcaggtttttccattaatagtcaggtctttgctgcagatggtgcctccactgagacttccgcatctgggacctcccaaggagaggcttcaactccagaggagtctcgagatgggaagaaagataaagaaggggaccgggcctctgaggaaggcaaacagaaaggcaagggcagcaaacctttaatgcctacctccactatccttcgtcttctggcagagttggtgaggtcctatgttggtattgctaccctgattgccaactacagctacactgtgggccagtctgaactgatcaaagaggactgcagtgtgctagcttttgttctggaccacctgctcccacatacccagaatgcagaagacaaggacacccctgccttggcccgcctgttcctcgcaagcctggctgctgcagggagtggcacagatgcccaggtggccctagtgaatgaagtaaaagcagcccttggacgggcactggctatggctgagagtacagagaaacatgccaggcttcaggcagtgatgtgtatcatcagtactatcatggagtcctgcccctccacctccagcttctacagcagtgccacagcgaagacccagcacaatggcatgaacaacatcattcggcttttcctgaagaagggactggttaatgacctggccagagtacctcacagcttagacctgtccagtcccaacatggccaacacagtcaatgctgctctgaagcctttggaaacactttcccggattgtgaaccagcccagtagcctttttggcagcaagagtgcttctagcaagaacaagtctgagcaggatgcccaaggagcctctcaagattccagtagcaaccagcaggacccaggcgagcctggggaagcagaagtgcaggaggaggatcatgatgtcactcagacagaggtggcagatggggatatcatggatggggaggctgaaaccgactcagtggtgattgctgggcagcctgaggtgctcagttcacaagagatgcaggttgagaatgagctggaggacctgatagatgagttgcttgagagggatggcggatctgggaacagtacaattatagtgagcagaagtggagaggatgaatcacaagaggacgtgctgatggatgaagctccttccaacctcagccaagcttccaccttgcaggccaaccgagaagattccatgaatatcctggaccctgaggatgaggaggagcacactcaggaagaggacagcagtggcagtaacgaggatgaggatgatagtcaggatgaagaggaggaggaggaggaagatgaggaagatgatcaggaggatgatgaaggtgaagagggagatgaagacgatgacgacgatggctctgagatggaattggatgaggattatcctgatatgaacgcttctcccttggtccgatttgagcgctttgaccgggaggatgatctcatcattgagtttgacaacatgttctccagtgctacagacatccccccatccccaggaaatatccctaccacccatccactgatggtgcgccatgcagaccacagttctctgacactgggcagtggctcttcaacaactcgtctcacccagggcatcgggcgcagtcagaggaccctaaggcagctgacggccaatactggccacaccattcatgttcactaccctgggaatcgccagcccaaccctcctcttatactgcagaggttgcttggtccctcagctgctgctgacatccttcagctgagcagcagccttcccctacaaagccggggtcgggcccgcctcctggtaggcaacgatgacgtccacatcatcgcccgttctgatgatgagctgctggatgactttttccatgatcagagcacagctaccagccaagcaggaaccctgtccagcatccccacagccctgacccgctggacagaagaatgcaaagttctcgatgctgagagcatgcatgactgtgtttcagtggttaaagtgtccattgtcaatcacctggaattcctgagggatgaggagctggaagaaaggcgagagaagcgcaggaaacaactggctgaggaagaaacaaagataactgataaaggcaaagaagataaggagaacagggatcagagtgcacagtgtactgcatctaagtcaaatgactccactgaacagaatctctcagatgggacgcctatgcctgacagctacccaacaaccccatcttcaactgatgcagctacatctgagtccaaggagacccttggcactctgcaatcctcacaacagcaaccaacactcccaaccccaccagctttgggagaggttcctcaggagctgcagtctccagctggagaagggggcagctctacacagctattgatgcctgtagagccagaggaattgggtcccacaaggccaagtggggaagcagaaacaactcagatggagttatccccagctcccactataacctcactttccccagagagagctgaggattctgatgcactgacggctgtcagcagtcagctagaaggctctcctatggatacaagcagcctggcttcctgtaccttagaggaggctgtgggtgacacttcagcagctggcagttctgagcagcccagagcaggcagctccactcctggggatgccccaccagctgtggcggaagtgcaaggcaggagtgatgggtcaggggaatctgcccagccacctgaggacagctccccacctgcatcctctgagagctcttccaccagagattctgccgtggccatttctggagcagattcccgaggaatcctagaagagccgttgccttcaacaagcagtgaagaagaagatccccttgcgggtatcagtctccctgaaggtgtggacccctcttttctggctgccctgcctgatgacatccgtcgggaagttctacagaaccagctaggcattcgtccaccaacccggactgccccctccacaaatagctcagcgcctgcagtggtggggaatcctggtgtgactgaagtgagccctgagtttctggctgccctgcctccagccattcaggaggaagtactggcacagcagagagctgagcagcagcgacgagaactagcacagaatgccagctcagacacccctatggaccctgtgaccttcatccagactctgccctcagacctgcgccgtagtgtcctagaggatatggaggacagtgtgttagctgtgatgccacctgacattgcagctgaggctcaagccctgagacgagagcaagaagcccggcagcgacagctcatgcatgagcgtctgtttgggcacagtagcacctccgcactctctgctattctccgaagcccggctttcaccagtcgcttaagtggcaaccgtggggtccagtatactcgccttgctgtgcagagaggtggcaccttccagatggggggtagcagcagccataacaggccttctggcagtaatgtagatactctcctccgcctccgaggacggctccttctggaccacgaagccctttcttgtctcttggtcctactttttgtggatgagccaaagctcaatactagccgtctacaccgagtactgagaaatctctgctaccatgcccagacccgccactgggtcatccgcagtctgctctccatcttgcagcgcagcagtgagagtgagctatgcattgaaacacccaaactcactacaagtgaggaaaagggcaaaaagtcgagcaagagctgtgggtcaagtagccatgagaaccgtcccctggacctgctacacaagatggagtcaaagagctccaaccagctttcctggctctcagtatccatggatgcagccctaggctgcaggactaatatatttcagatccagcgttcaggggggcgtaaacataccgagaagcatgcaagcggtggctccaccgtccacatccatccccaagctgctcctgttgtctgcagacacgttttggatacactcattcaattggccaaggtatttcccagccacttcacacagcagcggaccaaagaaacaaactgtgagagtgatcgggaaaggggcaataaggcctgtagcccatgctcctcacagtcctccagcagtggcatttgcacagacttctgggacttattggtaaaactggacaacatgaatgtcagccggaaaggcaagaactccgtgaagtcagtgccagtgagcgctggcggtgagggggaaacctctccatacagcctcgaggcctctccactggggcagctcatgaacatgttgtcacacccagtcatccgccggagctctctcttaactgagaaactcctcagactcctttctctcatctcaattgctctcccagaaaacaaggtgtcagaagcacaggctaattctggcagcggtgcttcctccaccaccactgccacctcaaccacatctaccaccaccaccactgccgcctccaccacgcccacaccccctactgcacccacccctgtcacttctgctccagccctggttgctgccacggctatttccaccattgtcgtagctgcttcgaccacagtgactacccccacgactgctaccactactgtttcaatttctcccactactaagggcagcaaatctccagcgaaggtgagtgatgggggcagcagcagtacagactttaagatggtgtcctctggcctcactgaaaaccagctacagctctctgtagaggtgttgacatcccactcttgttctgaggaaggcttagaggatgcagccaacgtactactgcagctctcccggggggactctgggacccgggacactgttctcaagctgctactgaatggagcccgccatctgggttataccctttgtaaacaaataggtaccctgctggccgagctgcgggaatacaacctcgagcagcagcggcgagcccaatgtgaaaccctctctcctgatggcctgcctgaggagcagccacagaccaccaagctgaagggcaaaatgcagagcaggtttgacatggctgagaatgtggtaattgtggcatctcagaagcgacctttgggtggccgggagctccagctgccttctatgtccatgttgacatccaagacatctacccagaagttcttcttgagggtactacaggtcatcatccagctccgggacgacacgcgccgggctaacaagaaagccaagcagacaggcaggctaggttcctccggtttaggctcagctagcagcatccaggcagctgttcggcagctggaggctgaggctgatgccattatacaaatggtacgtgagggtcaaagggcgcggagacagcaacaagcagcaacgtcggagtctagccagtcagaggcgtctgtccggagggaggaatcacccatggatgtggaccagccatctcccagtgctcaagatactcaatccattgcctccgatggaaccccacagggggagaaggaaaaggaagaaagaccacctgagttacccctgctcagcgagcagctgagtttggacgagctgtgggacatgcttggggagtgtctaaaggaactagaggaatcccatgaccagcatgcggtgctagtgctacagcctgctgtcgaggccttctttctggtccatgccacagagcgggagagcaagcctcctgtccgagacacccgtgagagccagctggcacacatcaaggacgagcctcctccactctcccctgcccccttaaccccagccacgccttcctcccttgacccattcttctcccgggagccctcatctatgcacatctcctcaagcctgccccctgacacacagaagttccttcgctttgcagagactcaccgcactgtgttaaaccagatcctacggcagtccacgacccaccttgctgatgggccttttgctgtcctggtagactacattcgtgtcctcgactttgatgtcaagcgcaaatatttccgccaagagctggagcgtttagatgaggggctccggaaagaagacatggctgtgcatgtccgtcgtgaccatgtgtttgaagactcctatcgtgagctgcatcgcaaatcccccgaagaaatgaagaatcgattgtatatagtatttgaaggagaagaagggcaggatgctggtgggctcctgcgggagtggtatatgatcatctctcgagagatgtttaaccctatgtatgccttgttccgtacctcacctggtgatcgagtcacctacaccatcaatccatcttcccactgcaaccccaaccacctcagctacttcaagtttgtcggacgcattgtggccaaagctgtatatgacaaccgtcttctggagtgctactttactcgatccttttacaaacacatcttgggcaagtcagtcagatatacagatatggagagtgaagattaccacttctaccaaggtctggtttatctgctggaaaatgatgtctccacactaggctatgacctcaccttcagcactgaggtccaagagtttggagtttgtgaagttcgtgacctcaaacccaatggggccaacatcttggtaacagaggagaataagaaggagtatgtacacctggtatgccagatgagaatgacaggagccatccgcaagcagttggcggctttcttagaaggcttctatgagatcattccaaagcgcctcatttccatcttcactgagcaggagttagagctgcttatatcaggactgcccaccattgacatcgatgatctgaaatccaacactgaataccacaagtaccagtccaactctattcagatccagtggttctggagagcattgcgttctttcgatcaagctgaccgtgccaagttcctccagtttgtcacgggtacttccaaggtacccctgcaaggctttgctgccctcgaaggcatgaatggcattcagaagtttcagatccatcgagatgacaggtccacagatcgcctgccttcagctcacacatgttttaatcagctggatctgcctgcctatgagagctttgagaagctccgccacatgctactgttggctatccaggagtgctctgaaggctttgggctggcctaataaggccctgcccaactccgtggggttttttttaccattgttggacctggggaggggggagttaaaaaaagaaccagaaagaaattgtcaaaaaccaataaatgaaatccaccaactcaccgtgtgtgtcccagctgccccatcttccccagcgcatacctgttcctcttctcattctctccccgccgcctgtttcctcaccttctctcccctttccatgccgtccatgatccccaccccatgtgttttaaaaaggcagtagcctttgcagggacctgtctgtcccaactgtttgaacagtgtgctcctcagattctgtgttcagaaggatttgctgcattgagacttgaaacctttggataggggaaaaaattatatatatatatatttttttgttctgtttgcatttcttaatttgtgcttggaatgtgttgatgtgcacagctaatgattcaatgcgagacaagattggcgtctgtgttgtggaggtttcaaataaagagcactcttcataactcacttttcacaatggagtttttttcaaacttaaaaaaaaaaacaaaaaactcttaagcacatgctaggcatctggagaaaagatggattctccaggaaaccatccctgccctacccgcttgcccacctgcctccaccactggtgcaacttcctccttcagagtcagtttctgcagtcaggagagatgagcagttcaccaggaattgggggtgggggcatctgttttttttttttagaatgggagctgcacttggggatggtgatggtgttagagattgcagcccaggacaaagcatcaccttgctcaaggggaacaaactgcagcaggttgtacaaaacattcagagagctcacttgacccaaccgagggttttacttggtgagcctttctagtagtcttgagtctggggctcagttttagatttttatttcattaatgtttgtttatttctaataaattttaataagcgagtaatttaactaggtcgccagaagaccattatttttgtttgtctatttttgttgtcgtcactccctctctcgtcatctgtctgccagtctgttcacagatcaccttgtagtcccttgtggtttttactccatccagtgcttaaagctgatctaaggacttcgatggttccagccttcaaagaaaaaataatttaataaaaatttagttagaaaaaataaccccaa

SEQ ID NO: 13387 - DNA, 4382 bp, Homo sapiens
  source 1..4382: mol_type = unassigned DNA
caattgtccacttggagagaactcccaaactcagcagtattattgactgtactggaactgcctcctaccatggatttttgccagtgcttgtaaggaactgtatccaggccatgattgatccttccatggatccataccctcaccagtttgccactgctctcttctcttttttataccatctggccagctacgatgctggtggtgaagccttggtctcctgtggaatgatggaagccttattgaaggtcataaagtttcttggcgatgaacaggaccagataacatttgtcaccagagccgtcagagtggttgaccttatcaccaacctggatatggcagcttttcaatcccatagtggactttctatcttcatttatagacttgagcatgaagtagatttgtgccgaaaagaatgtccgtttgtgatcaagccaaagatccagagacccaatactacacaagaaggagaggaaatggaaactgatatggatgttgcagatgtggctatggaaagcagtccaggctcatccatctctatggagcacaggctggatgttgaattaagggcatcaggttccagcagcagcactaacatctcttctggccccagccctggtcccagtcccggcaccggccccggccccggccccggccccggccccggccctggccccggccccggccccggtcctggtcccggccctggccccggccctggccctggcccccgtcctggagtccagtgtattccacaacgagcagcacttctgaaatccatgttgaatttcctcaagaaggccatccaagaccctgctttctcagatggcatacgacatgtgatggatggttctctgcctacctccctgaaacacatcatcagcaatgcagaatactatggcccatcactcttcctcctagctactgaagtggtgactgtgtttgtatttcaagaaccatcactgctctcctcactccaggacaatggattgacagatgtcatgctgcatgcactgcttatcaaagatgttcctgctacccgtgaagtccttggctccctcccaaatgtattcagtgcactctgtttgaatgcccgaggtcttcagtcttttgttcagtgtcagccttttgaacgcctcttcaaagttcttctgtctccagattacctcccagccatgcggaggaggagaagttctgatccccttggggatactgcatccaacctggggagtgctgtcgatgagctcatgagacatcagcccacccttaaaacagatgcaacgactgccatcatcaagttacttgaagaaatctgtaatcttggaagggaccccaaatacatctgtcagaagccatcaatccagaaggcagatggcactgccactgctcctcccccaaggtctaatcatgccgcagaagaagcctctagtgaggatgaggaggaagaggaagtacaggccatgcagagctttaattctacccagcaaaatgaaactgagcctaatcagcaggttgttggtacagaggaacgtattcctattcccctcatggattacatccttaatgtgatgaaatttgtggaatctattctgagcaacaatacaacagatgaccactgccaggaatttgtgaatcagaaaggactgttgcctttggttaccattttgggtcttcccaatctgcccattgactttcccacatctgctgcctgtcaggctgttgcaggtgtctgcaaatccatattgacactgtcacatgaacccaaagtccttcaagagggtctccttcagttggactccatcctctcctccctggagcccttacaccgccccattgaatcccctgggggctcagtgttgttgcgagaactggcttgcgcaggcaatgttgctgatgctaccctctcagcccaggccacacctctgctgcatgcactcactgctgcccatgcctacatcatgatgtttgttcatacttgcagagttggacagagtgaaattcgttccatctccgtaaaccagtggggctctcaattgggtctgagtgttttgagcaagctgagccagttatactgttccctggtgtgggaaagcactgtcctcctctctctgtgtaccccaaacagcctaccatctgggtgtgaatttggccaggcagatatgcagaaactggttccaaaggatgagaaggcaggtacgacccagggcggaaaaagatcagatggggaacaggatggagcagctggaagtatggatgcttctacccagggcttattagaaggcattgggctagatggtgacacattggctcccatggagacagatgaacctactgcttcagactctaagggcaaatctaaaatcacaccagcaatggctgccagaattaagcaaatcaagcctttgttatcagcttcctccagattaggccgagcacttgctgagctatttggacttcttgttaaactttgtgtgggatctcctgtccgccagagaaggagccatcatgctgccagcaccactacagcaccgacacctgccgcgcgatcaacagcctcagctctcactaagctcttgactaaggggttatcttggcagcccccaccatatacacctactccccgattcaggctgacattcttcatctgttcagttggtttcacatccccaatgctgtttgatgagaggaagtatccctaccacctcatgctgcaaaaatttctctgctccggaggccacaatgctctttttgaaactttcaactgggctctgtccatgggaggtaaagttcctgtttctgagggattggaacactcagacttgcctgatggcacaggagaattcctagatgcctggcttatgctggtggagaagatggtgaatcccaccacggtgcttgaatctccacattcgctgcctgccaaattgcctggaggtgtccagaactttccccagttcagtgcactgcgcttccttgtggtaactcagaaagcagcctttacttgcatcaaaaacttatggaaccggaaacccctgaaggtatatggtggacgaatggctgaatcgatgctggccattctatgccacatcctccgaggagaacctgtgattcgagagagactaagcaaggagaaggaggggtctcgaggagaagaggatacagggcaagaggaaggtggctcccgccgggaacctcaagtcaaccagcaacaactgcaacagctcatggacatgggcttcacaagggaacatgcaatggaggcactgttgaacaccagcaccatggagcaggccacagagtaccttttaacccaccctcctccaatcatgggaggagttgttcgggatctcagcatgtctgaagaggaccagatgatgagagcaattgctatgtctctgggacaggatattccaatggatcaaagggcagagtcacctgaggaagttgcttgccggaaggaggaagaggaacggaaagctcgggaaaagcaggaggaggaagaggctaaatgtctagagaagttccaggatgctgacccgttggaacaagatgagctccacactttcacagatactatgttgccaggctgcttccaccttcttgatgagctgccagacacagtataccgtgtgtgtgacctgatcatgacagcaatcaaacgtaatggagcagattatcgtgacatgattctgaagcaagtagtcaatcaggtgtgggaagctgctgatgtattgatcaaagctgctcttcccctgacaacaagtgacacaaaaaccgtgtcagagtggataagtcagatggccacactgccccaggcctccaatttggctactagaatcttgcttttaacgctactttttgaggagttgaagctaccttgtgcttgggtggttgaatcaagtggcatccttaatgtcctaatcaaactcttggaagtggttcagccctgcctccaggcagccaaggagcagaaggaagtccagaccccaaagtggatcacaccagtgttgctcctgattgatttctatgaaaagacagccatctcctcaaaaaggagagcccagatgactaagtacctgcaatccaacagcaacaactggcgctggtttgatgatcgctctgggcgttggtgtagttacagtgcaagcaacaatagcactattgattctgcctggaaatctggagagacaagcgtgcgattcactgcaggccgaagaagatacacggtccaattcactacaatggtgcaggttaatgaggaaacagggaaccgacgccctgtgatgctgactctcctcagggtacctcggctgaataaaaattcaaaaaacagcaatggacaggaactagagaagacgctggaagaaagcaaagaaatggatatc

SEQ ID NO: 13388 - DNA, 682 bp, Homo sapiens
  source 1..682: mol_type = unassigned DNA
ggtctcctgtggaatgatggaagccttattgaaggtcataaagtttcttggcgatgaacaggaccagataacatttgtcaccagagccgtcagagtggttgaccttatcaccaacctggatatggcagcttttcaatcccatagtggactttctatcttcatttatagacttgagcatgaagtagatttgtgccgaaaagaatgtccgtttgtgatcaagccaaagatccagagacccaatactacacaagaaggagaggaaatggaaactgatatggatgttgcagatgtggctatggaaagcagtccaggctcatccatctctatggagcacaggctggatgttgaattaagggcatcaggttccagcagcagcactaacatctcttctggccccagccctggtcccagtcccggcaccggccccggccccggccccggccccggccccggccctggccccggccccggccccggtcctggtcccggccctggccccggccctggccctggcccccgtcctggagtccagtgtattccacaacgagcagcacttctgaaatccatgttgaatttcctcaagaaggccatccaagaccctgctttctcagatggcatacgacatgtgatggatggttctctgcctacctccctgaaacacatcatcagcaatgcagaatac

SEQ ID NO: 13389 - DNA, 4805 bp, Homo sapiens
  source 1..4805: mol_type = unassigned DNA
gccttctggcagtaatgtagatactctcctccgcctccgaggacggctccttctggaccacgaagccctttcttgtctcttggtcctactttttgtggatgagccaaagctcaatactagccgtctacaccgagtactgagaaatctctgctaccatgcccagacccgccactgggtcatccgcagtctgctctccatcttgcagcgcagcagtgagagtgagctatgcattgaaacacccaaactcactacaagtgaggaaaagggcaaaaagtcgagcaagagctgtgggtcaagtagccatgagaaccgtcccctggacctgctacacaagatggagtcaaagagctccaaccagctttcctggctctcagtatccatggatgcagccctaggctgcaggactaatatatttcagatccagcgttcaggggggcgtaaacataccgagaagcatgcaagcggtggctccaccgtccacatccatccccaagctgctcctgttgtctgcagacacgttttggatacactcattcaattggccaaggtatttcccagccacttcacacagcagcggaccaaagaaacaaactgtgagagtgatcgggaaaggggcaataaggcctgtagcccatgctcctcacagtcctccagcagtggcatttgcacagacttctgggacttattggtaaaactggacaacatgaatgtcagccggaaaggcaagaactccgtgaagtcagtgccagtgagcgctggcggtgagggggaaacctctccatacagcctcgaggcctctccactggggcagctcatgaacatgttgtcacacccagtcatccgccggagctctctcttaactgagaaactcctcagactcctttctctcatctcaattgctctcccagaaaacaaggtgtcagaagcacaggctaattctggcagcggtgcttcctccaccaccactgccacctcaaccacatctaccaccaccaccactgccgcctccaccacgcccacaccccctactgcacccacccctgtcacttctgctccagccctggttgctgccacggctatttccaccattgtcgtagctgcttcgaccacagtgactacccccacgactgctaccactactgtttcaatttctcccactactaagggcagcaaatctccagcgaaggtgagtgatgggggcagcagcagtacagactttaagatggtgtcctctggcctcactgaaaaccagctacagctctctgtagaggtgttgacatcccactcttgttctgaggaaggcttagaggatgcagccaacgtactactgcagctctcccggggggactctgggacccgggacactgttctcaagctgctactgaatggagcccgccatctgggttataccctttgtaaacaaataggtaccctgctggccgagctgcgggaatacaacctcgagcagcagcggcgagcccaatgtgaaaccctctctcctgatggcctgcctgaggagcagccacagaccaccaagctgaagggcaaaatgcagagcaggtttgacatggctgagaatgtggtaattgtggcatctcagaagcgacctttgggtggccgggagctccagctgccttctatgtccatgttgacatccaagacatctacccagaagttcttcttgagggtactacaggtcatcatccagctccgggacgacacgcgccgggctaacaagaaagccaagcagacaggcaggctaggttcctccggtttaggctcagctagcagcatccaggcagctgttcggcagctggaggctgaggctgatgccattatacaaatgtcggagtctagccagtcagaggcgtctgtccggagggaggaatcacccatggatgtggaccagccatctcccagtgctcaagatactcaatccattgcctccgatggaaccccacagggggagaaggaaaaggaagaaagaccacctgagttacccctgctcagcgagcagctgagtttggacgagctgtgggacatgcttggggagtgtctaaaggaactagaggaatcccatgaccagcatgcggtgctagtgctacagcctgctgtcgaggccttctttctggtccatgccacagagcgggagagcaagcctcctgtccgagacacccgtgagagccagctggcacacatcaaggacgagcctcctccactctcccctgcccccttaaccccagccacgccttcctcccttgacccattcttctcccgggagccctcatctatgcacatctcctcaagcctgccccctgacacacagaagttccttcgctttgcagagactcaccgcactgtgttaaaccagatcctacggcagtccacgacccaccttgctgatgggccttttgctgtcctggtagactacattcgtgtcctcgactttgatgtcaagcgcaaatatttccgccaagagctggagcgtttagatgaggggctccggaaagaagacatggctgtgcatgtccgtcgtgaccatgtgtttgaagactcctatcgtgagctgcatcgcaaatcccccgaagaaatgaagaatcgattgtatatagtatttgaaggagaagaagggcaggatgctggtgggctcctgcgggagtggtatatgatcatctctcgagagatgtttaaccctatgtatgccttgttccgtacctcacctggtgatcgagtcacctacaccatcaatccatcttcccactgcaaccccaaccacctcagctacttcaagtttgtcggacgcattgtggccaaagctgtatatgacaaccgtcttctggagtgctactttactcgatccttttacaaacacatcttgggcaagtcagtcagatatacagatatggagagtgaagattaccacttctaccaaggtctggtttatctgctggaaaatgatgtctccacactaggctatgacctcaccttcagcactgaggtccaagagtttggagtttgtgaagttcgtgacctcaaacccaatggggccaacatcttggtaacagaggagaataagaaggagtatgtacacctggtatgccagatgagaatgacaggagccatccgcaagcagttggcggctttcttagaaggcttctatgagatcattccaaagcgcctcatttccatcttcactgagcaggagttagagctgcttatatcaggactgcccaccattgacatcgatgatctgaaatccaacactgaataccacaagtaccagtccaactctattcagatccagtggttctggagagcattgcgttctttcgatcaagctgaccgtgccaagttcctccagtttgtcacgggtacttccaaggtacccctgcaaggctttgctgccctcgaaggcatgaatggcattcagaagtttcagatccatcgagatgacaggtccacagatcgcctgccttcagctcacacatgttttaatcagctggatctgcctgcctatgagagctttgagaagctccgccacatgctactgttggctatccaggagtgctctgaaggctttgggctggcctaataaggccctgcccaactccgtggggttttttttaccattgttggacctggggaggggggagttaaaaaaagaaccagaaagaaattgtcaaaaaccaataaatgaaatccaccaactcaccgtgtgtgtcccagctgccccatcttccccagcgcatacctgttcctcttctcattctctccccgccgcctgtttcctcaccttctctcccctttccatgccgtccatgatccccaccccatgtgttttaaaaaggcagtagcctttgcagggacctgtctgtcccaactgtttgaacagtgtgctcctcagattctgtgttcagaaggatttgctgcattgagacttgaaacctttggataggggaaaaaattatatatatatatatttttttgttctgtttgcatttcttaatttgtgcttggaatgtgttgatgtgcacagctaatgattcaatgcgagacaagattggcgtctgtgttgtggaggtttcaaataaagagcactcttcataactcacttttcacaatggagtttttttcaaacttaaaaaaaaaaacaaaaaactcttaagcacatgctaggcatctggagaaaagatggattctccaggaaaccatccctgccctacccgcttgcccacctgcctccaccactggtgcaacttcctccttcagagtcagtttctgcagtcaggagagatgagcagttcaccaggaattgggggtgggggcatctgttttttttttttagaatgggagctgcacttggggatggtgatggtgttagagattgcagcccaggacaaagcatcaccttgctcaaggggaacaaactgcagcaggttgtacaaaacattcagagagctcacttgacccaaccgagggttttacttggtgagcctttctagtagtcttgagtctggggctcagttttagatttttatttcattaatgtttgtttatttctaataaattttaataagcgagtaatttaactaggtcgccagaagaccattatttttgtttgtctatttttgttgtcgtcactccctctctcgtcatctgtctgccagtctgttcacagatcaccttgtagtcccttgtggtttttactccatccagtgcttaaagctgatctaaggacttcgatggttccagccttcaaagaaaaaataatttaataaaaatttagttagaaaaaataaccccaa

SEQ ID NO: 13390 - DNA, 11438 bp, Homo sapiens
  source 1..11438: mol_type = unassigned DNA
cagcctaccatctgggtgtgaatttggccaggcagatatgcagaaactggttccaaaggatgagaaggcagatggggaacaggatggagcagctggaagtatggatgcttctacccagggcttattagaaggcattgggctagatggtgacacattggctcccatggagacagatgaacctactgcttcagactctaagggcaaatctaaaatcacaccagcaatggctgccagaattaagcaaatcaagcctttgttatcagcttcctccagattaggccgagcacttgctgagctatttggacttcttgttaaactttgtgtgggatctcctgtccgccagagaaggagccatcatgctgccagcaccactacagcaccgacacctgccgcgcgatcaacagcctcagctctcactaagctcttgactaaggggttatcttggcagcccccaccatatacacctactccccgattcaggctgacattcttcatctgttcagttggtttcacatccccaatgctgtttgatgagaggaagtatccctaccacctcatgctgcaaaaatttctctgctccggaggccacaatgctctttttgaaactttcaactgggctctgtccatgggaggtaaagttcctgtttctgagggattggaacactcagacttgcctgatggcacaggagaattcctagatgcctggcttatgctggtggagaagatggtgaatcccaccacggtgcttgaatctccacattcgctgcctgccaaattgcctggaggtgtccagaactttccccagttcagtgcactgcgcttccttgtggtaactcagaaagcagcctttacttgcatcaaaaacttatggaaccggaaacccctgaaggtatatggtggacgaatggctgaatcgatgctggccattctatgccacatcctccgaggagaacctgtgattcgagagagactaagcaaggagaaggaggggtctcgaggagaagaggatacagggcaagaggaaggtggctcccgccgggaacctcaagtcaaccagcaacaactgcaacagctcatggacatgggcttcacaagggaacatgcaatggaggcactgttgaacaccagcaccatggagcaggccacagagtaccttttaacccaccctcctccaatcatgggaggagttgttcgggatctcagcatgtctgaagaggaccagatgatgagagcaattgctatgtctctgggacaggatattccaatggatcaaagggcagagtcacctgaggaagttgcttgccggaaggaggaagaggaacggaaagctcgggaaaagcaggaggaggaagaggctaaatgtctagagaagttccaggatgctgacccgttggaacaagatgagctccacactttcacagatactatgttgccaggctgcttccaccttcttgatgagctgccagacacagtataccgtgtgtgtgacctgatcatgacagcaatcaaacgtaatggagcagattatcgtgacatgattctgaagcaagtagtcaatcaggtgtgggaagctgctgatgtattgatcaaagctgctcttcccctgacaacaagtgacacaaaaaccgtgtcagagtggataagtcagatggccacactgccccaggcctccaatttggctactagaatcttgcttttaacgctactttttgaggagttgaagctaccttgtgcttgggtggttgaatcaagtggcatccttaatgtcctaatcaaactcttggaagtggttcagccctgcctccaggcagccaaggagcagaaggaagtccagaccccaaagtggatcacaccagtgttgctcctgattgatttctatgaaaagacagccatctcctcaaaaaggagagcccagatgactaagtacctgcaatccaacagcaacaactggcgctggtttgatgatcgctctgggcgttggtgtagttacagtgcaagcaacaatagcactattgattctgcctggaaatctggagagacaagcgtgcgattcactgcaggccgaagaagatacacggtccaattcactacaatggtgcaggttaatgaggaaacagggaaccgacgccctgtgatgctgactctcctcagggtacctcggctgaataaaaattcaaaaaacagcaatggacaggaactagagaagacgctggaagaaagcaaagaaatggatatcaaacgtaaagaaaataaaggcaatgatacccctttggccctagagagtacaaacactgaaaaggagacaagcctggaggaaacaaaaatcggggagatcctgatccagggcttgacagaagatatggtgactgttttaatccgggcctgcgtgagcatgctgggagtccctgtggacccagatactttgcatgccacccttcgtctctgtctgaggctcacccgggaccacaaatatgccatgatgtttgcagaactgaagagtacccgcatgatcttgaatttgacccagagctcaggcttcaatgggtttactcccctggtcacccttctcttaagacacatcattgaggacccctgtacccttcgtcataccatggaaaaggttgttcgctcagcagctacaagtggagctggtagcactacctctggtgttgtgtctggcagcctcggctctcgggagatcaactacatccttcgtgtccttgggccagccgcatgccgcaatccagacatattcacagaagtggccaactgctgtatccgcatcgcccttcctgcccctcgaggctcaggaactgcttcagatgatgaatttgagaatcttagaattaaaggccctaatgctgtacagctggtgaagaccacccctttgaagccctcacctctgcctgtcatccctgatactatcaaggaagtgatctatgatatgctgaatgctctggctgcataccatgctccagaggaagcagataaatctgatcctaaacctggggttatgacccaagaggttggccagctcctgcaagacatgggtgatgatgtataccagcagtaccggtcacttacgcgtcagagcagtgactttgatacgcagtcaggtttttccattaatagtcaggtctttgctgcagatggtgcctccactgagacttccgcatctgggacctcccaaggagaggcttcaactccagaggagtctcgagatgggaagaaagataaagaaggggaccgggcctctgaggaaggcaaacagaaaggcaagggcagcaaacctttaatgcctacctccactatccttcgtcttctggcagagttggtgaggtcctatgttggtattgctaccctgattgccaactacagctacactgtgggccagtctgaactgatcaaagaggactgcagtgtgctagcttttgttctggaccacctgctcccacatacccagaatgcagaagacaaggacacccctgccttggcccgcctgttcctcgcaagcctggctgctgcagggagtggcacagatgcccaggtggccctagtgaatgaagtaaaagcagcccttggacgggcactggctatggctgagagtacagagaaacatgccaggcttcaggcagtgatgtgtatcatcagtactatcatggagtcctgcccctccacctccagcttctacagcagtgccacagcgaagacccagcacaatggcatgaacaacatcattcggcttttcctgaagaagggactggttaatgacctggccagagtacctcacagcttagacctgtccagtcccaacatggccaacacagtcaatgctgctctgaagcctttggaaacactttcccggattgtgaaccagcccagtagcctttttggcagcaagagtgcttctagcaagaacaagtctgagcaggatgcccaaggagcctctcaagattccagtagcaaccagcaggacccaggcgagcctggggaagcagaagtgcaggaggaggatcatgatgtcactcagacagaggtggcagatggggatatcatggatggggaggctgaaaccgactcagtggtgattgctgggcagcctgaggtgctcagttcacaagagatgcaggttgagaatgagctggaggacctgatagatgagttgcttgagagggatggcggatctgggaacagtacaattatagtgagcagaagtggagaggatgaatcacaagaggacgtgctgatggatgaagctccttccaacctcagccaagcttccaccttgcaggccaaccgagaagattccatgaatatcctggaccctgaggatgaggaggagcacactcaggaagaggacagcagtggcagtaacgaggatgaggatgatagtcaggatgaagaggaggaggaggaggaagatgaggaagatgatcaggaggatgatgaaggtgaagagggagatgaagacgatgacgacgatggctctgagatggaattggatgaggattatcctgatatgaacgcttctcccttggtccgatttgagcgctttgaccgggaggatgatctcatcattgagtttgacaacatgttctccagtgctacagacatccccccatccccaggaaatatccctaccacccatccactgatggtgcgccatgcagaccacagttctctgacactgggcagtggctcttcaacaactcgtctcacccagggcatcgggcgcagtcagaggaccctaaggcagctgacggccaatactggccacaccattcatgttcactaccctgggaatcgccagcccaaccctcctcttatactgcagaggttgcttggtccctcagctgctgctgacatccttcagctgagcagcagccttcccctacaaagccggggtcgggcccgcctcctggtaggcaacgatgacgtccacatcatcgcccgttctgatgatgagctgctggatgactttttccatgatcagagcacagctaccagccaagcaggaaccctgtccagcatccccacagccctgacccgctggacagaagaatgcaaagttctcgatgctgagagcatgcatgactgtgtttcagtggttaaagtgtccattgtcaatcacctggaattcctgagggatgaggagctggaagaaaggcgagagaagcgcaggaaacaactggctgaggaagaaacaaagataactgataaaggcaaagaagataaggagaacagggatcagagtgcacagtgtactgcatctaagtcaaatgactccactgaacagaatctctcagatgggacgcctatgcctgacagctacccaacaaccccatcttcaactgatgcagctacatctgagtccaaggagacccttggcactctgcaatcctcacaacagcaaccaacactcccaaccccaccagctttgggagaggttcctcaggagctgcagtctccagctggagaagggggcagctctacacagctattgatgcctgtagagccagaggaattgggtcccacaaggccaagtggggaagcagaaacaactcagatggagttatccccagctcccactataacctcactttccccagagagagctgaggattctgatgcactgacggctgtcagcagtcagctagaaggctctcctatggatacaagcagcctggcttcctgtaccttagaggaggctgtgggtgacacttcagcagctggcagttctgagcagcccagagcaggcagctccactcctggggatgccccaccagctgtggcggaagtgcaaggcaggagtgatgggtcaggggaatctgcccagccacctgaggacagctccccacctgcatcctctgagagctcttccaccagagattctgccgtggccatttctggagcagattcccgaggaatcctagaagagccgttgccttcaacaagcagtgaagaagaagatccccttgcgggtatcagtctccctgaaggtgtggacccctcttttctggctgccctgcctgatgacatccgtcgggaagttctacagaaccagctaggcattcgtccaccaacccggactgccccctccacaaatagctcagcgcctgcagtggtggggaatcctggtgtgactgaagtgagccctgagtttctggctgccctgcctccagccattcaggaggaagtactggcacagcagagagctgagcagcagcgacgagaactagcacagaatgccagctcagacacccctatggaccctgtgaccttcatccagactctgccctcagacctgcgccgtagtgtcctagaggatatggaggacagtgtgttagctgtgatgccacctgacattgcagctgaggctcaagccctgagacgagagcaagaagcccggcagcgacagctcatgcatgagcgtctgtttgggcacagtagcacctccgcactctctgctattctccgaagcccggctttcaccagtcgcttaagtggcaaccgtggggtccagtatactcgccttgctgtgcagagaggtggcaccttccagatggggggtagcagcagccataacaggccttctggcagtaatgtagatactctcctccgcctccgaggacggctccttctggaccacgaagccctttcttgtctcttggtcctactttttgtggatgagccaaagctcaatactagccgtctacaccgagtactgagaaatctctgctaccatgcccagacccgccactgggtcatccgcagtctgctctccatcttgcagcgcagcagtgagagtgagctatgcattgaaacacccaaactcactacaagtgaggaaaagggcaaaaagtcgagcaagagctgtgggtcaagtagccatgagaaccgtcccctggacctgctacacaagatggagtcaaagagctccaaccagctttcctggctctcagtatccatggatgcagccctaggctgcaggactaatatatttcagatccagcgttcaggggggcgtaaacataccgagaagcatgcaagcggtggctccaccgtccacatccatccccaagctgctcctgttgtctgcagacacgttttggatacactcattcaattggccaaggtatttcccagccacttcacacagcagcggaccaaagaaacaaactgtgagagtgatcgggaaaggggcaataaggcctgtagcccatgctcctcacagtcctccagcagtggcatttgcacagacttctgggacttattggtaaaactggacaacatgaatgtcagccggaaaggcaagaactccgtgaagtcagtgccagtgagcgctggcggtgagggggaaacctctccatacagcctcgaggcctctccactggggcagctcatgaacatgttgtcacacccagtcatccgccggagctctctcttaactgagaaactcctcagactcctttctctcatctcaattgctctcccagaaaacaaggtgtcagaagcacaggctaattctggcagcggtgcttcctccaccaccactgccacctcaaccacatctaccaccaccaccactgccgcctccaccacgcccacaccccctactgcacccacccctgtcacttctgctccagccctggttgctgccacggctatttccaccattgtcgtagctgcttcgaccacagtgactacccccacgactgctaccactactgtttcaatttctcccactactaagggcagcaaatctccagcgaaggtgagtgatgggggcagcagcagtacagactttaagatggtgtcctctggcctcactgaaaaccagctacagctctctgtagaggtgttgacatcccactcttgttctgaggaaggcttagaggatgcagccaacgtactactgcagctctcccggggggactctgggacccgggacactgttctcaagctgctactgaatggagcccgccatctgggttataccctttgtaaacaaataggtaccctgctggccgagctgcgggaatacaacctcgagcagcagcggcgagcccaatgtgaaaccctctctcctgatggcctgcctgaggagcagccacagaccaccaagctgaagggcaaaatgcagagcaggtttgacatggctgagaatgtggtaattgtggcatctcagaagcgacctttgggtggccgggagctccagctgccttctatgtccatgttgacatccaagacatctacccagaagttcttcttgagggtactacaggtcatcatccagctccgggacgacacgcgccgggctaacaagaaagccaagcagacaggcaggctaggttcctccggtttaggctcagctagcagcatccaggcagctgttcggcagctggaggctgaggctgatgccattatacaaatggtacgtgagggtcaaagggcgcggagacagcaacaagcagcaacgtcggagtctagccagtcagaggcgtctgtccggagggaggaatcacccatggatgtggaccagccatctcccagtgctcaagatactcaatccattgcctccgatggaaccccacagggggagaaggaaaaggaagaaagaccacctgagttacccctgctcagcgagcagctgagtttggacgagctgtgggacatgcttggggagtgtctaaaggaactagaggaatcccatgaccagcatgcggtgctagtgctacagcctgctgtcgaggccttctttctggtccatgccacagagcgggagagcaagcctcctgtccgagacacccgtgagagccagctggcacacatcaaggacgagcctcctccactctcccctgcccccttaaccccagccacgccttcctcccttgacccattcttctcccgggagccctcatctatgcacatctcctcaagcctgccccctgacacacagaagttccttcgctttgcagagactcaccgcactgtgttaaaccagatcctacggcagtccacgacccaccttgctgatgggccttttgctgtcctggtagactacattcgtgtcctcgactttgatgtcaagcgcaaatatttccgccaagagctggagcgtttagatgaggggctccggaaagaagacatggctgtgcatgtccgtcgtgaccatgtgtttgaagactcctatcgtgagctgcatcgcaaatcccccgaagaaatgaagaatcgattgtatatagtatttgaaggagaagaagggcaggatgctggtgggctcctgcgggagtggtatatgatcatctctcgagagatgtttaaccctatgtatgccttgttccgtacctcacctggtgatcgagtcacctacaccatcaatccatcttcccactgcaaccccaaccacctcagctacttcaagtttgtcggacgcattgtggccaaagctgtatatgacaaccgtcttctggagtgctactttactcgatccttttacaaacacatcttgggcaagtcagtcagatatacagatatggagagtgaagattaccacttctaccaaggtctggtttatctgctggaaaatgatgtctccacactaggctatgacctcaccttcagcactgaggtccaagagtttggagtttgtgaagttcgtgacctcaaacccaatggggccaacatcttggtaacagaggagaataagaaggagtatgtacacctggtatgccagatgagaatgacaggagccatccgcaagcagttggcggctttcttagaaggcttctatgagatcattccaaagcgcctcatttccatcttcactgagcaggagttagagctgcttatatcaggactgcccaccattgacatcgatgatctgaaatccaacactgaataccacaagtaccagtccaactctattcagatccagtggttctggagagcattgcgttctttcgatcaagctgaccgtgccaagttcctccagtttgtcacgggtacttccaaggtacccctgcaaggctttgctgccctcgaaggcatgaatggcattcagaagtttcagatccatcgagatgacaggtccacagatcgcctgccttcagctcacacatgttttaatcagctggatctgcctgcctatgagagctttgagaagctccgccacatgctactgttggctatccaggagtgctctgaaggctttgggctggcctaataaggccctgcccaactccgtggggttttttttaccattgttggacctggggaggggggagttaaaaaaagaaccagaaagaaattgtcaaaaaccaataaatgaaatccaccaactcaccgtgtgtgtcccagctgccccatcttccccagcgcatacctgttcctcttctcattctctccccgccgcctgtttcctcaccttctctcccctttccatgccgtccatgatccccaccccatgtgttttaaaaaggcagtagcctttgcagggacctgtctgtcccaactgtttgaacagtgtgctcctcagattctgtgttcagaaggatttgctgcattgagacttgaaacctttggataggggaaaaaattatatatatatatatttttttgttctgtttgcatttcttaatttgtgcttggaatgtgttgatgtgcacagctaatgattcaatgcgagacaagattggcgtctgtgttgtggaggtttcaaataaagagcactcttcataactcacttttcacaatggagtttttttcaaacttaaaaaaaaaaacaaaaaactcttaagcacatgctaggcatctggagaaaagatggattctccaggaaaccatccctgccctacccgcttgcccacctgcctccaccactggtgcaacttcctccttcagagtcagtttctgcagtcaggagagatgagcagttcaccaggaattgggggtgggggcatctgttttttttttttagaatgggagctgcacttggggatggtgatggtgttagagattgcagcccaggacaaagcatcaccttgctcaaggggaacaaactgcagcaggttgtacaaaacattcagagagctcacttgacccaaccgagggttttacttggtgagcctttctagtagtcttgagtctggggctcagttttagatttttatttcattaatgtttgtttatttctaataaattttaataagcgagtaatttaactaggtcgccagaagaccattatttttgtttgtctatttttgttgtcgtcactccctctctcgtcatctgtctgccagtctgttcacagatcaccttgtagtcccttgtggtttttactccatccagtgcttaaagctgatctaaggacttcgatggttccagccttcaaagaaaaaataatttaataaaaatttagttagaaaaaataaccccaa

SEQ ID NO: 13391 - DNA, 1053 bp, Homo sapiens
  source 1..1053: mol_type = unassigned DNA
gaggctttcgactgagggctagcgaggggagcacggctggagcagggctggagcagggctggagcagggctggagcagggctgaagcagggccgcggaccccgcacgctcctgcgggccccgcggagccattgcggccgaggcctcggcaggcgccagcggagagctagccgcatcttcgggggcagcccggcagctgccggcggcgcggcgagagagcggctgacagaggggatgcgaggtcctccagcagcctgacctgagtgggttagtgatccagagaaaccagcaggccaacttggtcaggaaggttcgggaagctgttggagcagtgtggggaatttcccaccaggatgagtatgattggctgtgattttagatcgtaaagctgaaaattgaaatcatgaaagtagacaggactaaactgaagaagacacctactgaggctcctgcagactgcagagccttaatagacaaactcaaagtttgtaatgatgagcaacttctcttggaactgcagcagatcaaaacatggaacattggaaagtgcgagttatatcactgggtggacctgttggaccgcttcgatggaatactggcagatgctggacagacagtggagaatatgtcatggatgctcgtatgtgataggccagaaagagagcaactgaaaatgcttctcttggctgtgttgaacttcacagccttgctcattgagtacagcttttcccggcatctgtacagttccatagagcatttgacaactttattggcttcctctgatatgcaagtggtgctggcagtcctcaatctcctatatgtatttagcaaaagatcaaactacatcactcgtctgggatctgacaagaggaccccgctgctaactcggctacaacatttggcagagagctggggtggaaaggagaatggctttggacttgcagaatgttgcagagacttgcatatgatgaaatatccacccagtgcaactacactacactttgaattctatgcagatcctggggccgaggtcaaaattgagaaaaggaagtag

SEQ ID NO: 13392 - DNA, 872 bp, Homo sapiens
  source 1..872: mol_type = unassigned DNA
tccgcccctcactgcttcgttaggttgtgcgtcatttgcttttcgcttcgcgtagggtgaagctgtagctacttcggctttggtgggagggaggaggggtctggaaagggctgggctcaggcttttcccgtccggtagaggttctcgcgggatcgcgcggaggcggcggtggctcggttactgactgcagtagccgcggaggcggcggcaaggtcttcggctcgtgccgttctaagccggagaattctcgcgggagcagggttacgtcctcgtgggattcgttggcggtggctgaggtagatctctgagaagagaggaaggagtgacaataccaaataaaaactttgtctaaggttcaatggcaaagttcaacctgagttgccaggatgtttatcgtttgtctcccaatatggccaaaaagcatgtatgaaggtcctccagcagcctgacctgagtgggttagtgatccagagaaaccagcaggccaacttggtcaggaaggttcgggaagctgttggagcagtgtggggaatttcccaccaggatgagtatgattggctgtgattttagatcgtaaagctgaaaattgaaatcatgaaagtagacaggactaaactgaagaagacacctactgaggctcctgcagactgcagagccttaatagacaaactcaaagtttgtaatgatgagcaacttctcttggaactgcagcagatcaaaacatggaacattggaaagtgcgagttatatcactgggtggacctgttggaccgcttcgatggaatactggcagatgctggacagacagtggagaatatgtcatggatgctcgtatgtgataggccagaaagagagcaactgaaaatgcttct

SEQ ID NO: 13393 - DNA, 3594 bp, Homo sapiens
  source 1..3594: mol_type = unassigned DNA
aaagggcagctccgggggaaagagggtggcgtcccggggaagcccgcagccgccgccgatgtcgctgggactcggaagtgccgaaagaggggtgttgggaactcgcggcgcgcgtgaacgttgccgtcgccgccgcccgggacagcccggagaaactctcagcgtaggcatcgggaaccttcgtgccaaggagccatgctgccccgatgggaactggcactttacctacttgcctcactaggcttccacttctattccttctatgaagtttacaaagtctccagagaacacgaagaggagctggaccaggaatttgagctggagactgacactttatttggaggattaaagaaggatgcgaccgactttgagtggagcttctggatggaatgggggaagcagtggctggtgtggcttctccttggccacatggtagtgtctcaaatggccacactgctggcaagaaagcacagaccctggattctcatgctctatgggatgtgggcctgctggtgtgtgctggggacccctggtgtggctatggttttgctccataccaccatctctttctgcgtggcccagttccggtctcagctcctgacgtggctctgttctctcctcctcctctccacactgaggctgcagggtgtggaagaagttaagagaaggtggtacaagacagaaaacgagtactacctgctgcagttcacgctgaccgttcgctgcctgtactacaccagcttcagcctggagctctgctggcagcagctgcctgctgcatcgacctcctactcctttccctggatgctggcctatgtcttttattatccagtcttacacaatgggcccatcctcagcttctcggagttcatcaaacagatgcagcagcaggagcatgactccctgaaggccagcctgtgtgtcctggccctggggctgggccgccttctttgctggtggtggctggccgagctgatggctcacctgatgtacatgcatgccatctacagcagcatccccctcctggagactgtctcttgttggaccttaggaggactggcgttagcccaggtgctctttttctacgtgaagtacttggtgctctttggcgtgcctgctctgctcatgcgcctggatggactcactccacccgccctcccccgctgcgtgagcaccatgttcagtttcaccgggatgtggaggtattttgatgttggactgcataatttcttaatcaggtatgtgtacattccagtgggcgggtcccagcatggcctgctggggacactgttttccacggcgatgacatttgcatttgtgagctactggcatggcggctacgactacctctggtgctgggcagcgctcaactggctgggagtcactgtggagaatggagtccggaggctggtggagactccctgcatccaggacagtctggcccgatacttctccccacaagctcgccgtcgattccacgctgcccttgcttcttgttccacctcgatgctgatcctgtccaacctggtatttcttgggggcaatgaggttgggaaaacctactggaataggatcttcatacaaggctggccttgggtgaccctctctgtcctgggattcctgtactgctactcccacgtgggcattgcctgggcccagacctacgccacggactaatgctgttgggcccaggccagtccttgttgctggcctccaaggcaaatagtgcttcaccctgacctctcactccaggacagcctctaagggatttgatctgctcatcttcagttgaatgccctcactccaagactggatgctggatctcatagaaaattcacagccagacaatcttctaatctggagtctttgagatcttctaccccaactcatcattttcctattgaggaaacgggtccagggcagtcgtgtgtcttacccagctacacagggtgacattttggtctagaacctagtctcatgagccctttgcattctttccccttaagcaagaatagaatgtagtggaaatttattgattgagacacagaaatcctgattagtgataggcctgtcttctgggcaatatttctaaaatatttgagtgacattgatgtttaagtgacctccttcatcacatcctgcagtatctccagaagcagcactagggtttgagtttcatacttcagcccctctgtaggaatgagaccaagccacagctgtcttttgaattacgtagtcgaagaagacggtagcagccctgtagcattctaaggcatctatacccaaggagtcctgtgatttgagcttcagcagggtgatctacatttgggtgcttgtttctgagatttgcagagaagtataacatggtagttcctctaccttacagttaatcgtttcttaataaagaagcagaatttagaaaccacaggatagtgtacccacagatgggtgttatcaaggccagtcatgaggatggtgtcctggagtcttgtccaccctctccatacaagtctcaaaagtcatcctcctactcagtgattcacgtttagtggtttatattattaaggtttgattcaaacagagccttttctgtcctgtagataatctacatgtttgtagaattattttgaatatgtttgaggaaaatgtttaaaatctaaatatactcacataacttgattattcactcctctgaaaagatgctggataggctaccaaagttcccaagtggtagataattcagaagacttgtttgaatttggattttttttttttttggagtggggaagggtataaaggaggcttaaaatttgaatccataatatatctaattacaggagaatttacaacatctcaagtacgtaaattaagttgtcattgagtgaaaggttcacttggacctagtgctgcctcctgtttattacatagcatggcccttatgtcttgagttgaggttatcatctcaatgaggcttaagctcctagagtacaggaccattttgttgattgtctttcttcatagcttctctgcttggcaaagagatgggagggggccagatactgactacctggggtaggcacattatgtgttaaagcaagacagaggccagagaggggcaggtagacctgcatagcagcagcctcagcagctgtcttggtaaaggagagagagagacatggggccagtaattccggggtgctcagaagttttaggagggaatgagcctcagggaggagtgagcacctaaatgaacgcagtaaaccttcatggaccaacagtgattgaggatttgtgggcagccagagggagtctgactgaagtttacttggaaagaaagggcttgctaagaaaaaagggagtaaaaatgatgatagggaagtgtctaatgtatgtgcacatataagtaatacaaaagttttgagctcttccaagtataccatttatatacaaacaaataggtttattcattcattaaactactttggaagcgtcagtggatatatttgaaagtggtaatcctgaatctcttttaaactattatatgattcataatggttctcaggaattaataaatgattactgtgtttagctctg

SEQ ID NO: 13394 - DNA, 1639 bp, Homo sapiens
  source 1..1639: mol_type = unassigned DNA
aaagggcagctccgggggaaagagggtggcgtcccggggaagcccgcagccgccgccgatgtcgctgggactcggaagtgccgaaagaggggtgttgggaactcgcggcgcgcgtgaacgttgccgtcgccgccgcccgggacagcccggagaaactctcagcgtaggcatcgggaaccttcgtgccaaggagccatgctgccccgatgggaactggcactttacctacttgcctcactaggcttccacttctattccttctatgaagtttacaaagtctccagaggatgcgaccgactttgagtggagcttctggatggaatgggggaagcagtggctggtgtggcttctccttggccacatggtagtgtctcaaatggccacactgctggcaagaaagcacagaccctggattctcatgctctatgggatgtgggcctgctggtgtgtgctggggacccctggtgtggctatggttttgctccataccaccatctctttctgcgtggcccagttccggtctcagctcctgacgtggctctgttctctcctcctcctctccacactgaggctgcagggtgtggaagaagttaagagaaggtggtacaagacagaaaacgagtactacctgctgcagttcacgctgaccgttcgctgcctgtactacaccagcttcagcctggagctctgctggcagcagctgcctgctgcatcgacctcctactcctttccctggatgctggcctatgtcttttattatccagtcttacacaatgggcccatcctcagcttctcggagttcatcaaacagatgcagcagcaggagcatgactccctgaaggccagcctgtgtgtcctggccctggggctgggccgccttctttgctggtggtggctggccgagctgatggctcacctgatgtacatgcatgccatctacagcagcatccccctcctggagactgtctcttgttggaccttaggaggactggcgttagcccaggtgctctttttctacgtgaagtacttggtgctctttggcgtgcctgctctgctcatgcgcctggatggactcactccacccgccctcccccgctgcgtgagcaccatgttcagtttcaccgggatgtggaggtattttgatgttggactgcataatttcttaatcaggtatgtgtacattccagtgggcgggtcccagcatggcctgctggggacactgttttccacggcgatgacatttgcatttgtgagctactggcatggcggctacgactacctctggtgctgggcagcgctcaactggctgggagtcactgtggagaatggagtccggaggctggtggagactccctgcatccaggacagtctggcccgatacttctccccacaagctcgccgtcgattccacgctgcccttgcttcttgttccacctcgatgctgatcctgtccaacctggtatttcttgggggcaatgaggttgggaaaacctactggaataggatcttcatacaaggctggccttgggtgaccctctctgtcctgggattcctgtactgctactcccacgtgggcattgcctgggcccagacctacgccacggactaatgctgttgggcccaggccagtccttgttgc

SEQ ID NO: 13395 - DNA, 2714 bp, Homo sapiens
  source 1..2714: mol_type = unassigned DNA
aaagtagaaaaaccttgtggttcttttggagtgaaagccttgtaataggccccttggggcatgctggggctcatttctagacagtgaggcgtgatgagcaggagagatgaagaaaatctgcttctcttgcaaagtaattccttcatgagacttcattaaaagggtcttcaggaggactggcgttagcccaggtgctctttttctacgtgaagtacttggtgctctttggcgtgcctgctctgctcatgcgcctggatggactcactccacccgccctcccccgctgcgtgagcaccatgttcagtttcaccgggatgtggaggtattttgatgttggactgcataatttcttaatcaggtatgtgtacattccagtgggcgggtcccagcatggcctgctggggacactgttttccacggcgatgacatttgcatttgtgagctactggcatggcggctacgactacctctggtgctgggcagcgctcaactggctgggagtcactgtggagaatggagtccggaggctggtggagactccctgcatccaggacagtctggcccgatacttctccccacaagctcgccgtcgattccacgctgcccttgcttcttgttccacctcgatgctgatcctgtccaacctggtatttcttgggggcaatgaggttgggaaaacctactggaataggatcttcatacaaggctggccttgggtgaccctctctgtcctgggattcctgtactgctactcccacgtgggcattgcctgggcccagacctacgccacggactaatgctgttgggcccaggccagtccttgttgctggcctccaaggcaaatagtgcttcaccctgacctctcactccaggacagcctctaagggatttgatctgctcatcttcagttgaatgccctcactccaagactggatgctggatctcatagaaaattcacagccagacaatcttctaatctggagtctttgagatcttctaccccaactcatcattttcctattgaggaaacgggtccagggcagtcgtgtgtcttacccagctacacagggtgacattttggtctagaacctagtctcatgagccctttgcattctttccccttaagcaagaatagaatgtagtggaaatttattgattgagacacagaaatcctgattagtgataggcctgtcttctgggcaatatttctaaaatatttgagtgacattgatgtttaagtgacctccttcatcacatcctgcagtatctccagaagcagcactagggtttgagtttcatacttcagcccctctgtaggaatgagaccaagccacagctgtcttttgaattacgtagtcgaagaagacggtagcagccctgtagcattctaaggcatctatacccaaggagtcctgtgatttgagcttcagcagggtgatctacatttgggtgcttgtttctgagatttgcagagaagtataacatggtagttcctctaccttacagttaatcgtttcttaataaagaagcagaatttagaaaccacaggatagtgtacccacagatgggtgttatcaaggccagtcatgaggatggtgtcctggagtcttgtccaccctctccatacaagtctcaaaagtcatcctcctactcagtgattcacgtttagtggtttatattattaaggtttgattcaaacagagccttttctgtcctgtagataatctacatgtttgtagaattattttgaatatgtttgaggaaaatgtttaaaatctaaatatactcacataacttgattattcactcctctgaaaagatgctggataggctaccaaagttcccaagtggtagataattcagaagacttgtttgaatttggattttttttttttttggagtggggaagggtataaaggaggcttaaaatttgaatccataatatatctaattacaggagaatttacaacatctcaagtacgtaaattaagttgtcattgagtgaaaggttcacttggacctagtgctgcctcctgtttattacatagcatggcccttatgtcttgagttgaggttatcatctcaatgaggcttaagctcctagagtacaggaccattttgttgattgtctttcttcatagcttctctgcttggcaaagagatgggagggggccagatactgactacctggggtaggcacattatgtgttaaagcaagacagaggccagagaggggcaggtagacctgcatagcagcagcctcagcagctgtcttggtaaaggagagagagagacatggggccagtaattccggggtgctcagaagttttaggagggaatgagcctcagggaggagtgagcacctaaatgaacgcagtaaaccttcatggaccaacagtgattgaggatttgtgggcagccagagggagtctgactgaagtttacttggaaagaaagggcttgctaagaaaaaagggagtaaaaatgatgatagggaagtgtctaatgtatgtgcacatataagtaatacaaaagttttgagctcttccaagtataccatttatatacaaacaaataggtttattcattcattaaactactttggaagcgtcagtggatatatttgaaagtggtaatcctgaatctcttttaaactattatatgattcataatggttctcaggaattaataaatgattactgtgtttagctctg

SEQ ID NO: 13396 - DNA, 3626 bp, Homo sapiens
  source 1..3626: mol_type = unassigned DNA
agtgcgcccgggcaaaggcggggatctaggcgccgggacaagtccgcgcacggccctgcccacgtcctctctccttggcttcgtccccagcttccggaactgctgcggggagttgcgaactctggtcctcttggcagtatcggcggtgcgcctgcctgcctgctgtgactccagggactctaaaaaactctcagcgtaggcatcgggaaccttcgtgccaaggagccatgctgccccgatgggaactggcactttacctacttgcctcactaggcttccacttctattccttctatgaagtttacaaagtctccagagaacacgaagaggagctggaccaggaatttgagctggagactgacactttatttggaggattaaagaaggatgcgaccgactttgagtggagcttctggatggaatgggggaagcagtggctggtgtggcttctccttggccacatggtagtgtctcaaatggccacactgctggcaagaaagcacagaccctggattctcatgctctatgggatgtgggcctgctggtgtgtgctggggacccctggtgtggctatggttttgctccataccaccatctctttctgcgtggcccagttccggtctcagctcctgacgtggctctgttctctcctcctcctctccacactgaggctgcagggtgtggaagaagttaagagaaggtggtacaagacagaaaacgagtactacctgctgcagttcacgctgaccgttcgctgcctgtactacaccagcttcagcctggagctctgctggcagcagctgcctgctgcatcgacctcctactcctttccctggatgctggcctatgtcttttattatccagtcttacacaatgggcccatcctcagcttctcggagttcatcaaacagatgcagcagcaggagcatgactccctgaaggccagcctgtgtgtcctggccctggggctgggccgccttctttgctggtggtggctggccgagctgatggctcacctgatgtacatgcatgccatctacagcagcatccccctcctggagactgtctcttgttggaccttaggaggactggcgttagcccaggtgctctttttctacgtgaagtacttggtgctctttggcgtgcctgctctgctcatgcgcctggatggactcactccacccgccctcccccgctgcgtgagcaccatgttcagtttcaccgggatgtggaggtattttgatgttggactgcataatttcttaatcaggtatgtgtacattccagtgggcgggtcccagcatggcctgctggggacactgttttccacggcgatgacatttgcatttgtgagctactggcatggcggctacgactacctctggtgctgggcagcgctcaactggctgggagtcactgtggagaatggagtccggaggctggtggagactccctgcatccaggacagtctggcccgatacttctccccacaagctcgccgtcgattccacgctgcccttgcttcttgttccacctcgatgctgatcctgtccaacctggtatttcttgggggcaatgaggttgggaaaacctactggaataggatcttcatacaaggctggccttgggtgaccctctctgtcctgggattcctgtactgctactcccacgtgggcattgcctgggcccagacctacgccacggactaatgctgttgggcccaggccagtccttgttgctggcctccaaggcaaatagtgcttcaccctgacctctcactccaggacagcctctaagggatttgatctgctcatcttcagttgaatgccctcactccaagactggatgctggatctcatagaaaattcacagccagacaatcttctaatctggagtctttgagatcttctaccccaactcatcattttcctattgaggaaacgggtccagggcagtcgtgtgtcttacccagctacacagggtgacattttggtctagaacctagtctcatgagccctttgcattctttccccttaagcaagaatagaatgtagtggaaatttattgattgagacacagaaatcctgattagtgataggcctgtcttctgggcaatatttctaaaatatttgagtgacattgatgtttaagtgacctccttcatcacatcctgcagtatctccagaagcagcactagggtttgagtttcatacttcagcccctctgtaggaatgagaccaagccacagctgtcttttgaattacgtagtcgaagaagacggtagcagccctgtagcattctaaggcatctatacccaaggagtcctgtgatttgagcttcagcagggtgatctacatttgggtgcttgtttctgagatttgcagagaagtataacatggtagttcctctaccttacagttaatcgtttcttaataaagaagcagaatttagaaaccacaggatagtgtacccacagatgggtgttatcaaggccagtcatgaggatggtgtcctggagtcttgtccaccctctccatacaagtctcaaaagtcatcctcctactcagtgattcacgtttagtggtttatattattaaggtttgattcaaacagagccttttctgtcctgtagataatctacatgtttgtagaattattttgaatatgtttgaggaaaatgtttaaaatctaaatatactcacataacttgattattcactcctctgaaaagatgctggataggctaccaaagttcccaagtggtagataattcagaagacttgtttgaatttggattttttttttttttggagtggggaagggtataaaggaggcttaaaatttgaatccataatatatctaattacaggagaatttacaacatctcaagtacgtaaattaagttgtcattgagtgaaaggttcacttggacctagtgctgcctcctgtttattacatagcatggcccttatgtcttgagttgaggttatcatctcaatgaggcttaagctcctagagtacaggaccattttgttgattgtctttcttcatagcttctctgcttggcaaagagatgggagggggccagatactgactacctggggtaggcacattatgtgttaaagcaagacagaggccagagaggggcaggtagacctgcatagcagcagcctcagcagctgtcttggtaaaggagagagagagacatggggccagtaattccggggtgctcagaagttttaggagggaatgagcctcagggaggagtgagcacctaaatgaacgcagtaaaccttcatggaccaacagtgattgaggatttgtgggcagccagagggagtctgactgaagtttacttggaaagaaagggcttgctaagaaaaaagggagtaaaaatgatgatagggaagtgtctaatgtatgtgcacatataagtaatacaaaagttttgagctcttccaagtataccatttatatacaaacaaataggtttattcattcattaaactactttggaagcgtcagtggatatatttgaaagtggtaatcctgaatctcttttaaactattatatgattcataatggttctcaggaattaataaatgattactgtgtttagctctg

SEQ ID NO: 13397 - DNA, 1799 bp, Homo sapiens
  source 1..1799: mol_type = unassigned DNA
acggcggcaggggcgtgctcggaggacgcgcgctgcgctgctcctccaaagggcagctccgggggaaagagggtggcgtcccggggaagcccgcagccgccgccgatgtcgctgggactcggaagtgccgaaagaggggtgttgggaactcgcggcgcgcgtgaacgttgccgtcgccgccgcccgggacagcccggagaaactctcagcgtaggcatcgggaaccttcgtgccaaggagccatgctgccccgatgggaactggcactttacctacttgcctcactaggcttccacttctattccttctatgaagtttacaaagtctccagagaacacgaagaggagctggaccaggaatttgagctggagactgacactttatttggaggattaaagaaggatgcgaccgactttgagtggagcttctggatggaatgggggaagcagtggctggtgtggcttctccttggccacatggtagtgtctcaaatggccacactgctggcaagaaagcacagaccctggattctcatgctctatgggatgtgggcctgctggtgtgtgctggggacccctggtgtggctatggttttgctccataccaccatctctttctgcgtggcccagttccggtctcagctcctgacgtggctctgttctctcctcctcctctccacactgaggctgcagggtgtggaagaagttaagagaaggtggtacaagacagaaaacgagtactacctgctgcagttcacgctgaccgttcgctgcctgtactacaccagcttcagcctggagctctgctggcagcagctgcctgctgcatcgacctcctactcctttccctggatgctggcctatgtcttttattatccagtcttacacaatgggcccatcctcagcttctcggagttcatcaaacagatgcagcagcaggagcatgactccctgaaggccagcctgtgtgtcctggccctggggctgggccgccttctttgctggtggtggctggccgagctgatggctcacctgatgtacatgcatgccatctacagcagcatccccctcctggagactgtctcttgttggaccttaggaggactggcgttagcccaggtgctctttttctacgtgaagtacttggtgctctttggcgtgcctgctctgctcatgcgcctggatggactcactccacccgccctcccccgctgcgtgagcaccatgttcagtttcaccgggatgtggaggtattttgatgttggactgcataatttcttaatcaggtatgtgtacattccagtgggcgggtcccagcatggcctgctggggacactgttttccacggcgatgacatttgcatttgtgagctactggcatggcggctacgactacctctggtgctgggcagcgctcaactggctgggagtcactgtggagaatggagtccggaggctggtggagactccctgcatccaggacagtctggcccgatacttctccccacaagctcgccgtcgattccacgctgcccttgcttcttgttccacctcgatgctgatcctgtccaacctggtatttcttgggggcaatgaggttgggaaaacctactggaataggatcttcatacaaggaggtttatttttattttttttactcaatccatgttgggagacagcattccagggctttcctgtgtttctgcatttcttacaaacagaggtactggctacctttgttcccaactatttttcctggaatatttgtatagaaaacacctccgaattgtccagctactaa

SEQ ID NO: 13398 - DNA, 3575 bp, Homo sapiens
  source 1..3575: mol_type = unassigned DNA
ctcttggctcaggcttggaggcctccgagcagcaacatcgtcccaattataccccgttggagcatcttcagatcttccactcttttcacaacgcaatcaaaatcttcgtacccattttgcagtagtgatctctaaactctcagcgtaggcatcgggaaccttcgtgccaaggagccatgctgccccgatgggaactggcactttacctacttgcctcactaggcttccacttctattccttctatgaagtttacaaagtctccagagaacacgaagaggagctggaccaggaatttgagctggagactgacactttatttggaggattaaagaaggatgcgaccgactttgagtggagcttctggatggaatgggggaagcagtggctggtgtggcttctccttggccacatggtagtgtctcaaatggccacactgctggcaagaaagcacagaccctggattctcatgctctatgggatgtgggcctgctggtgtgtgctggggacccctggtgtggctatggttttgctccataccaccatctctttctgcgtggcccagttccggtctcagctcctgacgtggctctgttctctcctcctcctctccacactgaggctgcagggtgtggaagaagttaagagaaggtggtacaagacagaaaacgagtactacctgctgcagttcacgctgaccgttcgctgcctgtactacaccagcttcagcctggagctctgctggcagcagctgcctgctgcatcgacctcctactcctttccctggatgctggcctatgtcttttattatccagtcttacacaatgggcccatcctcagcttctcggagttcatcaaacagatgcagcagcaggagcatgactccctgaaggccagcctgtgtgtcctggccctggggctgggccgccttctttgctggtggtggctggccgagctgatggctcacctgatgtacatgcatgccatctacagcagcatccccctcctggagactgtctcttgttggaccttaggaggactggcgttagcccaggtgctctttttctacgtgaagtacttggtgctctttggcgtgcctgctctgctcatgcgcctggatggactcactccacccgccctcccccgctgcgtgagcaccatgttcagtttcaccgggatgtggaggtattttgatgttggactgcataatttcttaatcaggtatgtgtacattccagtgggcgggtcccagcatggcctgctggggacactgttttccacggcgatgacatttgcatttgtgagctactggcatggcggctacgactacctctggtgctgggcagcgctcaactggctgggagtcactgtggagaatggagtccggaggctggtggagactccctgcatccaggacagtctggcccgatacttctccccacaagctcgccgtcgattccacgctgcccttgcttcttgttccacctcgatgctgatcctgtccaacctggtatttcttgggggcaatgaggttgggaaaacctactggaataggatcttcatacaaggctggccttgggtgaccctctctgtcctgggattcctgtactgctactcccacgtgggcattgcctgggcccagacctacgccacggactaatgctgttgggcccaggccagtccttgttgctggcctccaaggcaaatagtgcttcaccctgacctctcactccaggacagcctctaagggatttgatctgctcatcttcagttgaatgccctcactccaagactggatgctggatctcatagaaaattcacagccagacaatcttctaatctggagtctttgagatcttctaccccaactcatcattttcctattgaggaaacgggtccagggcagtcgtgtgtcttacccagctacacagggtgacattttggtctagaacctagtctcatgagccctttgcattctttccccttaagcaagaatagaatgtagtggaaatttattgattgagacacagaaatcctgattagtgataggcctgtcttctgggcaatatttctaaaatatttgagtgacattgatgtttaagtgacctccttcatcacatcctgcagtatctccagaagcagcactagggtttgagtttcatacttcagcccctctgtaggaatgagaccaagccacagctgtcttttgaattacgtagtcgaagaagacggtagcagccctgtagcattctaaggcatctatacccaaggagtcctgtgatttgagcttcagcagggtgatctacatttgggtgcttgtttctgagatttgcagagaagtataacatggtagttcctctaccttacagttaatcgtttcttaataaagaagcagaatttagaaaccacaggatagtgtacccacagatgggtgttatcaaggccagtcatgaggatggtgtcctggagtcttgtccaccctctccatacaagtctcaaaagtcatcctcctactcagtgattcacgtttagtggtttatattattaaggtttgattcaaacagagccttttctgtcctgtagataatctacatgtttgtagaattattttgaatatgtttgaggaaaatgtttaaaatctaaatatactcacataacttgattattcactcctctgaaaagatgctggataggctaccaaagttcccaagtggtagataattcagaagacttgtttgaatttggattttttttttttttggagtggggaagggtataaaggaggcttaaaatttgaatccataatatatctaattacaggagaatttacaacatctcaagtacgtaaattaagttgtcattgagtgaaaggttcacttggacctagtgctgcctcctgtttattacatagcatggcccttatgtcttgagttgaggttatcatctcaatgaggcttaagctcctagagtacaggaccattttgttgattgtctttcttcatagcttctctgcttggcaaagagatgggagggggccagatactgactacctggggtaggcacattatgtgttaaagcaagacagaggccagagaggggcaggtagacctgcatagcagcagcctcagcagctgtcttggtaaaggagagagagagacatggggccagtaattccggggtgctcagaagttttaggagggaatgagcctcagggaggagtgagcacctaaatgaacgcagtaaaccttcatggaccaacagtgattgaggatttgtgggcagccagagggagtctgactgaagtttacttggaaagaaagggcttgctaagaaaaaagggagtaaaaatgatgatagggaagtgtctaatgtatgtgcacatataagtaatacaaaagttttgagctcttccaagtataccatttatatacaaacaaataggtttattcattcattaaactactttggaagcgtcagtggatatatttgaaagtggtaatcctgaatctcttttaaactattatatgattcataatggttctcaggaattaataaatgattactgtgtttagctctg

SEQ ID NO: 13399 - DNA, 721 bp, Homo sapiens
  source 1..721: mol_type = unassigned DNA
aacacgaagaggagctggaccaggaatttgagctggagactgacactttatttggaggattaaagaaggatgcgaccgactttgagtggagcttctggatggaatgggggaagcagtggctggtgtggcttctccttggccacatggtagtgtctcaaatggccacactgctggcaagaaagagaaggtggtacaagacagaaaacgagtactacctgctgcagttcacgctgaccgttcgctgcctgtactacaccagcttcagcctggagctctgctggcagcagctgcctgctgcatcgacctcctactcctttccctggatgctggcctatgtcttttattatccagtcttacacaatgggcccatcctcagcttctcggagttcatcaaacagatgcagcagcaggagcatgactccctgaaggccagcctgtgtgtcctggccctggggctgggccgccttctttgctggtggtggctggccgagctgatggctcacctgatgtacatgcatgccatctacagcagcatccccctcctggagactgtctcttgttggaccttaggaggactggcgttagcccaggtgctctttttctacgtgaagtacttggtgctctttggcgtgcctgctctgctcatgcgcctggatggactcactccacccgccctcccccgctgcgtgagcaccatgttcagtttcaccgggatgtggag

SEQ ID NO: 13400 - DNA, 3446 bp, Homo sapiens
  source 1..3446: mol_type = unassigned DNA
acggcggcaggggcgtgctcggaggacgcgcgctgcgctgctcctccaaagggcagctccgggggaaagagggtggcgtcccggggaagcccgcagccgccgccgatgtcgctgggactcggaagtgccgaaagaggggtgttgggaactcgcggcgcgcgtgaacgttgccgtcgccgccgcccgggacagcccggagaaactctcagcgtaggcatcgggaaccttcgtgccaaggagccatgctgccccgatgggaactggcactttacctacttgcctcactaggcttccacttctattccttctatgaagtttacaaagtctccagagaacacgaagaggagctggaccaggaatttgagctggagactgacactttatttggaggattaaagaaggatgcgaccgactttgagtggagcttctggatggaatgggggaagcagtggctggtgtggcttctccttggccacatggtagtgtctcaaatggccacactgctggcaagaaagagaaggtggtacaagacagaaaacgagtactacctgctgcagttcacgctgaccgttcgctgcctgtactacaccagcttcagcctggagctctgctggcagcagctgcctgctgcatcgacctcctactcctttccctggatgctggcctatgtcttttattatccagtcttacacaatgggcccatcctcagcttctcggagttcatcaaacagatgcagcagcaggagcatgactccctgaaggccagcctgtgtgtcctggccctggggctgggccgccttctttgctggtggtggctggccgagctgatggctcacctgatgtacatgcatgccatctacagcagcatccccctcctggagactgtctcttgttggaccttaggaggactggcgttagcccaggtgctctttttctacgtgaagtacttggtgctctttggcgtgcctgctctgctcatgcgcctggatggactcactccacccgccctcccccgctgcgtgagcaccatgttcagtttcaccgggatgtggaggtattttgatgttggactgcataatttcttaatcaggtatgtgtacattccagtgggcgggtcccagcatggcctgctggggacactgttttccacggcgatgacatttgcatttgtgagctactggcatggcggctacgactacctctggtgctgggcagcgctcaactggctgggagtcactgtggagaatggagtccggaggctggtggagactccctgcatccaggacagtctggcccgatacttctccccacaagctcgccgtcgattccacgctgcccttgcttcttgttccacctcgatgctgatcctgtccaacctggtatttcttgggggcaatgaggttgggaaaacctactggaataggatcttcatacaaggctggccttgggtgaccctctctgtcctgggattcctgtactgctactcccacgtgggcattgcctgggcccagacctacgccacggactaatgctgttgggcccaggccagtccttgttgctggcctccaaggcaaatagtgcttcaccctgacctctcactccaggacagcctctaagggatttgatctgctcatcttcagttgaatgccctcactccaagactggatgctggatctcatagaaaattcacagccagacaatcttctaatctggagtctttgagatcttctaccccaactcatcattttcctattgaggaaacgggtccagggcagtcgtgtgtcttacccagctacacagggtgacattttggtctagaacctagtctcatgagccctttgcattctttccccttaagcaagaatagaatgtagtggaaatttattgattgagacacagaaatcctgattagtgataggcctgtcttctgggcaatatttctaaaatatttgagtgacattgatgtttaagtgacctccttcatcacatcctgcagtatctccagaagcagcactagggtttgagtttcatacttcagcccctctgtaggaatgagaccaagccacagctgtcttttgaattacgtagtcgaagaagacggtagcagccctgtagcattctaaggcatctatacccaaggagtcctgtgatttgagcttcagcagggtgatctacatttgggtgcttgtttctgagatttgcagagaagtataacatggtagttcctctaccttacagttaatcgtttcttaataaagaagcagaatttagaaaccacaggatagtgtacccacagatgggtgttatcaaggccagtcatgaggatggtgtcctggagtcttgtccaccctctccatacaagtctcaaaagtcatcctcctactcagtgattcacgtttagtggtttatattattaaggtttgattcaaacagagccttttctgtcctgtagataatctacatgtttgtagaattattttgaatatgtttgaggaaaatgtttaaaatctaaatatactcacataacttgattattcactcctctgaaaagatgctggataggctaccaaagttcccaagtggtagataattcagaagacttgtttgaatttggattttttttttttttggagtggggaagggtataaaggaggcttaaaatttgaatccataatatatctaattacaggagaatttacaacatctcaagtacgtaaattaagttgtcattgagtgaaaggttcacttggacctagtgctgcctcctgtttattacatagcatggcccttatgtcttgagttgaggttatcatctcaatgaggcttaagctcctagagtacaggaccattttgttgattgtctttcttcatagcttctctgcttggcaaagagatgggagggggccagatactgactacctggggtaggcacattatgtgttaaagcaagacagaggccagagaggggcaggtagacctgcatagcagcagcctcagcagctgtcttggtaaaggagagagagagacatggggccagtaattccggggtgctcagaagttttaggagggaatgagcctcagggaggagtgagcacctaaatgaacgcagtaaaccttcatggaccaacagtgattgaggatttgtgggcagccagagggagtctgactgaagtttacttggaaagaaagggcttgctaagaaaaaagggagtaaaaatgatgatagggaagtgtctaatgtatgtgcacatataagtaatacaaaagttttgagctcttccaagtataccatttatatacaaacaaataggtttattcattcattaaactactttggaagcgtcagtggatatatttgaaagtggtaatcctgaatctcttttaaactattatatgattcataatggttctcaggaattaataaatgattactgtgtttagctctg

SEQ ID NO: 13401 - DNA, 3164 bp, Homo sapiens
  source 1..3164: mol_type = unassigned DNA
ctcttggctcaggcttggaggcctccgagcagcaacatcgtcccaattataccccgttggagcatcttcagatcttccactcttttcacaacgcaatcaaaatcttcgtacccattttgcagtagtgatctctaaactctcagcgtaggcatcgggaaccttcgtgccaaggagccatgctgccccgatgggaactggcactttacctacttgcctcactaggcttccacttctattccttctatgaagtttacaaagtctccagagaacacgaagaggagctggaccaggaatttgagctggagactgacactttatttggaggattaaagaaggatgcgaccgactttgagtggagcttctggatggaatgggggaagcagtggctggtgtggcttctccttggccacatggtagtgtctcaaatggccacactgctggcaagaaagatgcagcagcaggagcatgactccctgaaggccagcctgtgtgtcctggccctggggctgggccgccttctttgctggtggtggctggccgagctgatggctcacctgatgtacatgcatgccatctacagcagcatccccctcctggagactgtctcttgttggaccttaggaggactggcgttagcccaggtgctctttttctacgtgaagtacttggtgctctttggcgtgcctgctctgctcatgcgcctggatggactcactccacccgccctcccccgctgcgtgagcaccatgttcagtttcaccgggatgtggaggtattttgatgttggactgcataatttcttaatcaggtatgtgtacattccagtgggcgggtcccagcatggcctgctggggacactgttttccacggcgatgacatttgcatttgtgagctactggcatggcggctacgactacctctggtgctgggcagcgctcaactggctgggagtcactgtggagaatggagtccggaggctggtggagactccctgcatccaggacagtctggcccgatacttctccccacaagctcgccgtcgattccacgctgcccttgcttcttgttccacctcgatgctgatcctgtccaacctggtatttcttgggggcaatgaggttgggaaaacctactggaataggatcttcatacaaggctggccttgggtgaccctctctgtcctgggattcctgtactgctactcccacgtgggcattgcctgggcccagacctacgccacggactaatgctgttgggcccaggccagtccttgttgctggcctccaaggcaaatagtgcttcaccctgacctctcactccaggacagcctctaagggatttgatctgctcatcttcagttgaatgccctcactccaagactggatgctggatctcatagaaaattcacagccagacaatcttctaatctggagtctttgagatcttctaccccaactcatcattttcctattgaggaaacgggtccagggcagtcgtgtgtcttacccagctacacagggtgacattttggtctagaacctagtctcatgagccctttgcattctttccccttaagcaagaatagaatgtagtggaaatttattgattgagacacagaaatcctgattagtgataggcctgtcttctgggcaatatttctaaaatatttgagtgacattgatgtttaagtgacctccttcatcacatcctgcagtatctccagaagcagcactagggtttgagtttcatacttcagcccctctgtaggaatgagaccaagccacagctgtcttttgaattacgtagtcgaagaagacggtagcagccctgtagcattctaaggcatctatacccaaggagtcctgtgatttgagcttcagcagggtgatctacatttgggtgcttgtttctgagatttgcagagaagtataacatggtagttcctctaccttacagttaatcgtttcttaataaagaagcagaatttagaaaccacaggatagtgtacccacagatgggtgttatcaaggccagtcatgaggatggtgtcctggagtcttgtccaccctctccatacaagtctcaaaagtcatcctcctactcagtgattcacgtttagtggtttatattattaaggtttgattcaaacagagccttttctgtcctgtagataatctacatgtttgtagaattattttgaatatgtttgaggaaaatgtttaaaatctaaatatactcacataacttgattattcactcctctgaaaagatgctggataggctaccaaagttcccaagtggtagataattcagaagacttgtttgaatttggattttttttttttttggagtggggaagggtataaaggaggcttaaaatttgaatccataatatatctaattacaggagaatttacaacatctcaagtacgtaaattaagttgtcattgagtgaaaggttcacttggacctagtgctgcctcctgtttattacatagcatggcccttatgtcttgagttgaggttatcatctcaatgaggcttaagctcctagagtacaggaccattttgttgattgtctttcttcatagcttctctgcttggcaaagagatgggagggggccagatactgactacctggggtaggcacattatgtgttaaagcaagacagaggccagagaggggcaggtagacctgcatagcagcagcctcagcagctgtcttggtaaaggagagagagagacatggggccagtaattccggggtgctcagaagttttaggagggaatgagcctcagggaggagtgagcacctaaatgaacgcagtaaaccttcatggaccaacagtgattgaggatttgtgggcagccagagggagtctgactgaagtttacttggaaagaaagggcttgctaagaaaaaagggagtaaaaatgatgatagggaagtgtctaatgtatgtgcacatataagtaatacaaaagttttgagctcttccaagtataccatttatatacaaacaaataggtttattcattcattaaactactttggaagcgtcagtggatatatttgaaagtggtaatcctgaatctcttttaaactattatatgattcataatggttctcaggaattaataaatgattactgtgtttagctctg

SEQ ID NO: 13402 - DNA, 3507 bp, Homo sapiens
  source 1..3507: mol_type = unassigned DNA
acggcggcaggggcgtgctcggaggacgcgcgctgcgctgctcctccaaagggcagctccgggggaaagagggtggcgtcccggggaagcccgcagccgccgccgatgtcgctgggactcggaagtgccgaaagaggggtgttgggaactcgcggcgcgcgtgaacgttgccgtcgccgccgcccgggacagcccggagaacacgaagaggagctggaccaggaatttgagctggagactgacactttatttggaggattaaagaaggatgcgaccgactttgagtggagcttctggatggaatgggggaagcagtggctggtgtggcttctccttggccacatggtagtgtctcaaatggccacactgctggcaagaaagcacagaccctggattctcatgctctatgggatgtgggcctgctggtgtgtgctggggacccctggtgtggctatggttttgctccataccaccatctctttctgcgtggcccagttccggtctcagctcctgacgtggctctgttctctcctcctcctctccacactgaggctgcagggtgtggaagaagttaagagaaggtggtacaagacagaaaacgagtactacctgctgcagttcacgctgaccgttcgctgcctgtactacaccagcttcagcctggagctctgctggcagcagctgcctgctgcatcgacctcctactcctttccctggatgctggcctatgtcttttattatccagtcttacacaatgggcccatcctcagcttctcggagttcatcaaacagatgcagcagcaggagcatgactccctgaaggccagcctgtgtgtcctggccctggggctgggccgccttctttgctggtggtggctggccgagctgatggctcacctgatgtacatgcatgccatctacagcagcatccccctcctggagactgtctcttgttggaccttaggaggactggcgttagcccaggtgctctttttctacgtgaagtacttggtgctctttggcgtgcctgctctgctcatgcgcctggatggactcactccacccgccctcccccgctgcgtgagcaccatgttcagtttcaccgggatgtggaggtattttgatgttggactgcataatttcttaatcaggtatgtgtacattccagtgggcgggtcccagcatggcctgctggggacactgttttccacggcgatgacatttgcatttgtgagctactggcatggcggctacgactacctctggtgctgggcagcgctcaactggctgggagtcactgtggagaatggagtccggaggctggtggagactccctgcatccaggacagtctggcccgatacttctccccacaagctcgccgtcgattccacgctgcccttgcttcttgttccacctcgatgctgatcctgtccaacctggtatttcttgggggcaatgaggttgggaaaacctactggaataggatcttcatacaaggctggccttgggtgaccctctctgtcctgggattcctgtactgctactcccacgtgggcattgcctgggcccagacctacgccacggactaatgctgttgggcccaggccagtccttgttgctggcctccaaggcaaatagtgcttcaccctgacctctcactccaggacagcctctaagggatttgatctgctcatcttcagttgaatgccctcactccaagactggatgctggatctcatagaaaattcacagccagacaatcttctaatctggagtctttgagatcttctaccccaactcatcattttcctattgaggaaacgggtccagggcagtcgtgtgtcttacccagctacacagggtgacattttggtctagaacctagtctcatgagccctttgcattctttccccttaagcaagaatagaatgtagtggaaatttattgattgagacacagaaatcctgattagtgataggcctgtcttctgggcaatatttctaaaatatttgagtgacattgatgtttaagtgacctccttcatcacatcctgcagtatctccagaagcagcactagggtttgagtttcatacttcagcccctctgtaggaatgagaccaagccacagctgtcttttgaattacgtagtcgaagaagacggtagcagccctgtagcattctaaggcatctatacccaaggagtcctgtgatttgagcttcagcagggtgatctacatttgggtgcttgtttctgagatttgcagagaagtataacatggtagttcctctaccttacagttaatcgtttcttaataaagaagcagaatttagaaaccacaggatagtgtacccacagatgggtgttatcaaggccagtcatgaggatggtgtcctggagtcttgtccaccctctccatacaagtctcaaaagtcatcctcctactcagtgattcacgtttagtggtttatattattaaggtttgattcaaacagagccttttctgtcctgtagataatctacatgtttgtagaattattttgaatatgtttgaggaaaatgtttaaaatctaaatatactcacataacttgattattcactcctctgaaaagatgctggataggctaccaaagttcccaagtggtagataattcagaagacttgtttgaatttggattttttttttttttggagtggggaagggtataaaggaggcttaaaatttgaatccataatatatctaattacaggagaatttacaacatctcaagtacgtaaattaagttgtcattgagtgaaaggttcacttggacctagtgctgcctcctgtttattacatagcatggcccttatgtcttgagttgaggttatcatctcaatgaggcttaagctcctagagtacaggaccattttgttgattgtctttcttcatagcttctctgcttggcaaagagatgggagggggccagatactgactacctggggtaggcacattatgtgttaaagcaagacagaggccagagaggggcaggtagacctgcatagcagcagcctcagcagctgtcttggtaaaggagagagagagacatggggccagtaattccggggtgctcagaagttttaggagggaatgagcctcagggaggagtgagcacctaaatgaacgcagtaaaccttcatggaccaacagtgattgaggatttgtgggcagccagagggagtctgactgaagtttacttggaaagaaagggcttgctaagaaaaaagggagtaaaaatgatgatagggaagtgtctaatgtatgtgcacatataagtaatacaaaagttttgagctcttccaagtataccatttatatacaaacaaataggtttattcattcattaaactactttggaagcgtcagtggatatatttgaaagtggtaatcctgaatctcttttaaactattatatgattcataatggttctcaggaattaataaatgattactgtgtttagctctg

SEQ ID NO: 13403 - DNA, 1583 bp, Homo sapiens
  source 1..1583: mol_type = unassigned DNA
gtgctcggaggacgcgcgctgcgctgctcctccaaagggcagctccgggggaaagagggtggcgtcccggggaagcccgcagccgccgccgatgtcgctgggactcggaagtgccgaaagaggggtgttgggaactcgcggcgcgcgtgaacgttgccgtcgccgccgcccgggacagcccggaggatgcgaccgactttgagtggagcttctggatggaatgggggaagcagtggctggtgtggcttctccttggccacatggtagtgtctcaaatggccacactgctggcaagaaagcacagaccctggattctcatgctctatgggatgtgggcctgctggtgtgtgctggggacccctggtgtggctatggttttgctccataccaccatctctttctgcgtggcccagttccggtctcagctcctgacgtggctctgttctctcctcctcctctccacactgaggctgcagggtgtggaagaagttaagagaaggtggtacaagacagaaaacgagtactacctgctgcagttcacgctgaccgttcgctgcctgtactacaccagcttcagcctggagctctgctggcagcagctgcctgctgcatcgacctcctactcctttccctggatgctggcctatgtcttttattatccagtcttacacaatgggcccatcctcagcttctcggagttcatcaaacagatgcagcagcaggagcatgactccctgaaggccagcctgtgtgtcctggccctggggctgggccgccttctttgctggtggtggctggccgagctgatggctcacctgatgtacatgcatgccatctacagcagcatccccctcctggagactgtctcttgttggaccttaggaggactggcgttagcccaggtgctctttttctacgtgaagtacttggtgctctttggcgtgcctgctctgctcatgcgcctggatggactcactccacccgccctcccccgctgcgtgagcaccatgttcagtttcaccgggatgtggaggtattttgatgttggactgcataatttcttaatcaggtatgtgtacattccagtgggcgggtcccagcatggcctgctggggacactgttttccacggcgatgacatttgcatttgtgagctactggcatggcggctacgactacctctggtgctgggcagcgctcaactggctgggagtcactgtggagaatggagtccggaggctggtggagactccctgcatccaggacagtctggcccgatacttctccccacaagctcgccgtcgattccacgctgcccttgcttcttgttccacctcgatgctgatcctgtccaacctggtatttcttgggggcaatgaggttgggaaaacctactggaataggatcttcatacaaggctggccttgggtgaccctctctgtcctgggattcctgtactgctactcccacgtgggcattgcctgggcccagacctacgccacggactaatgctgttgggcccaggccagtccttgttgctggcctccaaggcaaatagtgcttcaccctgacctctcactccag

SEQ ID NO: 13404 - DNA, 10072 bp, Homo sapiens
  source 1..10072: mol_type = unassigned DNA
tcgcgcgggggccgccccctccccttccctccaccctgggcgggggcgcgcgagaagcggtgacgtcaaggggcgcgctgtggcagcacctccccgcgcgctagttaaaaagaagaagaaaagagggaacgaaacatgagaggctgtgtgagaagctgcagccgccggcagaggagacctcagcatcatctagagcccagcgctggccctgcctccgcctgccccgccgccgccgtcgccgtttctgttcctgctactgtcccacctaaacaactcccgttacacggacaagtgaacatctgtggctgtcctctccttttcttcctcctcttccaactccttctcctcctcccacttcccagccgcagcagaaagcccccaacccaactgacactggcacaactgcaaacggtgtcatccgcacaactttatctcgctcctcgggctcccctaaggcattggacccatcgccgcgtcttttattttttgcaaagttgcatcgctgtacatatttttgtccccgccacctccctctgtctctggagtgccctacagccccgcaaactcctcctggagctgcgccctagtgcccctgctgggcagtggcgttcccccccatcctcccgcgcccagcccctgctgctctgggcagacgatgctgaagatgctctcctttaagctgctgctgctggccgtggctctgggcttctttgaaggagatgctaagtttggggaaagaaacgaagggagcggagcaaggaggagaaggtgcctgaatgggaaccccccgaagcgcctgaaaaggagagacaggaggatgatgtcccagctggagctgctgagtgggggagagatgctgtgcggtggcttctaccctcggctgtcctgctgcctgcggagtgacagcccggggctagggcgcctggagaataagatattttctgttaccaacaacacagaatgtgggaagttactggaggaaatcaaatgtgcactttgctctccacattctcaaagcctgttccactcacctgagagagaagtcttggaaagagacctagtacttcctctgctctgcaaagactattgcaaagaattcttttacacttgccgaggccatattccaggtttccttcaaacaactgcggatgagttttgcttttactatgcaagaaaagatggtgggttgtgctttccagattttccaagaaaacaagtcagaggaccagcatctaactacttggaccagatggaagaatatgacaaagtggaagagatcagcagaaagcacaaacacaactgcttctgtattcaggaggttgtgagtgggctgcggcagcccgttggtgccctgcatagtggggatggctcgcaacgtctcttcattctggaaaaagaaggttatgtgaagatacttacccctgaaggagaaattttcaaggagccttatttggacattcacaaacttgttcaaagtggaataaagggaggagatgaaagaggactgctaagcctcgcattccatcccaattacaagaaaaatggaaagttgtatgtgtcctataccaccaaccaagaacggtgggctatcgggcctcatgaccacattcttagggttgtggaatacacagtatccagaaaaaatccacaccaagttgatttgagaacagccagagtctttcttgaagttgcagaactccacagaaagcatctgggaggacaactgctctttggccctgacggctttttgtacatcattcttggtgatgggatgattacactggatgatatggaagaaatggatgggttaagtgatttcacaggctcagtgctacggctggatgtggacacagacatgtgcaacgtgccttattccataccaaggagcaacccacacttcaacagcaccaaccagccccccgaagtgtttgctcatgggctccacgatccaggcagatgtgctgtggatagacatcccactgatataaacatcaatttaacgatactgtgttcagactccaatggaaaaaacagatcatcagccagaattctacagataataaaggggaaagattatgaaagtgagccatcacttttagaattcaagccattcagtaatggtcctttggttggtggatttgtataccggggctgccagtcagaaagattgtatggaagctacgtgtttggagatcgtaatgggaatttcctaactctccagcaaagtcctgtgacaaagcagtggcaagaaaaaccactctgtctcggcactagtgggtcctgtagaggctacttttccggtcacatcttgggatttggagaagatgaactaggtgaagtttacattttatcaagcagtaaaagtatgacccagactcacaatggaaaactctacaaaattgtagatcccaaaagacctttaatgcctgaggaatgcagagccacggtacaacctgcacagacactgacttcagagtgctccaggctctgtcgaaacggctactgcacccccacgggaaagtgctgctgcagtccaggctgggagggggacttctgcagaactgcaaaatgtgagccagcatgtcgtcatggaggtgtctgtgttagaccgaacaagtgcctctgtaaaaaaggatatcttggtcctcaatgtgaacaagtggacagaaacatccgcagagtgaccagggcaggtattcttgatcagatcattgacatgacatcttacttgctggatctaacaagttacattgtatagtttctgggactgtttgaatattctattccaatgggcatttattttttatcctgtcattaaaaaaaaaagactgttatcctgctacacactcctgtgatttcattctcttttattaatttaaaaataatttccagaaatgtgcagatcctctgtgtgtatgtcagcatgtttgttcacatatgcacatacacatactcataacccctatatgcgttgttgcataacagatgattttttaaaatatatacttccttatgcaaagtaatttacacagaaattccattgtaaattgataatggattttttatgttactagaagagattatttgacttcccaggaattttctgtctgtaatcactaaagtcaactttaatagagttttgaaacagtactgtgcaatccgatggatctaattaaaaaaaaggcaatatttttatattaaagtactatactaggagagaatgtttcagaactccctgatgaatttctaagtgagcaacttgatataaaattgtaatcttcatttttgtcagtgtatccagttacagaatgctacacacttacctttttattggctgagaaatctggttatttcatcttaatctcaagattgttttcaagtgttttataattaaatcataatagcatattttaaaatcaatcttcctaaaaggtctgcttttattgtatattttatttaacaataggcactgggtttgtgttacatatttatatattttattttatttttataatatagacatcacctagatgaaacacctttaccctgtcctgtaaaacactaaagttacatttttcaccaacttaattggaaagaaggggagtgagaaagcaaacagtctttaatgtgctgtggatctaatctagcaaggtatccttgtgccaacatgtaatcattaacgacggatgaaaaagcaagaaaacagccaatccttataaaattccagcattaaacatttgtaaagtgcttttcaccatagcaagactgtcagagtctatgttattagaatgttgcagatttccactgaatcgaacctcactggagaagagctcacttgtttttaaaaatcttggctatgtaagctgtcacctgtacaaatttttaacataataattcttgccaaatatgactttaaatgtacgtgttccttcagaactcaatgaaaatactctttggctaatgtatcaataaattttctgtaaatgttctgttcagggttttacagagatgacatgttctgacttaaaactgcaaaaagtctagtagatatttttcttcatggttttcaaagccagctctccacgtttggattttaacaaaatataaggcctctttgcactagtgaaaaaacacgtctactcatgacaagtgcacacccactatggctgtccttcttctgtaaacatccattcctctagaatctaaattgtagagcagtatagattatgcagcgccagctgactttctaaaccttctccttacctttaggaatacaagcctcaatttaaaaaatatattgtagctagtatttctctattgttttaaggtgagagatttgcaattaaagcccagtaagcatttatatagaagccacaatgtagaaagattggttaagtacactgctcttgtcttccatatatgattacttaagtttcaagtgacctcatgccaaatggaaatgggttgagaaatcttggttcagtgcttagtgaacaatagcctgcattaaaaagtgcatgcataattttgcacaatttagattcaattgacagtctattcaaagaagtctcaggattaaatgagcatggagaccaaattgccctcttaccccagaaaaggggtggtcccttctagtcacactaacacttcattggcccaacagtgtgacaaatcttgcaatgaaccatgcagtagcctgcatctgtaggttaatagcaatcttttgtctccattgctttctcttcatagcccttttactgaattccatcacagaaagttttacaattaaaaaaaaatgtcctgacaaccatttttgtaaatggaccttaccatctaattgtcccttattcaacgtgggtgacattaacaaaatgtgaacttcttgtgagggagccagctgtctaaatctgtcaaatcgtgcagttttattacacattctccaattcttcctagtttccctgaaaacaataaggatactgctatatattcagtaaaatctaaaaaaatcaagcattacttcttacatctttaaactttccatctcctccccaaaataaaaggtgttctattgccattagttctactgttttaaaatatctatattaagttgaccaggcccagattttttatacagctttttcccaagtgaaagattttcaagtgacttagaaaaacatatgtgccccaggtgtcattgccttttcttttgtgagtcattagaatgaaaggccaagttcttctcaagagaagatagcaagatccacggatattaagccaagcaaagaaagtaaaatcattggagtcatttctttctgttcttaggagaaaagtagatagcactggctaattgatggcaacatattttaaattaagtggtcaattcaaaaattctctttgaccttttctttcaagtagatttttttaaatgcatgactggagaattatcttcaatgattcatgatgagaggcaggtaggaattggttaagaagtatgagcaggaaaaaattattgtttaatcacatgaaaggcaacatctgttcagttcataaagcacacagtctcgaatggaagaaaaaaaggtccttcgtaagaatactgatgcataagataaagacgaaataatgaaaaagaaaaatgtatattattattcccttgtccattctcaagtttaagctgcggttgtcagttgaatgtgaaatgatgttatagttgttttaaatggttggaaataacctttctactactgtttctgccacactgttgtcctggttcatagaaccttgttttcttgacagttatttaaggtaataaaaggaacacaatttggcagatctttaagtgaaagagagaaaaaatttaagaaattgagtgatggctaaaagtaagtgcttccatccataacttttcttcttggatttttttcaatgtaattattgtaaaatatatttttttattttatcatgaagaatactcggaaggtttctcagattaatgagtatctcataaagagtagagaaaccaacacatacaatatatacacacaacctaaatagaaaactattttctttgtcatttgcatgccccagagaagttacttcttccctatttatttctttgaaaataattacaaaatagtatactaacaattttaatccatttgctgttttttttttttttttggtttctttttttttttttttgagacggagccttgctatgttgcccaggctgcagagcagcacaatctcagctcactacaacctccgcctcccgggttcaagcaattctcctgcctcagcctcccaagtagctgggattacaggtgcccgccaccacacccggctaatttttttgtgtttttagtagagacagggtttcaccatgttggccaggctgatttcaaactccagacttcaagtgatccagccccccaggcctcccaaagtgctaggattacaggcgtgagccaccatgcccagcttccatttgcttttgatattgtttttatctctgagttacaaactatacaagcttaccaggtataaggttagatgctacatctaggagcattcaagatatacattaatttaaacttttattagtctaactttctgttaagtctcttagctttgaaacataaaagagaaatcaagcccaaatttttagaggaaggctaaggtatactattggcagttgtagttttaattgtaattgactgattaaccaagtaatttataaaatgttacctatactgtcagtgttcacctcctctccctccctccttctctctctctctccccctctcgctctctcggctaatatatatgtgtatgtgtatatatatatgtatgtatatatatacacacacacacacacatacatacatacatacatatattctttttccttttaaccacttccctctcctacattttctattggttttgcctaaatagacatgttctcaatacacccatgttgaaggtatcctgggctagattgctgttgattttgctggttatgatcttttctttgtttttctgaaaaatagcctctcttgattccacattttctcaaattctatataacaaataatagtggatagtaaacaaatgacatactaggctgatctattacaatcattgaaagaaataaggaagagcagaaatcactaacagtccagaggctccaattcagctgctctagcatagatacaggaaagacatggagaataacactggggttagctaacagcagggaaagttagtagctatttcctagccaaggaacaaccttctctatggaataattttaagaaaattattccaaatctgtgaggaaaaaataagaagcagttcctcaatggagactttataaatcttaatttcctcacccctgggatgagatttgaagttgcagaggactcagaccaaagtcccatggcagaaaatgtacatatttttaaactactcccaggaagtaaactagtactgtgaatgctggcaataccatcagaaagtttatctttaaaatacctaaaaataaatatatatttgctatcttatcctctttttgtcacacaaacataaattggtcatatatatatttatatatatggttatatatatttggttatatatatatctttatatatatatcttatatatatatctttttatatatatcttatatatatatctttttatatatatcttatatatatatctttatatatatcttatatatatatcttatacatataagatatatgtatatatatatacattatatatatataatatatatatattatatatatataatatatatcttatatatatatatatcttaatacatatatataaccatggaacctgccaaacactaatcctagccaacttcaatccttctttctcttaactatcttctctgaataagttctggacttcaccttaaaataagtttttaggagagtaatatatattcatgggattgtgagggagcattgtagagctgttttcttctcagtcatagtggtggttttcctagctgctatggaaaggtttgttcacttatgagattaggacttttcttaaattcctcattaaatatgaacctaaggcatacccatcatttaccttgattcccatataatttgtataagtcatatataagtccattgacaaaataaaaaaataaataattggattccttgtatcaacagaaagccttgtgcttaaaacctgttattcttctttgagccagactaaacagtaacatttacaaaatggtatcagctcaacattaaatctaaggttacttctcacatacatcataaagtcagccatcatctttcatttaggatttcttggggttttctttttgcatatatagattatgtattacttaaatccaaaatacatgtgtgtatatatatacatatatatgtaacttaatataaatgtttgatgagttatctcaattgactataatcttctaagtcaaaaagaaaacatttaagtacataatataaaaagaactgaacattaacagtaatgggaaattcataatggctaaatatgaaataagctttgtctttgcagttacaaactaattcttgtacattttccttttcactaaaaaaataactaattgatagtttccattcacatgaacaagttataatcaggtttgggatagtatgcccaaaacctatgtttctttactttatattcttaaaatctgagacatgatttttctggaacaaattaagatttcatgtacaatagagtccctttcctaatactgttatgaagaaaccaagttgactaccttatgagagatcagatatttcccttatctcattatattcacagcatatgtttggacatgcgtttcaccaagaaccatgtagtaataagataaatggtaactgaggtactatggaatttttagaacttgattccccaggacatgctacagtaaactaaactatttattcaaaagtaacccaactaattaaagtgaaaaaaaattgttgaatcacaatgaacaaacataaaacaatacttaaatgagaattctgtgtcttttttggttttatctgtgatttattttgtccagtattaaggaatggttatctttatcattcttctaacatgttttggtttctctaatggttcattttcctttagcttgtgaaaattagggcagtttgtccagagccttactcgcaggagacaccagacccaacccatgcttagatttctgttaataaaagggagaagggtatttgaataggtagtaaaggcaggtacaagtttaagggagcagggctatcatatgtactaggtgagatttctataaatgtctgaaaagttacatgcatagtcattggctcaggtaatttctctgaatttgaacttatttgatttatttaaccaagttattataatatgcagttctctttaatcaatcttctattattcaatcatctatccatttattaattcaacaaatatttattaaagtgcctaccatgattatgtgctgtagaaaagacaaggacatttactagggggggattgtgggcccaatcggcatcataagcatgtctgaagcaaaagacaataatcacatccaacggcaccagttcagctcaactttagaattcagcagtaacagtacagatggcctaaagtacatctgtgtgtatctgtacgtgtgcacacacccatgtatatatatttatctatctgtacaaacactacatatgtatacacactatctatgtaaaatataatatatgtataatgcatataaattctaacaagtgtatttgtgttatctttaaaatagaacaattgtatcttgaagtggtaaatgcagagaattggttttattgttgatctgtggatttaatgatttctaggtgaaaaggacgtttaagtgtacaatttcttttcttaatttaatatatttatgtaaatgcatgcctgaaatttggttagattggctgtgttttgtgtcttttaacatgatcaaatgattaaactttatcttatgacttga

SEQ ID NO: 13405 - DNA, 1770 bp, Homo sapiens
  source 1..1770: mol_type = unassigned DNA
gaagctgcagccgccggcagaggagacctcagcatcatctagagcccagcgctggccctgcctccgcctgccccgccgccgccgtcgccgtttctgttcctgctactgtcccacctaaacaactcccgttacacggacaagtgaacatctgtggctgtcctctccttttcttcctcctcttccaactccttctcctcctcccacttcccagccgcagcagaaagcccccaacccaactgacactggcacaactgcaaacggtgtcatccgcacaactttatctcgctcctcgggctcccctaaggcattggacccatcgccgcgtcttttattttttgcaaagttgcatcgctgtacatatttttgtccccgccacctccctctgtctctggagtgccctacagccccgcaaactcctcctggagctgcgccctagtgcccctgctgggcagtggcgttcccccccatcctcccgcgcccagcccctgctgctctgggcagacgatgctgaagatgctctcctttaagctgctgctgctggccgtggctctgggcttctttgaaggagatgctaagtttggggaaagaaacgaagggagcggagcaaggaggagaaggtgcctgaatgggaaccccccgaagcgcctgaaaaggagagacaggaggatgatgtcccagctggagctgctgagtgggggagagatgctgtgcggtggcttctaccctcggctgtcctgctgcctgcggagtgacagcccggggctagggcgcctggagaataagatattttctgttaccaacaacacagaatgtgggaagttactggaggaaatcaaatgtgcactttgctctccacattctcaaagcctgttccactcacctgagagagaagtcttggaaagagacctagtacttcctctgctctgcaaagactattgcaaagaattcttttacacttgccgaggccatattccaggtttccttcaaacaactgcggatgagttttgcttttactatgcaagaaaagatggtgggttgtgctttccagattttccaagaaaacaagtcagaggaccagcatctaactacttggaccagatggaagaatatgacaaagtggaagagatcagcagaaagcacaaacacaactgcttctgtattcaggaggttgtgagtgggctgcggcagcccgttggtgccctgcatagtggggatggctcgcaacgtctcttcattctggaaaaagaaggttatgtgaagatacttacccctgaaggagaaattttcaaggagccttatttggacattcacaaacttgttcaaagtggaataaaggttggctttttaaattttatttatttttgtgctggctacgttaattttattttagtgttaccttcctcactgaaggtatttctttgtaataaaagaaagaatcttgcaggagaaaataagggggcaacataagaaacaataattatggcacctgaattaggacagtgacattaaatttctgttatttgttgactattgtgcgctgcaatcgaattgatatttgacatgctttccccatgtaattgacacatttaaaggaatctttggctttataaagtattgtttaaatattgtttaatgggcataacacaggactgtacatcagcatttgctagtagaaacaaagaggtcttttggttattttggcaattgcaaatcattctttcaccatctctgtttttgagtctgtctcataaaaaatactacttatactac

SEQ ID NO: 13406 - DNA, 9156 bp, Homo sapiens
  source 1..9156: mol_type = unassigned DNA
ccgctgcccgctgcccgctgccctcgccccgcgcgccgggcatgtgagcgcgggcgggcgccgtcaccatggcctcgccgcgcgcctcgcggtggccgccgccgctcctgctgctgttgctgccgctgctgctgctgccgccggcggcccccgggacgcgggacccgccgccttccccggctcgccgcgcgctgagcctggcgcccctcgcgggagcggggctggagctgcagctggagcgccgcccggagcgcgagccgccgcccacgccgccccgggagcgccgcgggcccgcgacccccggccccagctacagggcccctgagccaggcgccgcgacacagcggggaccctccggccgggcccccagaggcgggagcgcggatgctgcctggaaacattggccagaaagtaacactgaggcccatgtagaaaacatcaccttctatcagaatcaagaggacttttcaacagtgtcctccaaagagggcgtgatggttcagacctctgggaagagccatgctgcttcggatgctccagaaaacctcactctactcgctgaaacagcagatgctagaggaaggagcggctcttcaagtagaacaaacttcaccattttgcctgttgggtactcactggagatagcaacagctctgacttcccagagtggcaacttagcctcagaaagtcttcacctgccatccagcagttcagagttcgatgaaagaattgccgcttttcaaacaaagagtggaacagcctcggagatgggaacagagagggcgatggggctgtcagaagaatggactgtgcacagccaagaggccaccacttcggcttggagcccgtcctttcttcctgctttggagatgggagagctgaccacgccttctaggaagagaaattcctcaggaccagatctctcctggctgcatttctacaggacagcagcttcctctcctctcttagacctttcctcatcttctgaaagtacagagaagcttaacaactccactggcctccagagctcctcagtcagtcaaacaaagacaatgcatgttgccaccgtgttcactgatggtggcccgagaacgctgcgatctttgacggtcagtctgggacctgtgagcaagacagaaggcttccccaaggactccagaattgccacgacttcatcctcagtccttctttcaccctctgcagtggaatcgagaagaaacagtagagtaactgggaatccaggggatgaggaattcattgaaccatccacagaaaatgaatttggacttacgtctttgcgttggcaaaatgattccccaacctttggagaacatcagcttgccagcagctctgaggtgcaaaatggaagtcccatgtctcagactgagactgtgtctaggtcagtcgcacccatgagaggtggagagatcactgcacactggctcttgaccaacagcacaacatctgcagatgtgacaggaagctctgcttcatatcctgaaggtgtgaatgcttcagtgttgacccagttctcagactctactgtacagtctggaggaagtcacacagcattgggagataggagttattcagagtcttcatctacatcttcctcggaaagcttgaattcatcagcaccacgtggagaacgttcgatcgctgggattagctacggtcaagtgcgtggcacagctattgaacaaaggacttccagcgaccacacagaccacacctacctgtcatctactttcaccaaaggagaacgggcgttactgtccattacagataacagttcatcctcagacattgtggagagctcaacttcttatattaaaatctcaaactcttcacattcagagtattcctccttttttcatgctcagactgagagaagtaacatctcatcctatgacggggaatatgctcagccttctactgagtcgccagttctgcatacatccaaccttccgtcctacacacccaccattaatatgccgaacacttcggttgttctggacactgatgctgagtttgttagtgactcctcctcctcctcttcctcctcctcctcttcttcttcttcagggcctcctttgcctctgccctctgtgtcacaatcccaccatttattttcatcaattttaccatcaaccagggcctctgtgcatctactaaagtctacctctgatgcatccacaccatggtcttcctcaccatcacctttaccagtatccttaacgacatctacatctgccccactttctgtctcacaaacaaccttgccacagtcatcttctacccctgtcctgcccagggcaagggagactcctgtgacttcatttcagacatcaacaatgacatcattcatgacaatgctccatagtagtcaaactgcagaccttaagagccagagcaccccacaccaagagaaagtcattacagaatcaaagtcaccaagcctggtgtctctgcccacagagtccaccaaagctgtaacaacaaactctcctttgcctccatccttaacagagtcctccacagagcaaacccttccagccacaagcaccaacttagcacaaatgtctccaactttcacaactaccattctgaagacctctcagcctcttatgaccactcctggcaccctgtcaagcacagcatctctggtcactggccctatagccgtacagactacagctggaaaacagctctcgctgacccatcctgaaatactagttcctcaaatctcaacagaaggtggcatcagcacagaaaggaaccgagtgattgtggatgctaccactggattgatccctttgaccagtgtacccacatcagcaaaagaaatgaccacaaagcttggcgttacagcagagtacagcccagcttcacgttccctcggaacatctccttctccccaaaccacagttgtttccacggctgaagacttggctcccaaatctgccacctttgctgttcagagcagcacacagtcaccaacaacagtgtcctcttcagcctcagtcaacagctgtgctgtgaacccttgtcttcacaatggcgaatgcgtcgcagacaacaccagccgtggctaccactgcaggtgcccgccttcctggcaaggggatgattgcagtgtggatgtgaatgagtgcctgtcgaacccctgcccatccacagccatgtgcaacaatactcagggatcctttatctgcaaatgcccggttgggtaccagttggaaaaagggatatgcaatttggttagaaccttcgtgacagagtttaaattaaagagaacttttcttaatacaactgtggaaaaacattcagacctacaagaagttgaaaatgagatcaccaaaacgttaaatatgtgtttttcagcgttacctagttacatccgatctacagttcacgcctctagggagtccaacgcggtggtgatctcactgcaaacaaccttttccctggcctccaatgtgacgctatttgacctggctgataggatgcagaaatgtgtcaactcctgcaagtcctctgctgaggtctgccagctcttgggatctcagaggcggatctttagagcgggcagcttgtgcaagcggaagagtcccgaatgtgacaaagacacctccatctgcactgacctggacggcgttgccctgtgccagtgcaagtcgggatactttcagttcaacaagatggaccactcctgccgagcatgtgaagatggatataggcttgaaaatgaaacctgcatgagttgcccatttggccttggtggtctcaactgtggaaacccctatcagcttatcactgtggtgatcgcagccgcgggaggtgggctcctgctcatcctaggcatcgcactgattgttacctgttgcagaaagaataaaaatgacataagcaaactcatcttcaaaagtggagatttccaaatgtccccgtatgctgaataccccaaaaatcctcgctcacaagaatggggccgagaagctattgaaatgcatgagaatggaagtaccaaaaacctcctccagatgacggatgtgtactactcgcctacaagtgtaaggaatccagaacttgaacgaaacggactctacccggcctacactggactgccaggatcacggcattcttgcattttccccggacagtataacccgtctttcatcagtgatgaaagcagaagaagagactacttttaagtccaggagagagagggactcattgctctgagccagtcacctgggacctctgctcagaggaccgcaccaggaggctgcgcccaggatttgtcgggagccacgctgagtggcaagcaggaagagggacaggcatgcggggcgtgaccacagtggaggagacaggtggatgtggaaccacaggctgctcattcagcacctttgttgttactgtgaacgtgaatgtgggccagtatcaagagagtctctctgagtgactgcaccatggcactggcaccagggcgactattagccagggcagaccactagacttcagtgcagggacctggttttcccttcgtttgcactttagtaaattgggtgggaggtttccttttggatctgttttgagactgttccagaaagaaggcttcctttcccgagacacttccataggcagcaatttggtgattcatttgcagcaaaatactggcttgttaattattttcctgcccagcgcctgcgtgctaaacaacagatgaggatgagcgtaccactgaagtctgaagatgtcgccattgaacggacagtgttttcatatgtttctaggttgtcttatgctacagtttccaagccagcccccacagtgaggaaatgtgtgaggcaccgcacacaactgcaatgtgttttttaagtcaaggtgacacatgtatttaagattttttttttaaatctctttgcagttaaatctcactttttcaaacaagcctggatcagggcaaaacaacttatatttggttttagctggaggctcagcaggcagattgcaggcaggggggcacttttcatccatgagggcccagcctggggcctgggactcgatcaccattgtggaggccagaggcagctgcgtatggaggagaaatgtcaaactgaacgcaggtttcaccactctaggaaagcagcttgttgagcccctgcagctggatgtggttagagggatgggctgaataggcaggttagatttcctgcatcaacagtgctttgggaagctgtgtggattcctgaggaagaacagggagccgagatggagccacacatgagtttgctcaccggctactgcagcactttgtacccagaatctcatgtccacaaaccccatgtaaactttcaaccactcaaagctgtttattcggctgaagaaataacttttttttctcacccagtcatttgtacctcttcatatggctatgtcgcaccctccagaaacgtggttatacttccagtcagtgtgggagaactgaagacttccggttggtcgaggaactgagggttgaccttcgggaaggaagttccactcatcttatttattatgcctgtgatgtgggtcctgccagggagacatccagtactcggtgtctttaattgccacctggggaactgtgtttattggccttctttggggcatcctggttttggatgaagtgaggggaatacagaggtaaaagaattgtctccaccctgaagcggggagtcccgcttcacatttctggaaatggtgcagccactggggacagttctgccccgggcatggttgtttcttcaaggtcctctaaatataatccctattcttacataatccttggccctgatggttttaagcaagaactcctgtgtcccatggtctccaccactcaccatcaccctgctgtagcaagagtcctagtcaggggaggtgcattttagtagttacattgcacttatccatgagataaataaaaggagaactgtttttatcagtggaggctaacctaaaatttcaaagtgtcgcctttttgaaatcttgggcctctctctctgtagaaccaatggccctttgtggctcacggcctcgcacctaactggagagttctgagctcctgcagctcacctgagcccacagactaggcttcttggctccttccgcagcatgcctgctcacccccagaacccgcagctgtgggaagagccatgtagggaggctattcccaggcatacacttccactgccttcagctgacgtcacagctgacaaatcatctcctctatcggagccagaagacttcagctccacaaaatgaagtgttctgtcctgaaaacattcttgggaagaatcccaacatcgagaaaacggtgtcctgtgagttccaacaatgcttcttgttcatgggtttcttccgtatggagtggattaagagtgttttattttgttgttctaactgagaaaaaaaggaggcacccacaaggttgaggtcacacagtctccacagtttccaggaggcgtttgggggtggggaaggcacctccagagcatgaggctctaaggggacatgagtaaagcatgtctgtgacccagtgaggaagggagaggccagctgcactcctgcacggggttcctagctgcagaagggtcccgcctaggccgaggggaaacacctgatagcagaagaggcctggatgcacacctggcacgccgaggctctccgcccagacacagtgctccatgtcagcccctgcacctggggtgtgtgattcacgtgcacagatgccacaatcctgcaccaatatcccacagatgggggaaggtgagaggaaggggcaagtgatgtgtaactgctcaagagatgcttaaacctccatagagaggagccgggcgcaggggcatctgtgtgtcccgtcacacactgcagcagggaagggtggctggctggctccctggcatcagtggtttggtttaagctccagagggtcttattgccattgtcttttcctctgccccttgagccagcctaaggccctggagtctgtttctttaggcggatgaactgacatgctcctaccatgaccaggctctgggcaaggctcctcacagtatccttgagaggtgggcatggaagtgcccatttctcaggtacagaaaccttcagagaggataaatagcttgccctgtagaagcaggactgaaacccttgtctgcctgactcccccagctactctgcccactgtagccccctgccttactgtcctggcacacccctcaccatcctgtataccttaaatatcaaagagggcaagagagaaagggctttaaagataagttatttttttaaggaaccttaatattatttttaagaagtaaccaaattagtgacgtgaaatgcaaaaaaaaaaaaaaaaaaatgctgactacccttttgaaaatgtgctttcagattgttttttatatgtaattcttagacacttgtcattaagaaaatagtggctggcttgtgctcagcaagaagcacactggcacgtggctttggtataggaagtggaaggcaaggacctgggtttctgacaagtgcagtcagacatacacatccatctgagagctgcttgccttgttcccgtggtaaggccatggctcccacatactggaagcatatttttgtgaactgttttcagaattgggaacatattcagtggaatgtcttaaacgctgacacatcttcctcctttgaggggaagtatattttcagaagcagctaagacatttagagccaaaattgctgataggtggttcagtcaagttggctgatggcatctgaggtcaaaaactaagatgtgacgattgagttcttaaagaggtaactcttaaagtgggcccaagggagaaggcagcatctttggactcctaggctggatggctacccaagaatatgccattgaaggatgacacctattcagatgtgaaagttcccagagcaggcacctttgggtcacccaccacgtgtggctttttggtgcctgcatgaaactgtgttgccccctggtgagatgcccgggtgtcctgtaagccgatttaactctgcctgaggaagaggagctgtccactccagttgcccttggctaagtttagcctaacacacagggttttgacccatagttctaaaatacacaaattttgagactacagcacttctttggaaagaggaagaatgcaaagttcagtatttcaatactttgtattttacttgaaattacccttagtagcatcttttttttcctgtctgaaagcttttgtgtggatgagaagggacatttcatttcctcccttaacaaagtgtcattctgaggttctcatgtgtgtttttggaaatagagatactggttttgtagagtttgcctttgggtatgttttctttttttcttaaatctccaaggaagagaactgactaaaatagtaggaacatgaaagtattaaatgccaattaatttgttgtagtaaagtatcttcattagcgttatactccatcatatctggtgtaaactgctcacagaaaaccctatgaaaccaaagggggaccattcaggtctaaaaagcgacaggtccgagactgggtctgtcacctgggcattttcaaagaggacattttgaagaatttgcatattcagatttttaaaatgcacttaacatacttcattacagatttcttgggtagggaggatgggataggccagggatgggatggagtcagttctgcctgggaaactaatccgaatcatttacctttctgtattaaccttggcctgtcctaaaaagagaacgactgtttcatcatgagttgctctgagttttgttaatgtttgtgttggtggattgacggttaaatgaagcatttagctggaatatgaactttgggagttttcatgttgtcctggatttctctttgtaaacctttaaaccttagcccctggttgattgtgttaaacccattatgagaatgttatttaaagttgtattataattgcaacctccactaattattcagtactgtagcagcaaagtattatttgtaagaatttggttatttttatacttatatccactctaagtctggcgttctagtcagtaaaatgatgcaataaaattaatatcattttca

SEQ ID NO: 13407 - DNA, 13829 bp, Homo sapiens
  source 1..13829: mol_type = unassigned DNA
atgctttgtggggacgttgacaagtggatccaagatggcgtagaaagtaatgacaggatttggatgaagtaatggatcactaatgaactacagtgctggtgagatgtgtaagaaattataaagagctctgatgggctatttgggtgatacccagtgcagtgaactgcaggatttttgtccctgagtcatggaagacagaagagctgaaaagtcatgtgaacaagcatgtgaatcacttaagaggcaggactatgaaatggccctcaagcactgcacagaggcccttctttctcttggccagtactccatggcagacttcacagggccttgtccattggaaatagaacgcatcaaaatcgagagtcttctctacagaattgcctcatttttgcaactgaaaaattatgtgcaagctgatgaagattgtagacatgtgctgggagaaggactggccaagggagaagatgcctttcgggcagtgctttgctgcatgcagctgaaagggaagctccaacctgtatccaccattcttgccaagtcactcacaggagagtccctgaatgggatggtaacaaaggatttgacaagactaaaaacacttctctcagaaacagagacagcaactagtaacgccctctctggatatcacgtggaagacttagatgaggggtcttgtaatggttggcatttccgcccaccacctaggggaatcacaagcagcgaggaatatactttgtgtaaaagatttttagaacaaggaatctgtaggtatggtgcccagtgtacttcagcacattcccaggaagaactagcagaatggcagaaaagatatgcttcacggctgataaaattgaaacagcaaaatgagaataaacagctctcaggcagttacatggaaaccttgatagaaaagtggatgaattcattgtctcctgagaaagtgcttagtgaatgtatagaaggagtaaaggtagagcacaatcctgacctgtcagttactgtcagcaccaaaaaatcccaccagacatggacctttgctctcacttgtaagcctgcaagaatgctgtatcgtgtagcattgctttatgatgctcatcgtcctcattttagtatcattgcaatatctgccggagatagtactacccaggtatcacaagaagtcccagaaaactgtcaagaatggataggaggaaagatggcccaaaatggattagatcattacgtgtataaagtcgggatagcatttaacacagaaatatttggaacttttcgccaaaccatagttttcgactttggattggaaccagtactcatgcaaagagtaatgattgatgcagcttctacagaagatctcgaatacctgatgcatgcaaaacagcagctagtaaccacagctaaacgttgggattcttcctctaagactattatagattttgaacctaatgaaactactgatttggagaagagccttcttatcagataccaaattcccctctctgctgaccagctatttactcagtccgttttagacaaatcattgaccaagagcaactatcagtcacggttacatgaccttctttatattgaggagatagcccagtataaagaaatcagcaagttcaaccttaaagtgcaattgcagattctggcaagcttcatgctcactggtgtttctggaggtgcaaagtatgctcagaatggacaactttttggtcgctttaagcttactgaaacactttctgaagatactttggctggacgactggtgatgaccaaagtcaatgctgtttatttattaccagtccctaaacagaagttagtacagacccagggaaccaaagagaaggtttatgaagctactattgaagaaaaaacaaaggaatatatatttttaaggctatctagggaatgctgtgaagaacttaatcttcggcctgactgtgacacacaggttgaacttcagtttcaattaaatcgattacccctctgtgaaatgcactatgcactagacaggatcaaggacaatggggttttgtttccagacatcagtatgactcccaccataccatggagtcctaacagacaatgggatgaacagttggatcctcgactaaatgcaaaacagaaagaggctgttctggccattaccactccacttgcaatccagctgccgcctgtgcttatcatcggaccctatgggacaggcaaaacgttcactctagctcaggctgtcaaacatattctgcagcaacaggagactaggattctcatttgcacccattctaatagtgctgctgatctctacataaaggattatttacatccatatgtagaagcaggcaatccccaggcaagacctctcagggtatatttcagaaatcgctgggtaaagactgtccacccagttgtgcatcagtactgtttgatctcaagcgcacattccacctttcagatgccccagaaagaagatattcttaaacatcgagtggtggttgttaccttgaatacttcccagtacctctgtcagttggaccttgaacctgggttttttacacacattctattagatgaagctgcccaggccatggagtgtgaaaccattatgcctctagcattagcaactcaaaacactcggattgtcttggctggtgatcacatgcagctcagtccttttgtttacagcgagtttgccagggagagaaaccttcacgtttcattacttgaccgactctatgagcattaccctgctgagttcccatgtaggattctcctgtgtgagaactaccgctcccatgaagctatcatcaattatacctctgagcttttctatgagggcaaactgatggccagtgggaagcagccagcacacaaagatttctacccactaactttctttacagcacgaggagaagatgtacaagaaaaaaatagcacagctttttataataatgcagaggtgtttgaagtggtggaacgtgtagaagagttaagaaggaagtggccagtagcgtgggggaagttagatgatggcagtattggtgtggtgactccatatgctgatcaagtgtttagaatacgtgctgaacttcgaaaaaagagattatctgatgttaatgtagaaagggtgctaaatgttcaaggaaagcaattcagagttttgtttcttagcacagtacgtacaagacatacttgtaaacataaacagacaccaattaaaaagaaagagcaacttctggaagattccacagaggacttagattatggttttttatctaactacaagcttctcaatactgccatcacaagagcacaatccctggttgctgtggtgggtgatcccattgctctgtgctctattggaagatgcaggaaattttgggaacggtttattgccctgtgtcatgaaaacagtagcctacatggaatcacttttgaacagatcaaagcccagttagaggctttagaactaaagaagacatatgtgttgaatccgctggcacctgaatttatcccccgggctctaagactgcagcattcaggaagtaccaacaaacagcagcaatcaccacccaaggggaaaagtcttcatcatacccagaatgatcacttccagaatgatggaattgttcagcccaatccttctgtacttattggcaatcctattagagcatatactcctccaccccctcttggacctcacccaaatttgggaaaatctccaagccctgttcaaagaatagatcctcacactgggacaagtattctttatgtacctgctgtctatggagggaatgtagttatgtcggtgcctttacctgtaccatggacaggataccagggtaggtttgcagttgatcctcgaattattacacatcaggcagcaatggcctataacatgaacctattacagacacatggacgaggatctcctattccttatggccttggacatcacccacctgtcaccataggccagccacaaaatcagcatcaggagaaggatcaacatgagcaaaatcgaaatggtaaaagtgatacaaataattccggacctgaaattaataagattcgaacaccagagaaaaagccaacagaaccaaaacaggttgatttggaatcaaatccacagaacagaagtcctgaatcacgtcctagtgttgtttatcccagtaccaaatttcctcgcaaagataatctcaacccaagacacataaatcttccccttcctgctccccacgcacagtatgcaatccctaatcgccactttcatccccttccccagctaccaagaccaccctttccaattccacagcagcacaccttgttaaatcagcagcagaataatttgcctgaacaaccaaatcagataccacctcagccaaatcaggtagtccagcagcaaagtcagttgaatcagcagcctcagcagccacctcctcagctttctcctgcatatcaggcgggacccaacaatgctttttttaatagtgcagttgctcatcggccacagtctcctcctgcagaagctgtaattccggagcagcagccccctcccatgctgcaagaaggccacagtcctctgagagccattgcacaacccggccccattcttccttcacatctgaatagcttcattgatgagaacccctcgggattacctataggggaggctttagatcgtatacatgggagtgtcgctctggaaacattaaggcagcagcaggcacggttccagcagtggagcgagcatcatgcctttctcagtcagggcagcgctccatacccacaccatcaccatcctcacctccagcatcttcctcagccgcccctgggattacatcagccgccagtgagggcagactggaagctcaccagcagtgccgaagatgaagtggagaccacatactcaaggtttcaagacttaatcagagaactgtctcatcgtgatcaaagtgaaacacgggaactagctgaaatgccaccacctcaatcaagacttttgcaatatagacaagtacagagtagaagcccaccagcagtcccatctcccccatccagtacagaccacagtagccacttttctaactttaatgataacagcagagacattgaagtagccagcaacccagcatttccacagcgcctcccaccccagatattcaactcacctttctcgttgccatctgaacaccttgcccctcctcccttgaaatacctggcacctgatggagcatggacttttgctaacttgcaacagaatcacctaatggggccaggttttccctatggcctacctccattgcctcacaggccaccgcagaacccttttgtacaaatacagaatcatcaacatgctattggtcaagagccatttcacccattgtcatctcgaacagtatcttcttcttcgctccctagcttagaagagtatgagcccagaggacctggtcggcccttgtaccaaagaagaatctcatctagctcagttcaaccttgttctgaagaagtaagcactcctcaagacagtctggctcagtgtaaagagcttcaggaccacagtaaccaatcttctttcaacttttcatccccggagtcctgggtaaacaccacctcatctactccttatcagaacattccgtgcaatggatccagcaggacagctcagcccagagagttgatagcgccacccaagactgtcaaaccccctgaggatcaactgaagtcggagaacctcgaggtgtccagttccttcaactacagtgtgctgcagcatcttggccagtttccaccccttatgcctaacaagcagatcgcggagtcggccaatagcagtagcccccagagctctgcggggggcaagcccgccatgtcctatgccagcgctctgcgggcccctccaaagcccaggccccctcctgagcaggccaagaagagtagcgaccctctgtctctcttccaggaactgagcctagggagctcatctggcagcaatggcttttactcatattttaaataatcactttttttttccctcaagggagaatgttttaatttctgtttgtatcagtagaattaaggtagttggacttcatctatagatgcacagttccctttgttttaatattaaatatgttctcacttaattgctttgctgctagacttgcaactaatttttttaaagtatattccattattttgcatttttgatgtgtcaaaactttgacagcttttatgtagaataaaaaaatttttaaatttgtgtattgttacatatgtttgcatcaagctagcagccaagaggttaattgtgcaactataaaaaaaaaaaaaaaaagaaaagtttgtctaaaatgtatttaaaaagaaaaaaaaattgtaagtagcatttacatttattcaataatattaccacatgctgggtttctgtaccagaaatggccagttgatgtacaaatgtatgttatttttgcttaaattcatttaaattttttttaaaataaaggggcagcatcttctaaataagttttatcagctttttttttttttttggtgacacgatgctgcattctaaaacttttatagttttagactatgtatgatgtgttgttgtaatctccatccaccataggatagagttaaaggcattctttgcaggcatattttgtatgccactgttttttgaaatgtgaaaaaaacgttggcatacttagttattttttggacaagctacacttcaagcttgtttttaatgttaatttgatagtgtgtgtttttttttttaaacaaatcaagaagctgaaaaatttttaggattgttggtgcttagtagacttgataactattttaaaaatgcgtgaatttagtaaaattctttttttctcactatgcatgtgtaaatgtttgtaacctggcttccctcttctccagtggtataaagaattgtgccgctttaaggtttgggtttttttctctccagtaaaaattttggtaccttatttgatgtttacattaaaatgtgacattatacgtggcaattcaaatattttgctagctgtcttgtttgaggaacaccattaaagaagaaatataatgtttgtcaaaaatgtatcaaaattcatcagaatctggggcagaaaactacccttgtttttcatgtctttcaattcttctaaaataccccttattgaacttgtacacaatataaaatttaaatagccatcttaaatattctaccatctaaaaattgctttgaatgaattttggtaaaatccaaaggaagatgtttaccctcttgaaacttatggtcttgtcacacatttaaagcaatatatgtccttattttcctgaccttgtaatactacttttatatttcagaggtatctcgaaactacaatataaacttttaaaaaaaaataagatgaggctggggaacctttcgaatgaacccaatcttcctgatgatccattcaaaaacaggtttttggaagaccactttcgataggcaatcctataatcaaagtacatttttaaaatcaggttgtaaaatggcaaaggtaaagaaaaattactgacatttcttctatgattggagtttagtttatgttggccagctacaaccccttttaatcctcagacagtttgggataaaagagtgcctttggttaatggttagcaagctccaggataagcgctgcgtgcctcttgtattcagctctacctttctgctaagagtgcggttcatttgtgtgtggctttgcgttccaggctgtgggtctctgtgtaaggtggcagacatagacttgtaaactgcagacgtgttaatggttagcataaatcacagctggaaaactgagccggcaagttacagcaccactctttctctgtatgatgtcagatcaccacatttagcaatgtcaaattttactcaacattctttagtaggaagaaaagaagaaaaagttttgccacgtagctatgtgcttttaagtctgtgacaaaactcaagacatatccgaatgaaaattagatctctctgatgtgaggatgttatggaaaataattttcccatcagtgattatccaccccccagcccccatatacaggactacaacgcaagctagataaatgttcaaaagcaatctgataatatgaagacagaattgtcaagtcagggctttcagttgaccccttgtcatgaggttattgcctaattttctgttttctatacttgaatctttaaaaaatatcagtttttaaattatttatatttatatttagttaagggtcatggggtcgtgtatgcaccccatcaccttatataaatatgttgatgatggaagctttggataaggaagctattaagttgtcatgacatccttgttctaagcagttatttctaaaaactaaaaataatagctacttattggcccaccgctctgctgtgagtatatgagtacttctcattccttatttccatagccagtcaaggattctaacgctgcttccatctgatactcttcttagattctgcatcaaatgcttattttgacttacaacaagcttactcttcctcagcattacataatgccatctttccaaccatgctttaaagaacctgctctttacgcatagtatcttataacattttgaacacgtcttgtgtaagaatcattgcaagtttccatcaaaatgaggcgtgtcttctgagtacagctgatgttctttgggtattacttgagtagtagtagcaagtacccataaatcagatttatgaaacataacttatatgctaggttcaacccttatatatgcatatatatgtatagtatatgtatataaaatttttttccagaaaacttgatgatagctctcagataataccaagtattaccagcttccatttcttcagagcagatttttttctaagtgaggttaattgttcacataatgtctttttacatctttgtcctttgtatcactctgaagttttctttttcttgccagaatatttgtttcactttttaatttcagtgctacttgagattttctttttttttaacctgaaagacgatattttggatgatagagtttgtaaagtgagccttcatgctgaaaaaattcttttcatgatctaaaaatggtcttttgttacgatttgaagaacctcattccgtgtaacatggatattttcttgtgtgtctttaaagggggttttggttgtcatttgggcatatgctttgccaaattgttatagcagaactttgtttttgattaatcagtagttaattattgaccatttaaactaacatgaccttaattttcctttcctcacacagatgtgctttctatccaggtcattttttacacgtgaaataacaaactgctttgtgtagattttttttttttttaaatcatcagattttagaataagtttaggtttaatgtaaacatcaactggtcttttcagttcagagaactgcagaataagtaaaataagcagaattcccactgaataagcattacctaattaaacatagcaacatctaagaccaatttatgaaaatactctccttttttatggaggcattggagctgctgagaaagctaatgaatttcccaactttgggataattaatatatagtattgtgttgctctagtgtagttgattttatgtgtttaatatttttcatgtcaagagcaaagctgcagacgtaaaagatgtttctctagcccccttagctagagcgagccacctttgttaagagtcagggtgtgaagaacaatttcaagataaattttagtatttcaaccattgttattaagaaaattagacttactgaaatactcatttaaaaacagacaccttctatagcattgttttatagtggagttatttttaaaaagggaatcccagaaagaatctataaaaatacaaggttaaaactttaaatgtattgaaagatacaaattggtgctttcaaatgtcatgtaagctagccattgtgtttttttttttccctccagctcctcaatggtagtaatttgtcttttatgatttaccgtacattatttcttgctcaccatccccttaacatatgaaaatccttaatttctactgccgcgctatatgtcttcctgaatctcaaggtataaatgtcttaatggatctgatttgtctccactctttgccatctgatccacattcaaaccgcctagaaattagaaagaataggtaatgttctatctacgatttcttgttcaaaatatcacgtagtggtgccaatcacttacaaagacaccatctccatcttgaaagagtaactggcatgttagtcttgaaaatgctcattatgatatgctcctcacatttcccatctgcttgaggatggacatttattagctgagactttaaagctgctaaattcacactttctactttcatacctttttaatcagtaatgtcaagaccattgttgcaaggagtgaatcttactaaacacatcctgttattactttaaactagaatatgagattcaagagatttaaaaacaattttaatgtaacgtttaaaatttttgaaccaattgagaatgtctactttggagtgaagtttaaggaaacagtcaccagagtttctaaaaattttttggagggaggtacctaatagaagaatctagacttagaaatgtgaactgtggttaaataccaaacccagttccgcagtggtcgtctaaagcgtctaaaactggagtgttaagaaaacccagagacattcatatagtttcagttatcagagtattagaccagactttatttgcaatttgttcaacagagagattttattttgatacagatattaagcataaagcatagtaagttttatataattctatgagttcattaaacaatattatgaaattttcattatgttcgtggggagtctttttaactgtttctacctcatatatgaggtctcttctgtattttactttgcatactagcatgtgattgcctgccttagaactatgtagaggaggggaaatcgatattaccttttaagaaatttttgattttatgaagtgttttcattaatacttttttaatgtttgagaagtaaaggggaaagggtggcaaattacataggttgcaacacagagtagaagtcacatagtactatttacagatctgtcctgttttaagatttgagaattgtgaacaggatggagcaatggttctcaaacttcagccagtatcagaattgcctcgaggtcttgttaaaattcagatagctggacccacccccagcatttctgattttggtctggagcctgatgatttgcatttccaacaagtttccaggcgatgctgatgctgccagtccaggaaccacactttgaaaatcactgggtctgattctcgcagtttgaaagtctcagagaccttcagagtctgaacgtcttttcaaccatgtatttatttactcagtgtaaaaaactgatctctggagacatttttataaatctggtgccatgactggaacatttgtggagaaaggtctccatggagcgacaggccctttggattggccaccacccctcctcactctcacccctgctggggtctgcactgctcttccgcagtagggtgaaggagctctttggttttagggtgagtttgcttttgtgtacgctgctgcctggacatcagtctggaagctgtgcatttgtttggtgtgcttagggtcaatcttgatccacatgcatggaagtgagaatcctggaaagaagccatcagaatgccatgagagtgcacctagcatgtatcgaggcactaagtgcaggagtccctgtcctaagatggcagtgacatggagcatcgaaaaccacagataatccttaaataataaaataatagttttgtttttttttcttcggggcagagtctcgctctgttgccctggctggagtacagtggcatgatctcggctcactgcaacctccgcctcccggcttcaagtgattctcctgcctcagcctcccaagtagttgggactacaggcatgcgccaccacgcccagctaatttttgtattttttagtagagacggggtttcaccgtgttggccaggatggtctccatctcttgacctcatgatctgcccgcctcgggctcccaaagtgttgggattacaggcatgagccactgcgcctggcaaatgttttagtttttatggttattattattttttttttttgtgggggagggtggtgagggcaaaggatttgtttttcaaattatgtgtttctcaggttaacaaagttattttagattctctgccatgccagcaggtgttagagagagcctgaagtgttacatatggcagaaaataaatgtctctgattactttgctacctttaaaaaaatctatatgtgtttgcaaaacagcctagggggatctaccacctacacagcatgaattattcataagtcataggtgcacatgtatgagcaagttatttttgagaaagaaactgcctataatataataaacctgtcaggtctttgggtattgtttaatttgtgtgttgttgctgttttatctggactgcatcttggggggtactgggctctgcttctggtttttagtttgcctttgaatttactgagctactagaaagacaaaaaaaagctatttttatggtaatagaatacagaatgacttaggtgtaaaagtacacgtgaagaccatcgtagaatatacagctttggagttttcttaagacacagtccttcctactgaaaaggcttgctcacctttggagaggattgtttatattttcagcctgggttcctttatgcagtcccaacttagaggggagcttcggtttatttacactttgctttgcacgataacttgtatgcgaagacctctttatatctttcagtaggtcagagggctctttgtcctggttgaagtcccaaagtgtcagtgcagctgagaatgtttctcagcctccccctttacagaggaagggtcctggattttcataaatccagaccatgcctgcttcctataaatccatgtatatgacattgtactgtatctgatttctgtgccagtcatctgacctgattctttaaaccccataaaggtactggctatatgtagtagttgtatcctaggtaaatatggtgattaaaatacttctcttctaaattataaagataatgagttttgcattttattaaagggtcctgttattagtgacacaggatttttttttaatgcttcatacatatagttcttatctaaacttgttcagctaacttcatagatcagttacttagcaaattcatactgagtcttattttgggaagtcttcctgagggaagctgtacaaaactgaggtggtcaggttcatctcttcaaagtaccagttatacagccatctaaataggcataacttatggcaaaattataacaattttttttctttgcagtaaatgatacctcatctaagaggctctaatacctaaagagtttatccttaaaagtaaaagtgactttgtaccataaaataaccccaaagccactctctagggtttttattttcttctttctttgtctttatcttttctaacttagttttggaattacgttagctactttggttccatagaacaagttttcaacttggggtctacagttcctacagtgtgctcattgtctcagtgaagttcttttgttttcaaagattcatggtaacaaaatgtattttactgctacaactaaaatgtatttataataaaatgcctttttaataatttgg

SEQ ID NO: 13408 - DNA, 1529 bp, Homo sapiens
  source 1..1529: mol_type = unassigned DNA
caagtggatccaagatggcgtagaaagtaatgacaggatttggatgaagtaatggatcactaatgaactacagtgctggtgagatgtgtaagaaattataaagagctctgatgggctatttgggtgatacccagtgcagtgaactgcaggatttttgtccctgagtcatggaagacagaagagctgaaaagtcatgtgaacaagcatgtgaatcacttaagaggcaggactatgaaatggccctcaagcactgcacagaggcccttctttctcttggccagtactccatggcagacttcacagggccttgtccattggaaatagaacgcatcaaaatcgagagtcttctctacagaattgcctcatttttgcaactgaaaaattatgtgcaagctgatgaagattgtagacatgtgctgggagaaggactggccaagggagaagatgcctttcgggcagtgctttgctgcatgcagctgaaagggaagctccaacctgtatccaccattcttgccaagtcactcacaggagagtccctgaatgggatggtaacaaaggatttgacaagactaaaaacacttctctcagaaacagagacagcaactagtaacgccctctctggatatcacgtggaagacttagatgaggggtcttgtaatggttggcatttccgcccaccacctaggggaatcacaagcagcgaggaatatactttgtgtaaaagatttttagaacaaggaatctgtaggtatggtgcccagtgtacttcagcacattcccaggaagaactagcagaatggcagaaaagatatgcttcacggctgataaaattgaaacagcaaaatgagaataaacagctctcaggcagttacatggaaaccttgatagaaaagtggatgaattcattgtctcctgagaaagtgcttagtgaatgtatagaaggagtaaaggtagagcacaatcctgacctgtcagttactgtcagcaccaaaaaatcccaccagacatggacctttgctctcacttgtaagcctgcaagaatgctgtatcgtgtagcattgctttatgatgctcatcgtcctcattttagtatcattgcaatatctgccggagatagtactacccaggtatcacaagaagtcccagaaaactgtcaagaatggataggaggaaagatggcccaaaatggattagatcattacgtgtataaagtcgggatagcatttaacacagaaatatttggaacttttcgccaaaccatagttttcgactttggattggaaccagtactcatgcaaagagtaatgattgatgcagcttctacagaagatctcgaatacctgatgcatgcaaaacagcagctagtaaccacagctaaacgttgggattcttcctctaagactattatagattttgaacctaatgaaactactgatttggagaagagccttcttatcagataccaaattcccctctctgaaaaaaaaaaaaaaaaaaaaaaaaaaaaaaaaaaaaaaaaaaaaaagaaa

SEQ ID NO: 13409 - DNA, 2561 bp, Homo sapiens
  source 1..2561: mol_type = unassigned DNA
atgccagcggaacggcccgcgggcagcggcggctcggaggctccagcaatggttgaacaactggacactgctgtgattaccccggccatgctagaagaggaagaacagcttgaagctgctggactagagagagagcggaagatgctggaaaaggctcgcatgtcttgggatagagagtcgacagaaattcggtaccgtagacttcaacatttgcttgaaaaaagcaatatatactccaaatttttattgacgaaaatggaacagcaacaattagagactgttatgaagatttaaaaacttgtgcaaattgagagaatacagaacagaagaagaaagaaaaattggagagaaaaaaggagtctttaaaagttaaaaagggtaaaaattcaattgatgcaagtgaagagaagccagttatgaggaaaaaaagaggaagagaagatgaatcatacaatatttcagaggtcatgtcaaaagaggaaattttgtctgtggctaaaaaaaataaaaaggagaatgaggatgaaaactcctcctctactaatctctgtgtggaagatcttcagaaaaataaagattcgaatagtataattaaagatagattgtctgaaacggttaggcagaatactaaattcttttttgacccagtccggaagtgtaatggtcagccagtaccttttcaacaaccaaagcacttcactggaggagtgatgcgatggtaccaagtagaaggcatggaatggcttaggatgctttgggaaaatggaattaatggcattttagcagatgaaatgggattgggtaagacagttcagtgcattgctactattgcattgatgattcagagaggagtaccaggaccttttcttgtctgtggccctttgtctacacttcctaactggatggctgaattcaaaagatttacaccagatatccctacaatgttatatcatggaacccaggaggaacgtcaaaaattggtaagaaatatttacaaacggaaagggactttgcagattcatcctgtggtaatcacgtcatttgaaatagccatgagagaccgaaatgcgttacagcattgctattggaaatacttaatagtagatgaaggacacaggattaagaatatgaagtgccgtctaatcagggagttaaaacgattcaatgctgataacaaacttcttttgactggtactcccttgcaaaacaatttatcagaactttggtcattgctaaactttttgttgccagatgtatttgatgacttgaaaagctttgagtcttggtttgacatcactagtctttctgaaactgctgaagatattattgctaaagaaagagaacagaatgtattgcatatgctgcaccagattttaacacctttcttattgagaagactgaagtctgatgttgctcttgaagttcctcctaaacgagaagtagtcgtttatgctccactttcaaagaagcaggagatcttttatacagccattgtgaaccgtacaattgcaaacatgtttggatccagtgagaaagaaacaattgagttaagtcctactggtcgaccaaaacgacgaactagaaaatcaataaattacagcaaaatagatgatttccctaatgaattggaaaaactgatcagtcaaatacagccagaggtggaccgagaaagagctgttgtggaagtgaatatccctgtagaatctgaagttaatctgaagctgcagaatataatgatgctacttcgtaaatgttgtaatcatccatatttgattgaatatcctatagaccctgttacacaagaatttaagatcgatgaagaattggtaacaaattctgggaagttcttgattttggatcgaatgctgccagaactaaaaaaaagaggtcacaaggtgctgcttttttcacaaatgacaagcatgttggacattttgatggattactgccatctcagagatttcaacttcagcaggcttgatgggtccatgtcttactcagagagagaaaaaaacatgcacagcttcaacacggatccagaggtgtttatcttcttagtgagtacacgagctggtggcctgggcattaatctgactgcagcagatacagttatcatttatgatagtgattggaacccccagtcggatcttcaggcccaggatagatgtcatagaattggtcagacaaagccagttgttgtttatcgccttgttacagcaaatactatcgatcagaaaattgtggaaagagcagctgctaaaaggaaactggaaaagttgatcatccataaaaatcatttcaaaggtggtcagtctggattaaatctgtctaagaatttcttagatcctaaggaattaatggaattattaaaatctagagattatgaaagggaaataaaaggatcaagagagaaggtcattagtgataaagatctagagttgttgttagatcgaagtgatcttattgatcaaatgaatgcttcaggaccaattaaagagaagatggggatattcaagatattagaaaattctgaagattccagtcctgaatgtttgttttaa

SEQ ID NO: 13410 - DNA, 3099 bp, Homo sapiens
  source 1..3099: mol_type = unassigned DNA
ggggatttggctagaaggctgggccggcagcggttgtgaggagttagctcgcggcattgcaggctctgagaggaggggacccggttcccgggtgagtgtccaggcatgccagcggaacggcccgcgggcagcggcggctcggaggctccagcaatggttgaacaactggacactgctgtgattaccccggccatgctagaagaggaagaacagcttgaagctgctggactagagagagagcggaagatgctggaaaaggctcgcatgtcttgggatagagagtcgacagaaattcggtaccgtagacttcaacatttgcttgaaaaaagcaatatatactccaaatttttattgacgaaaatggaacagcaacaattagaggaacagaagaagaaagaaaaattggagagaaaaaaggagtctttaaaagttaaaaagggtaaaaattcaattgatgcaagtgaagagaagccagttatgaggaaaaaaagaggaagagaagatgaatcatacaatatttcagaggtcatgtcaaaagaggaaattttgtctgtggctaaaaaaaataaaaaggagaatgaggatgaaaactcctcctctactaatctctgtgtggaagatcttcagaaaaataaagattcgaatagtataattaaagatagattgtctgaaacggttaggcagaatactaaattcttttttgacccagtccggaagtgtaatggtcagccagtaccttttcaacaaccaaagcacttcactggaggagtgatgcgatggtaccaagtagaaggcatggaatggcttaggatgctttgggaaaatggaattaatggcattttagcagatgaaatgggattgggtaagacagttcagtgcattgctactattgcattgatgattcagagaggagtaccaggaccttttcttgtctgtggccctttgtctacacttcctaactggatggctgaattcaaaagatttacaccagatatccctacaatgttatatcatggaacccaggaggaacgtcaaaaattggtaagaaatatttacaaacggaaagggactttgcagattcatcctgtggtaatcacgtcatttgaaatagccatgagagaccgaaatgcgttacagcattgctattggaaatacttaatagtagatgaaggacacaggattaagaatatgaagtgccgtctaatcagggagttaaaacgattcaatgctgataacaaacttcttttgactggtactcccttgcaaaacaatttatcagaactttggtcattgctaaactttttgttgccagatgtatttgatgacttgaaaagctttgagtcttggtttgacatcactagtctttctgaaactgctgaagatattattgctaaagaaagagaacagaatgtattgcatatgctgcaccagattttaacacctttcttattgagaagactgaagtctgatgttgctcttgaagttcctcctaaacgagaagtagtcgtttatgctccactttcaaagaagcaggagatcttttatacagccattgtgaaccgtacaattgcaaacatgtttggatccagtgagaaagaaacaattgagttaagtcctactggtcgaccaaaacgacgaactagaaaatcaataaattacagcaaaatagatgatttccctaatgaattggaaaaactgatcagtcaaatacagccagaggtggaccgagaaagagctgttgtggaagtgaatatccctgtagaatctgaagttaatctgaagctgcagaatataatgatgctacttcgtaaatgttgtaatcatccatatttgattgaatatcctatagaccctgttacacaagaatttaagatcgatgaagaattggtaacaaattctgggaagttcttgattttggatcgaatgctgccagaactaaaaaaaagaggtcacaaggtgctgcttttttcacaaatgacaagcatgttggacattttgatggattactgccatctcagagatttcaacttcagcaggcttgatgggtccatgtcttactcagagagagaaaaaaacatgcacagcttcaacacggatccagaggtgtttatcttcttagtgagtacacgagctggtggcctgggcattaatctgactgcagcagatacagttatcatttatgatagtgattggaacccccagtcggatcttcaggcccaggatagatgtcatagaattggtcagacaaagccagttgttgtttatcgccttgttacagcaaatactatcgatcagaaaattgtggaaagagcagctgctaaaaggaaactggaaaagttgatcatccataaaaatcatttcaaaggtggtcagtctggattaaatctgtctaagaatttcttagatcctaaggaattaatggaattattaaaatctagagattatgaaagggaaataaaaggatcaagagagaaggtcattagtgataaagatctagagttgttgttagatcgaagtgatcttattgatcaaatgaatgcttcaggaccaattaaagagaagatggggatattcaagatattagaaaattctgaagattccagtcctgaatgtttgttttaaagtggagctcaagaatagcttttaaaagttcttatttacatctagtgatttccctgtattgggtttgaaatactgattgtccacttcaccttttttattatatcagttgacatgtaactagtaccatgcgtacttaaatagatggtaattttctgagccttaccaagaacaaagaagtatccatattaagtttagattttcagttaatttttgagactgagtagtattcttggatacaggctgatgtgtacttaaccacttccagatttatacagtcttcctgtggaagtttagtaaatgtctttttccctcctttcttctagtaatgcagttcatgggctttaggtacttcagttatgaagtaggcttttcatggggagagattgggattatgctctctgttgtttaagaaactgtttgattttagagtctatttctatgagatagtttaccaaataaatgttccttataagatga

SEQ ID NO: 13411 - DNA, 2655 bp, Homo sapiens
  source 1..2655: mol_type = unassigned DNA
atgccagcggaacggcccgcgggcagcggcggctcggaggctccagcaatggttgaacaactggacactgctgtgattaccccggccatgctagaagaggaagaacagcttgaagctgctggactagagagagagcggaagatgctggaaaaggctcgcatgtcttgggatagagagtcgacagaaattcggtaccgtagacttcaacatttgcttgaaaaaagcaatatatactccaaatttttattgacgaaaatggaacagcaacaattagaggaacagaagaagaaagaaaaattggagagaaaaaaggagtctttaaaagttaaaaagggtaaaaattcaattgatgcaagtgaagagaagccagttatgaggaaaaaaagaggaagagaagatgaatcatacaatatttcagaggtcatgtcaaaagaggaaattttgtctgtggctaaaaaaaataaaaaggagaatgaggatgaaaactcctcctctactaatctctgtgtggaagatcttcagaaaaataaagattcgaatagtataattaaagatagattgtctgaaacggttaggcagaatactaaattcttttttgacccagtccggaagtgtaatggtcagccagtaccttttcaacaaccaaagcacttcactggaggagtgatgcgatggtaccaagtagaaggcatggaatggcttaggatgctttgggaaaatggaattaatggcattttagcagatgaaatgggattgggtaagacagttcagtgcattgctactattgcattgatgattcagagaggagtaccaggaccttttcttgtctgtggccctttgtctacacttcctaactggatggctgaattcaaaagatttacaccagatatccctacaatgttatatcatggaacccaggaggaacgtcaaaaattggtaagaaatatttacaaacggaaagggactttgcagattcatcctgtggtaatcacgtcatttgaaatagccatgagagaccgaaatgcgttacagcattgctattggaaatacttaatagtagatgaaggacacaggattaagaatatgaagtgccgtctaatcagggagttaaaacgattcaatgctgataacaaacttcttttgactggtactcccttgcaaaacaatttatcagaactttggtcattgctaaactttttgttgccagatgtatttgatgacttgaaaagctttgagtcttggtttgacatcactagtctttctgaaactgctgaagatattattgctaaagaaagagaacagaatgtattgcatatgctgcaccaggaaagaattcctagaatgtatgtgtcagagtttacagatgagggcttctttgaaggcaaattgccctccagaaaagatttatatgatatacgtccatatgaaaatacttatttactcaagcttcataccaattttgagattttaacacctttcttattgagaagactgaagtctgatgttgctcttgaagttcctcctaaacgagaagtagtcgtttatgctccactttcaaagaagcaggagatcttttatacagccattgtgaaccgtacaattgcaaacatgtttggatccagtgagaaagaaacaattgagttaagtcctactggtcgaccaaaacgacgaactagaaaatcaataaattacagcaaaatagatgatttccctaatgaattggaaaaactgatcagtcaaatacagccagaggtggaccgagaaagagctgttgtggaagtgaatatccctgtagaatctgaagttaatctgaagctgcagaatataatgatgctacttcgtaaatgttgtaatcatccatatttgattgaatatcctatagaccctgttacacaagaatttaagatcgatgaagaattggtaacaaattctgggaagttcttgattttggatcgaatgctgccagaactaaaaaaaagaggtcacaaggtgctgcttttttcacaaatgacaagcatgttggacattttgatggattactgccatctcagagatttcaacttcagcaggcttgatgggtccatgtcttactcagagagagaaaaaaacatgcacagcttcaacacggatccagaggtgtttatcttcttagtgagtacacgagctggtggcctgggcattaatctgactgcagcagatacagttatcatttatgatagtgattggaacccccagtcggatcttcaggcccaggatagatgtcatagaattggtcagacaaagccagttgttgtttatcgccttgttacagcaaatactatcgatcagaaaattgtggaaagagcagctgctaaaaggaaactggaaaagttgatcatccataaaaatcatttcaaaggtggtcagtctggattaaatctgtctaagaatttcttagatcctaaggaattaatggaattattaaaatctagagattatgaaagggaaataaaaggatcaagagagaaggtcattagtgataaagatctagagttgttgttagatcgaagtgatcttattgatcaaatgaatgcttcaggaccaattaaagagaagatggggatattcaagatattagaaaattctgaagattccagtcctgaatgtttgttttaa

SEQ ID NO: 13412 - DNA, 3033 bp, Homo sapiens
  source 1..3033: mol_type = unassigned DNA
ggggatttggctagaaggctgggccggcagcggttgtgaggagttagctcgcggcattgcaggctctgagaggaggggacccggttcccgggtgagtgtccaggcatgccagcggaacggcccgcgggcagcggcggctcggaggctccagcaatggttgaacaactggacactgctgtgattaccccggccatgctagaagaggaagaacagcttgaagctgctggactagagagagagcggaagatgctggaaaaggctcgcatgtcttgggatagagagtcgacagaaattcggtaccgtagacttcaacatttgcttgaaaaaagcaatatatactccaaatttttattgacgaaaatggaacagcaacaattagaggaacagaagaagaaagaaaaattggagagaaaaaaggagtctttaaaagttaaaaagggtaaaaattcaattgatgcaagtgaagagaagccaggaaattttgtctgtggctaaaaaaaataaaaaggagaatgaggatgaaaactcctcctctactaatctctgtgtggaagatcttcagaaaaataaagattcgaatagtataattaaagatagattgtctgaaacggttaggcagaatactaaattcttttttgacccagtccggaagtgtaatggtcagccagtaccttttcaacaaccaaagcacttcactggaggagtgatgcgatggtaccaagtagaaggcatggaatggcttaggatgctttgggaaaatggaattaatggcattttagcagatgaaatgggattgggtaagacagttcagtgcattgctactattgcattgatgattcagagaggagtaccaggaccttttcttgtctgtggccctttgtctacacttcctaactggatggctgaattcaaaagatttacaccagatatccctacaatgttatatcatggaacccaggaggaacgtcaaaaattggtaagaaatatttacaaacggaaagggactttgcagattcatcctgtggtaatcacgtcatttgaaatagccatgagagaccgaaatgcgttacagcattgctattggaaatacttaatagtagatgaaggacacaggattaagaatatgaagtgccgtctaatcagggagttaaaacgattcaatgctgataacaaacttcttttgactggtactcccttgcaaaacaatttatcagaactttggtcattgctaaactttttgttgccagatgtatttgatgacttgaaaagctttgagtcttggtttgacatcactagtctttctgaaactgctgaagatattattgctaaagaaagagaacagaatgtattgcatatgctgcaccagattttaacacctttcttattgagaagactgaagtctgatgttgctcttgaagttcctcctaaacgagaagtagtcgtttatgctccactttcaaagaagcaggagatcttttatacagccattgtgaaccgtacaattgcaaacatgtttggatccagtgagaaagaaacaattgagttaagtcctactggtcgaccaaaacgacgaactagaaaatcaataaattacagcaaaatagatgatttccctaatgaattggaaaaactgatcagtcaaatacagccagaggtggaccgagaaagagctgttgtggaagtgaatatccctgtagaatctgaagttaatctgaagctgcagaatataatgatgctacttcgtaaatgttgtaatcatccatatttgattgaatatcctatagaccctgttacacaagaatttaagatcgatgaagaattggtaacaaattctgggaagttcttgattttggatcgaatgctgccagaactaaaaaaaagaggtcacaaggtgctgcttttttcacaaatgacaagcatgttggacattttgatggattactgccatctcagagatttcaacttcagcaggcttgatgggtccatgtcttactcagagagagaaaaaaacatgcacagcttcaacacggatccagaggtgtttatcttcttagtgagtacacgagctggtggcctgggcattaatctgactgcagcagatacagttatcatttatgatagtgattggaacccccagtcggatcttcaggcccaggatagatgtcatagaattggtcagacaaagccagttgttgtttatcgccttgttacagcaaatactatcgatcagaaaattgtggaaagagcagctgctaaaaggaaactggaaaagttgatcatccataaaaatcatttcaaaggtggtcagtctggattaaatctgtctaagaatttcttagatcctaaggaattaatggaattattaaaatctagagattatgaaagggaaataaaaggatcaagagagaaggtcattagtgataaagatctagagttgttgttagatcgaagtgatcttattgatcaaatgaatgcttcaggaccaattaaagagaagatggggatattcaagatattagaaaattctgaagattccagtcctgaatgtttgttttaaagtggagctcaagaatagcttttaaaagttcttatttacatctagtgatttccctgtattgggtttgaaatactgattgtccacttcaccttttttattatatcagttgacatgtaactagtaccatgcgtacttaaatagatggtaattttctgagccttaccaagaacaaagaagtatccatattaagtttagattttcagttaatttttgagactgagtagtattcttggatacaggctgatgtgtacttaaccacttccagatttatacagtcttcctgtggaagtttagtaaatgtctttttccctcctttcttctagtaatgcagttcatgggctttaggtacttcagttatgaagtaggcttttcatggggagagattgggattatgctctctgttgtttaagaaactgtttgattttagagtctatttctatgagatagtttaccaaataaatgttccttataagatg

SEQ ID NO: 13413 - DNA, 1053 bp, Homo sapiens
  source 1..1053: mol_type = unassigned DNA
ggggatttggctagaaggctgggccggcagcggttgtgaggagttagctcgcggcattgcaggctctgagaggaggggacccggttcccgggtgagtgtccaggcatgccagcggaacggcccgcgggcagcggcggctcggaggctccagcaatggttgaacaactggacactgctgtgattaccccggccatgctagaagaggaagaacagcttgaagctgctggactagagagagagcggaagatgctggaaaaggctcgcatgtcttgggatagagagtcgacagaaattcggtaccgtagacttcaacatttgcttgaaaaaagcaatatatactccaaatttttattgacgaaaatggaacagcaacaattagaggaacagaagaagaaagaaaaattggagagaaaaaaggagtctttaaaagttaaaaagggtaaaaattcaattgatgcaagtgaagagaagccagttatgaggaaaaaaagaggaagagaagatgaatcatacaatatttcagaggtcatgtcaaaagaggaaattttgtctgtggctaaaaaaaataaaaaggagaatgaggatgaaaactcctcctctactaatctctgtgtggaagatcttcagaaaaataaagattcgaatagtataattaaagatagattgtctgaaacggttaggcagaatactaaattcttttttgacccagtccggaagtgtaatggtcagccagtaccttttcaacaaccaaagcacttcactggaggagtgatgcgatggtaccaagtagaaggcatggaatggcttaggatgctttgggaaaatggaattaatggcattttagcagatgaaatgggattgggtaagacagttcagtgcattgctactattgcattgatgattcagagaggagtaccaggaccttttcttgtctgtggccctttgtctacacttcctaactggatggctgaattcaaaagatttacaccagatatccctacaatgttatatcatggaacccaggaggaacgtcaaaaattgatatatttgtga

SEQ ID NO: 13414 - DNA, 2804 bp, Homo sapiens
  source 1..2804: mol_type = unassigned DNA
ggggatttggctagaaggctgggccggcagcggttgtgaggagttagctcgcggcattgcaggctctgagaggaggggacccggttcccgggtgagtgtccaggcatgccagcggaacggcccgcgggcagcggcggctcggaggctccagcaatggttgaacaactggacactgctgtgattaccccggccatgctagaagaggaagaacagcttgaagctgctggactagagagagagcggaagatgctggaaaaggctcgcatgtcttgggatagagagtcgacagaaattcggtaccgtagacttcaacatttgcttgaaaaaagcaatatatactccaaatttttattgacgaaaatggaacagcaacaattagaggaacagaagaagaaagaaaaattggagagaaaaaaggagtctttaaaagttaaaaagggtaaaaattcaattgatgcaagtgaagagaagccagttatgaggaaaaaaagaggaagagaagatgaatcatacaatatttcagaggtcatgtcaaaagaggaaattttgtctgtggctaaaaaaaataaaaaggagaatgaggatgaaaactcctcctctactaatctctgtgtggaagatcttcagaaaaataaagattcgaatagtataattaaagatagattgtctgaaacggttaggcagaatactaaattcttttttgacccagtccggaagtgtaatggtcagccagtaccttttcaacaaccaaagcacttcactggaggagtgatgcgatggtaccaagtagaaggcatggaatggcttaggatgctttgggaaaatggaattaatggcattttagcagatgaaatgggattgggtaagacagttcagtgcattgctactattgcattgatgattcagagaggagtaccaggaccttttcttgtctgtggccctttgtctacacttcctaactggatggctgaattcaaaagatttacaccagatatccctacaatgttatatcatggaacccaggaggaacgtcaaaaattggtaagaaatatttacaaacggaaagggactttgcagattcatcctgtggtaatcacgtcatttgaaatagccatgagagaccgaaatgcgttacagattttaacacctttcttattgagaagactgaagtctgatgttgctcttgaagttcctcctaaacgagaagtagtcgtttatgctccactttcaaagaagcaggagatcttttatacagccattgtgaaccgtacaattgcaaacatgtttggatccagtgagaaagaaacaattgagttaagtcctactggtcgaccaaaacgacgaactagaaaatcaataaattacagcaaaatagatgatttccctaatgaattggaaaaactgatcagtcaaatacagccagaggtggaccgagaaagagctgttgtggaagtgaatatccctgtagaatctgaagttaatctgaagctgcagaatataatgatgctacttcgtaaatgttgtaatcatccatatttgattgaatatcctatagaccctgttacacaagaatttaagatcgatgaagaattggtaacaaattctgggaagttcttgattttggatcgaatgctgccagaactaaaaaaaagaggtcacaaggtgctgcttttttcacaaatgacaagcatgttggacattttgatggattactgccatctcagagatttcaacttcagcaggcttgatgggtccatgtcttactcagagagagaaaaaaacatgcacagcttcaacacggatccagaggtgtttatcttcttagtgagtacacgagctggtggcctgggcattaatctgactgcagcagatacagttatcatttatgatagtgattggaacccccagtcggatcttcaggcccaggatagatgtcatagaattggtcagacaaagccagttgttgtttatcgccttgttacagcaaatactatcgatcagaaaattgtggaaagagcagctgctaaaaggaaactggaaaagttgatcatccataaaaatcatttcaaaggtggtcagtctggattaaatctgtctaagaatttcttagatcctaaggaattaatggaattattaaaatctagagattatgaaagggaaataaaaggatcaagagagaaggtcattagtgataaagatctagagttgttgttagatcgaagtgatcttattgatcaaatgaatgcttcaggaccaattaaagagaagatggggatattcaagatattagaaaattctgaagattccagtcctgaatgtttgttttaaagtggagctcaagaatagcttttaaaagttcttatttacatctagtgatttccctgtattgggtttgaaatactgattgtccacttcaccttttttattatatcagttgacatgtaactagtaccatgcgtacttaaatagatggtaattttctgagccttaccaagaacaaagaagtatccatattaagtttagattttcagttaatttttgagactgagtagtattcttggatacaggctgatgtgtacttaaccacttccagatttatacagtcttcctgtggaagtttagtaaatgtctttttccctcctttcttctagtaatgcagttcatgggctttaggtacttcagttatgaagtaggcttttcatggggagagattgggattatgctctctgttgtttaagaaactgtttgattttagagtctatttctatgagatagtttaccaaataaatgttccttataagatg

SEQ ID NO: 13415 - DNA, 711 bp, Homo sapiens
  source 1..711: mol_type = unassigned DNA
aggagaagcgcgcttttttccctggcgggggatttggctagaaggctgggccggcagcggttgtgaggagttagctcgcggcattgcaggctctgagaggaggggacccggttcccgggctcggaggctccagcaatggttgaacaactggacactgctgtgattaccccggccatgctagaagaggaagaacagcttgaagctgctggactagagagagagcggaagatgctggaaaaggctcgcatgtcttgggatagagagtcgacagaaattcggtaccgtagacttcaacatttgcttgaaaaaagcaatatatactccaaatttttattgacgaaaatggaacagcaacaattagaggaacagaagaagaaagaaaaattggagagaaaaaaggagtctttaaaagttaaaaagggtaaaaattcaattgatgcaagtgaagagaagccagttatgaggaaaaaaagaggaagagaagatgaatcatacaatatttcagaggtcatgtcaaaagaggaaattttgtctgtggctaaaaaaaataaaaaggagaatgaggatgaaaactcctcctctactaatctctgtgtggaagatcttcagaaaaataaagattcgaatagtataattaaagatagattgtctgaaacggttaggcagaatactaaattcttttttgacccagtccggaagtgtaatggtcag

SEQ ID NO: 13416 - DNA, 2000 bp, Homo sapiens
  source 1..2000: mol_type = unassigned DNA
agtttctcactccgaagtggcagcagccagagagggagtcggtgtggacgcgaggagccgggcgcttagaacagaggcttgcacaggtggagatgtggaagtctgtagtgggccatgatgtgtctgtttccgtggagacccagggtgatgattgggacacagatcctgactttgtgaatgacatctctgaaaaggagcaacgatggggagccaagaccatcgaggggtctggacgcacagaacacatcaacatccaccagctgaggaacaaagtatcagaggagcatgatgttctcaggaagaaagagatggagtcagggcccaaagcatcccatggctatggaggtcggtttggagtagaaagagaccgaatggacaagagtgcagtgggccatgagtatgttgccgaggtggagaagcactcttctcagacggatgctgccaaaggctttgggggcaagtacggagttgagagggacagggcagacaagtcagcagtcggctttgattataaaggagaagtggagaagcacacatctcagaaagattactctcgtggctttggtggccggtacggggtggagaaggataaatgggacaaagcagctctgggatatgactacaagggagagacggagaaacacgagtcccagagagattatgccaagggctttggtggccagtatggaatccagaaggaccgagtggataagagcgctgtcggcttcaatgaaatggaggccccgaccacagcttataagaagacgacgcccatagaagccgcttctagtggtacccgtgggctgaaggcgaaatttgagtccatggctgaggagaagaggaagcgagaggaagaggagaaggcacagcaggtggccaggaggcaacaggagcgaaaggctgtgacaaagaggagccctgaggctccacagccagtgatagctatggaagagccagcagtaccggccccactgcccaagaaaatctcctcagaggcctggcctccagttgggactcctccatcatcagagtctgagcctgtgagaaccagcagggaacacccagtgcccttgctgcccattaggcagactctcccggaggacaatgaggagcccccagctctgccccctaggactctggaaggcctccaggtggaggaagagccagtgtacgaagcagagcctgagcctgagcccgagcctgagcccgagcctgagaatgactatgaggacgttgaggagatggacaggcatgagcaggaggatgaaccagagggggactatgaggaggtgctcgagcctgaagattcttctttttcttctgctctggctggatcatcaggctgcccggctggggctggggctggggctgtggctctggggatctcagctgtggctgtatatgattaccaaggagagggaagtgatgagctttcctttgatccggacgacgtaatcactgacattgagatggtggacgagggctggtggcggggacgttgccatggccactttggactcttccctgcaaattatgtcaagcttctggagtgactagagctcactgtctactgcaactgtgatttcccatgtccaaagtggctctgcctccaccccctccctattcctgctgcaaatgtctaaccagatgaggttctggacagacttccctctcctgcttcattaagggcttggggcagagacagcatggggaaggaggtccccttccccaagagtcctctctatcctggatgagctcatgaacatttctcttgtgttcctgactccttcccaatgaacacctctctgccaccccaagctctgctctcctcctctgtgagctctgggcttcccagtttgtttacccgggaaagtacgtctagattgtgtggtttgcctcattgtgctatttgcccactttccttccctgaagaaatatctgaaccttctttctgttcagtcctaaaattcgaaataaagtgagactatggttcacctgta

SEQ ID NO: 13417 - DNA, 1636 bp, Homo sapiens
  source 1..1636: mol_type = unassigned DNA
acttactcgtcatataaacccaaggcacagtcacatacccagggatacaagacactgcagactcccgagagacataacacagaattgcaccatgccaaactacaaactcacttattttaatatgagggggagagcagaaattattcgttacatatttgcttatttggacatacagtatgaagaccacagaatagaacaagctgactggcctgaaatcaaatcaactctcccatttggaaaaatccccattttggaagttgatggacttactcttcaccagagcctagcaatagcaagatatttgaccaaaaacacagatttggctggaaacacagaaatggaacaatgtcatgttgatgctattgtggacactctggatgatttcatgtcatgttttccttgggcagagaaaaagcaagatgtgaaagagcagatgttcaatgagctgctcacgtataatgcgcctcatcttatgcaagacttggacacatatttaggggggagagaatggcttattggtaactctgtaacttgggcagacttctactgggagatttgcagtaccacacttttggtctttaagcctgacctgttagacaaccatccaaggctggtgactttacggaagaaagtccaagccattcctgccgtcgctaactggataaaacgaaggccccaaaccaaactctagctgatccatgttgccttcaagtttgtttttctcgggggcatctctctcatcagataagacagctacatcagcctgccagataatccacatgctccctccccagctccactaagattttcactttagccatattctgatttttaaaaaggaaaataaaaacaaatctttcttcagtatctttttctttcagaatagcttctcatcatttacaattacagaaaaatagtatgtaatacaggcagaccttgctttgcacaggttctaacatgcacgaattgcagtcataatggtttagcaacaccattcttcccctcccccaaaatgttttggacttcagctaccacaattacctgtaattgcataaaacacaaactttgctagtagctctccagttcacatatcgctgtgtaaataacctatgtacatcatgaccaatgaccagtcacttctatcaaagactgccagaggtcactgcacatctgttattcctgcatagatagcaaagtgtgtagttgtattgctattgcctgcttgtggcccagtgataaatccctttgacattttacaaaaatgaatcaaaagagggaactccccaacaaagatgaaagtgcagcaaaggaacaaaaactgataatcctggaatgaaattcaaactgaatataaagagttatcgagaaaagagctgactgtgggaatctgacacggctcaaaaggctctagatatgcagccagagaaacttgtaaagatgaatttactgacatgaataaagttgttgtgatgagaaaaatgtagataccccagagatcaagagaaggagaagacaagccacagacttggagaaaatacttgtaaaacatgtatctgacaaaagactattattcaaaattatatagaactcataaaactcggctgactctcttttcggactcagcccacctgcaccc

SEQ ID NO: 13418 - DNA, 3490 bp, Homo sapiens
  source 1..3490: mol_type = unassigned DNA
caatgttcgttatccttccagagatagtttatatcatggagtaatataaaaatttatgatttatatgtactgtataatagagcaattatattcttacctacccccaacatgctttaactcgaatgatagtgtagtacacttctgagtttgtctgggcttgtagctcttgtctgtcattagattctgaaagatacctattaacaataccctaaaaagatcaggagcctttaggccaagtctcaaacgtttcagatgagaaaaactcagggatggtgacttgacggaagttgcattaactaacaacgctcacatgctattctccggacttggaatgtccaagcaccctgggcttgctgacacccactcacttttcaaacatcaattcttgggaagcttttcccttccttaatgtcccccagataggtgatgtccccttgttacaggttttagaccattatgtacatctccttcctagcacatacatatattaaaatttgtttcctgtctccatgaggagagggactacatctgtccttttcactgctggcacacagtagttgctcaacaaaaatgtgcgaagtgaaactcgaacaggcggtcaggctcacagtccacgcctcttcctactgtggtcccgctgtgtttggacaaatagttccaaattataaactttaaaacctgagaagtctcaatagaaaaagcagggaagtctttccatttccatgattaatggaggaccttagcagaaacggctcaccgcgaggtgtgacgaccgcaggagggcgtcaatcaagaaaatgcccccttgccccggaggcgagtggagccgcacagagccgaggccatacgggccagcagtacggactgcttcaatagaaaacacgtgcaaaaccagagagccagactgcgcacagctgcgaccctcaagagccagcagaaaagacacggagcggcccccactggattgaagactgcacagcctctgcccggcgctgtaggacccgggcctccccttgattgctgctcgcagcggcttctgccagcatcctcgcggaagtggcttgagtccgaggcctccaaatgaaaccaggtggagcggccaagagtccgcagcacctgaactccagccatccgaatcccgccgggccgcagctaagggccgccgagcagccctaggaacccagggcactgtcccgctctgagctcgggaaacggccggtgtgacagccagcgccactgttaatccagggagcgcacccaccgaggaggcgtcttaggccagcggcctctgctcccgccgagtcccgctgctccccgcctggaaacagctgctgccaccccgggcccaggcctggacggcgcccccgaatttcggcagaggtgcctcggggccgcggacagggccgctggagcccgcactccagaaggcggtcttcctcgcgcctcccccgacggacgcggcccagggcttccctcgagggcgtcctcggccggggtgcctggagtccccaggggcgacagccgcggcggggcaccagggcgccagttccccggagcctggtagcaagcgcgtcccgggggcggggagcttggccggcggggcgggccggggtgggggcgggcggctgctcttggggccccgcgccattggccgcagggcccggcggcaggaaggggccagcgagcgcggccccaccccgcggccggcggagcctatcgccgggagcgcggagcgcggataaatgtagcgccgcggcgcgggccagcagctctgcgaggggccggagcgcggcggagccatgcagtacccgcaccccgggccggcggcgggcgccgtgggggtgccgctgtacgcgcccacgccgctgctgcaacccgcacacccgacgcccttttacatcgaggacatcctgggccgcgggcccgccgcgcccacgcccgcccccacgctgccgtcccccaactcctccttcaccagcctcgtgtccccctaccggaccccggtgtacgagcccacgccgatccatccagccttctcgcaccactccgccgccgcgctggccgctgcctacggacccggcggcttcgggggccctctgtaccccttcccgcggacggtgaacgactacacgcacgccctgctccgccacgaccccctgggcaaacctctactctggagccccttcttgcagaggcctctgcataaaaggaaaggcggccaggtgagattctccaacgaccagaccatcgagctggagaagaaattcgagacgcagaaatatctctctccgcccgagaggaagcgtctggccaagatgctgcagctcagcgagagacaggtcaaaacctggtttcagaatcgacgcgctaaatggaggagactaaaacaggagaaccctcaaagcaataaaaaagaagaactggaaagtttggacagttcctgtgatcagaggcaagatttgcccagtgaacagaataaaggtgcttctttggatagctctcaatgttcgccctcccctgcctcccaggaagaccttgaatcagagatttcagaggattctgatcaggaagtggacattgagggcgataaaagctattttaatgctggatgatgaccactggcattggcatgttcagaaaactggatttaggaataatgttttgctacagaaaatcttcatagaagaactggaaggctatataagaaagggaatcaattctctggtattctggaaacctaaaaatatttggtgcactgctcaattaacaaacctacatggagaccttaattttgacttaacaaatagtttatgtactgctcttaggttgttttgataaagtgacattatagtgattaaattcttccccctttaaaaaaacagttagtggttttcactatttataaaaaattaattttgaactttttgttaaatttttaagttatagctttaaaggttttaataggaccttcttgaacgacttttctgtaatctgtttatctcccacttaatggaaaggcaaaggggtaccccaaatccagaggtgcctacatttcaggcagccttggagtattttaaaaggaaaacattctttacttttatatgacattcttatactgctgtctcaaatccaaaaacatttcagagctcttgtctcagagatgtgtgttctttttgtcagagatatggttgatgagaatcttaaatgcttgttttgcactatcacttagtacctgtttgaccaaggtgttaaggggatagtacctcccaattcaagcagagaaactgacctgactaaagttaatcgcagatgaactagaagtcacaggttaattaaatgtaagtagattgtagatactgttttatatcaaacaatgtttataatgtgtatatagaattgttcactgtaaaaaaaatggccaaaatgtgttttttttttaataagtaacttgactataaaataaagccgtccgtgggacgactgacctcgt

SEQ ID NO: 13419 - DNA, 1173 bp, Homo sapiens
  source 1..1173: mol_type = unassigned DNA
ctcgccgcctcgccgtcccgccgccttgccgccctgccaccctgccgccctgccgccctgccgccctgccgccctgccgccggtggtcgctgcccgtggtgctccgtcgcccccgccacctcacgtcctcccgtgcgtcgggagcgtctcggctacaacatgttgggcatgatcaagaactcgctgttcggaagcgtagagacgtggccttggcaggtcctaagcaaaggggacaaggaagaagttgcctatgaagaaagggcctgtgaaggcggcaaatttgccacagtagaagtgacagataagcctgtggatgaggctctacgggaagcaatgcccaaggtcgcaaagtatgcggggggcaccaatgacaagggaattgggatggggatgacagtccctatttcctttgctgtgttccccaatgaagatggctctctgcagaagaaattaaaagtctggttccggattccaaaccaatttcaaagcgacccaccagctcccagtgacaaaagcgttaagattgaggaacgggaaggcatcactgtctattccatgcagtttggtggttatgccaaggaagcagactacgtagcacaagccacccgtctgcgtgctgccctggagggcacagccacctaccggggggacatctacttctgcacgggttatgaccctcccatgaagccctacggacggcgcaatgagatctggctgttgaagacatgagtgacccactgaaccaagaacttactggaagtgtgcctctgtgtctccttcctcgggggtaaggaggggacagtgcttcccaagttccagctgcaagtccaacttaaccaactttccttcaaagtcagttactgccaattttctgaaaaaagcatgttccatatactaagtctcttttctcacagtaggaaataatacagccaagatatgcagcatccttctcattgatgtagaaaattctgcgatagaccagaaaaatcctggcagcttttctccaggcatctgggtcactaaaaactgattttctaaaattattggatttgtattttgttattaagggggaaaatgtgatttgtgcctgatctttcatctgtgattcttataagagctttgtcttcagaaaaactaaaaataaaaggcattgacttaaacagctgagacaaa

SEQ ID NO: 13420 - DNA, 1692 bp, Homo sapiens
  source 1..1692: mol_type = unassigned DNA
gccggcctcgcgccagtccgctgggctgcagggactgcggcgcctgagggagtcgctgacgggcacgctgactggaggctggcggacaggcgacagcgacctgcggcaggaccagaggagcgagagcagcaagaaccacacccagcagcaatgtcagcggaagtggaaacctcagagggggtagacgagtcagaaaaaaagaactctggggccctagaaaaggagaaccaaatgagaatggctgacctctcggagctcctgaaggaagggaccaaggaagcacacgaccgggcagaaaacacccagtttgtcaaggacttcttgaaaggcaacattaagaaggagctgtttaagctggccaccacggcactttacttcacatactcagccctcgaggaggaaatggagcgcaacaaggaccatccagcctttgcccctttgtacttccccatggagctgcaccggaaggaggcgctgaccaaggacatggagtatttctttggtgaaaactgggaggagcaggtgcagtgccccaaggctgcccagaagtacgtggagcggatccactacatagggcagaacgagccggagctactggtggcccatgcatacacccgctacatgggggatctctcggggggccaggtgctgaagaaggtggcccagcgagcactgaaactccccagcacaggggaagggacccagttctacctgtttgagaatgtggacaatgcccagcagttcaagcagctctaccgggccaggatgaacgccctggacctgaacatgaagaccaaagagaggatcgtggaggaggccaacaaggcttttgagtataacatgcagatattcaatgaactggaccaggccggctccacactggccagagagaccttggaggatgggttccctgtacacgatgggaaaggagacatgcgtaaatgccctttctacgctgctgaacaagacaaaggtgccctggagggcagcagctgtcccttccgaacagctatggctgtgctgaggaagcccagcctccagttcatcctggccgctggtgtggccctagctgctggactcttggcctggtactacatgtgaagcacccatcatgccacaccggtaccctcctcccgactgaccactggcctacccctttctccagccctgactaaactaccacctcaggtgactttttaaaaaatgctgggtttaagaaaggcaaccaataaaagccagatgctagagcctctgcctgacagcatcctctctatgggccatattccgcactgggcacaggccgtcaccctgggagcagtcggcacagtgcagcaagcctggcccccgacccagctctactccaggcttccacacttctgggccctaggctgcttccggtagtccctgtttttgcagtacatgggtgactatctcccctgttggaggtgagtggcctgtaagtccaagctgtgcgagggggccttgctggatgctgctgtacaacttctgggcctctcttggaccctgggagtgagggtgggtgtgggtggaagcctcagaggccttgggagctcatccctctcacccagaatccctctaaccccttgggtgcggtttgctcagccccagcttatctcctcctccgcgctgtgtaaatgctccagcactcaataaagtgggctttgcaagcta

SEQ ID NO: 13421 - DNA, 1644 bp, Homo sapiens
  source 1..1644: mol_type = unassigned DNA
attgtccactaaggtctggcaggtctgattgcctcttttcaggcactgagtggtggggtatgccatcctcccctgctggaaccagccttggcctgccctgttagtcatcaaaaatagatctcaccagggaacaatcttctcaggttgttgtgtaatttgagtgagccaagatggagtctcgctctgttgcccaggctggagtgcagtggatcagtctagctcattgcagcctccacctcctgggttcaagagattctcctgcctcagcctcctgtgtagctgggattacagagtcttactttgtcggccaggctggagtgcagtggcatgatctcgactcactgcaacctctgtctcccaggctcaagaaatcctcctacatcagcctcccaagtagctgggattacaggctggagtgcagtggctccatctcggctcactgcaacctccgcctcccaggttcaagcgattctcctgcctcagcctcctgagtagctgggattacaggaccagaggagcgagagcagcaagaaccacacccagcagcaatgtcagcggaagtggaaacctcagagggggtagacgagtcagaaaaaaagaactctggggccctagaaaaggagaaccaaatgagaatggctgacctctcggagctcctgaaggaagggaccaaggaagcacacgaccgggcagaaaacacccagtttgtcaaggacttcttgaaaggcaacattaagaaggagctgtttaagctggccaccacggcactttacttcacatactcagccctcgaggaggaaatggagcgcaacaaggaccatccagcctttgcccctttgtacttccccatggagctgcaccggaaggaggcgctgaccaaggacatggagtatttctttggtgaaaactgggaggagcaggtgcagtgccccaaggctgcccagaagtacgtggagcggatccactacatagggcagaacgagccggagctactggtggcccatgcatacacccgctacatgggggatctctcggggggccaggtgctgaagaaggtggcccagcgagcactgaaactccccagcacaggggaagggacccagttctacctgtttgagaatgtggacaatgcccagcagttcaagcagctctaccgggccaggatgaacgccctggacctgaacatgaagaccaaagagaggatcgtggaggaggccaacaaggcttttgagtataacatgcagatattcaatgaactggaccaggccggctccacactggccagagagaccttggaggatgggttccctgtacacgatgggaaaggagacatgcgtaaatgccctttctacgctgctgaacaagacaaaggtgccctggagggcagcagctgtcccttccgaacagctatggctgtgctgaggaagcccagcctccagttcatcctggccgctggtgtggccctagctgctggactcttggcctggtactacatgtgaagcacccatcatgccacaccggtaccctcctcccgactgaccactggcctacccctttctccagccctgactaaactaccacctcaggtgactttttaaaaaatgctgggtttaagaaaggcaaccaataaaagccagatgctag

SEQ ID NO: 13422 - DNA, 1712 bp, Homo sapiens
  source 1..1712: mol_type = unassigned DNA
gtgagtttgtgtaaatccagttagaccaaaatgagcgaggtggagagcctcttaaccggatgctacgggtgatgactgggaggaggagaaaaattacctctttatcttgcatgaacatcttaattttcaggaccagaggagcgagagcagcaagaaccacacccagcagcaatgtcagcggaagtggaaacctcagagggggtagacgagtcagaaaaaaagaactctggggccctagaaaaggagaaccaaatgagaatggctgacctctcggagctcctgaaggaagggaccaaggaagcacacgaccgggcagaaaacacccagtttgtcaaggacttcttgaaaggcaacattaagaaggagctgtttaagctggccaccacggcactttacttcacatactcagccctcgaggaggaaatggagcgcaacaaggaccatccagcctttgcccctttgtacttccccatggagctgcaccggaaggaggcgctgaccaaggacatggagtatttctttggtgaaaactgggaggagcaggtgcagtgccccaaggctgcccagaagtacgtggagcggatccactacatagggcagaacgagccggagctactggtggcccatgcatacacccgctacatgggggatctctcggggggccaggtgctgaagaaggtggcccagcgagcactgaaactccccagcacaggggaagggacccagttctacctgtttgagaatgtggacaatgcccagcagttcaagcagctctaccgggccaggatgaacgccctggacctgaacatgaagaccaaagagaggatcgtggaggaggccaacaaggcttttgagtataacatgcagatattcaatgaactggaccaggccggctccacactggccagagagaccttggaggatgggttccctgtacacgatgggaaaggagacatgcgtaaatgccctttctacgctgctgaacaagacaaaggtgccctggagggcagcagctgtcccttccgaacagctatggctgtgctgaggaagcccagcctccagttcatcctggccgctggtgtggccctagctgctggactcttggcctggtactacatgtgaagcacccatcatgccacaccggtaccctcctcccgactgaccactggcctacccctttctccagccctgactaaactaccacctcaggtgactttttaaaaaatgctgggtttaagaaaggcaaccaataaaagccagatgctagagcctctgcctgacagcatcctctctatgggccatattccgcactgggcacaggccgtcaccctgggagcagtcggcacagtgcagcaagcctggcccccgacccagctctactccaggcttccacacttctgggccctaggctgcttccggtagtccctgtttttgcagtacatgggtgactatctcccctgttggaggtgagtggcctgtaagtccaagctgtgcgagggggccttgctggatgctgctgtacaacttctgggcctctcttggaccctgggagtgagggtgggtgtgggtggaagcctcagaggccttgggagctcatccctctcacccagaatccctctaaccccttgggtgcggtttgctcagccccagcttatctcctcctccgcgctgtgtaaatgctccagcactcaataaagtgggctttgcaagct

SEQ ID NO: 13423 - DNA, 1752 bp, Homo sapiens
  source 1..1752: mol_type = unassigned DNA
attgtccactaaggtctggcaggtctgattgcctcttttcaggcactgagtggtggggtatgccatcctcccctgctggaaccagccttggcctgccctgttagtcatcaaaaatagatctcaccagggaacaatcttctcaggttgttgtgtaatttgagtgagccaaggaccagaggagcgagagcagcaagaaccacacccagcagcaatgtcagcggaagtggaaacctcagagggggtagacgagtcagaaaaaaagaactctggggccctagaaaaggagaaccaaatgagaatggctgacctctcggagctcctgaaggaagggaccaaggaagcacacgaccgggcagaaaacacccagtttgtcaaggacttcttgaaaggcaacattaagaaggagctgtttaagctggccaccacggcactttacttcacatactcagccctcgaggaggaaatggagcgcaacaaggaccatccagcctttgcccctttgtacttccccatggagctgcaccggaaggaggcgctgaccaaggacatggagtatttctttggtgaaaactgggaggagcaggtgcagtgccccaaggctgcccagaagtacgtggagcggatccactacatagggcagaacgagccggagctactggtggcccatgcatacacccgctacatgggggatctctcggggggccaggtgctgaagaaggtggcccagcgagcactgaaactccccagcacaggggaagggacccagttctacctgtttgagaatgtggacaatgcccagcagttcaagcagctctaccgggccaggatgaacgccctggacctgaacatgaagaccaaagagaggatcgtggaggaggccaacaaggcttttgagtataacatgcagatattcaatgaactggaccaggccggctccacactggccagagagaccttggaggatgggttccctgtacacgatgggaaaggagacatgcgtaaatgccctttctacgctgctgaacaagacaaaggtgccctggagggcagcagctgtcccttccgaacagctatggctgtgctgaggaagcccagcctccagttcatcctggccgctggtgtggccctagctgctggactcttggcctggtactacatgtgaagcacccatcatgccacaccggtaccctcctcccgactgaccactggcctacccctttctccagccctgactaaactaccacctcaggtgactttttaaaaaatgctgggtttaagaaaggcaaccaataaaagccagatgctagagcctctgcctgacagcatcctctctatgggccatattccgcactgggcacaggccgtcaccctgggagcagtcggcacagtgcagcaagcctggcccccgacccagctctactccaggcttccacacttctgggccctaggctgcttccggtagtccctgtttttgcagtacatgggtgactatctcccctgttggaggtgagtggcctgtaagtccaagctgtgcgagggggccttgctggatgctgctgtacaacttctgggcctctcttggaccctgggagtgagggtgggtgtgggtggaagcctcagaggccttgggagctcatccctctcacccagaatccctctaaccccttgggtgcggtttgctcagccccagcttatctcctcctccgcgctgtgtaaatgctccagcactcaataaagtgggctttgcaagct

SEQ ID NO: 13424 - DNA, 1848 bp, Homo sapiens
  source 1..1848: mol_type = unassigned DNA
catctctaggccccgccccgcgctgcgtgcccacgttgcgccggcctcgcgccagtccgctgggctgcagggactgcggcgcctgagggagtcgctgacgggcacgctgactggaggctggcggacaggcgacagcgacctgcggcagagtcttgctgcgacacccaggctggagtgcaatggcgctatctcggctcactgcaacctccgcttcccggattcaagcgattctcctgcctcagcctcccgagtaggtgggactacaggaccagaggagcgagagcagcaagaaccacacccagcagcaatgtcagcggaagtggaaacctcagagggggtagacgagtcagaaaaaaagaactctggggccctagaaaaggagaaccaaatgagaatggctgacctctcggagctcctgaaggaagggaccaaggaagcacacgaccgggcagaaaacacccagtttgtcaaggacttcttgaaaggcaacattaagaaggagctgtttaagctggccaccacggcactttacttcacatactcagccctcgaggaggaaatggagcgcaacaaggaccatccagcctttgcccctttgtacttccccatggagctgcaccggaaggaggcgctgaccaaggacatggagtatttctttggtgaaaactgggaggagcaggtgcagtgccccaaggctgcccagaagtacgtggagcggatccactacatagggcagaacgagccggagctactggtggcccatgcatacacccgctacatgggggatctctcggggggccaggtgctgaagaaggtggcccagcgagcactgaaactccccagcacaggggaagggacccagttctacctgtttgagaatgtggacaatgcccagcagttcaagcagctctaccgggccaggatgaacgccctggacctgaacatgaagaccaaagagaggatcgtggaggaggccaacaaggcttttgagtataacatgcagatattcaatgaactggaccaggccggctccacactggccagagagaccttggaggatgggttccctgtacacgatgggaaaggagacatgcgtaaatgccctttctacgctgctgaacaagacaaaggtgccctggagggcagcagctgtcccttccgaacagctatggctgtgctgaggaagcccagcctccagttcatcctggccgctggtgtggccctagctgctggactcttggcctggtactacatgtgaagcacccatcatgccacaccggtaccctcctcccgactgaccactggcctacccctttctccagccctgactaaactaccacctcaggtgactttttaaaaaatgctgggtttaagaaaggcaaccaataaaagccagatgctagagcctctgcctgacagcatcctctctatgggccatattccgcactgggcacaggccgtcaccctgggagcagtcggcacagtgcagcaagcctggcccccgacccagctctactccaggcttccacacttctgggccctaggctgcttccggtagtccctgtttttgcagtacatgggtgactatctcccctgttggaggtgagtggcctgtaagtccaagctgtgcgagggggccttgctggatgctgctgtacaacttctgggcctctcttggaccctgggagtgagggtgggtgtgggtggaagcctcagaggccttgggagctcatccctctcacccagaatccctctaaccccttgggtgcggtttgctcagccccagcttatctcctcctccgcgctgtgtaaatgctccagcactcaataaagtgggctttgcaagct

SEQ ID NO: 13425 - DNA, 2147 bp, Homo sapiens
  source 1..2147: mol_type = unassigned DNA
caaaactcggtctcaaaaaaagaaaaatcattctgtcattctggccgctgtttgaagaatgcgaataatgcaacagggagatcagatacaagactggtaaccgaggtgtcagagttgagactcagtttcgcagattgcattggcaagtgaccaagtgggtggtgccacggttgacaaccctatttcttacatcactgagtggatgtacaaggattaaaccacactggggaagaaaagtgctcaaccctgaggcaccctcacacacctcggctcttgtgaacactagtgttcctgccgaagcacgcctacttaccccgctgagcagagcctgagcctgcaacctccagagacctggggaaagccacatactccgcttcccgcccccggcaagggcgtgtcagctacaaggggcgtgtcatctctaggccccgccccgcgctgcgtgcccacgttgcgccggcctcgcgccagtccgctgggctgcagggactgcggcgcctgagggagtcgctgacgggcacgctgactggaggctggcggacaggcgacagcgacctgcggcaggaccagaggagcgagagcagcaagaaccacacccagcagcaatgtcagcggaagtggaaacctcagagggggtagacgagtcagaaaaaaagaactctggggccctagaaaaggagaaccaaatgagaatggctgacctctcggagctcctgaaggaagggaccaaggaagcacacgaccgggcagaaaacacccagtttgtcaaggacttcttgaaaggcaacattaagaaggagctgtttaagctggccaccacggcactttacttcacatactcagccctcgaggaggaaatggagcgcaacaaggaccatccagcctttgcccctttgtacttccccatggagctgcaccggaaggaggcgctgaccaaggacatggagtatttctttggtgaaaactgggaggagcaggtgcagtgccccaaggctgcccagaagtacgtggagcggatccactacatagggcagaacgagccggagctactggtggcccatgcatacacccgctacatgggggatctctcggggggccaggtgctgaagaaggtggcccagcgagcactgaaactccccagcacaggggaagggacccagttctacctgtttgagaatgtggacaatgcccagcagttcaagcagctctaccgggccaggatgaacgccctggacctgaacatgaagaccaaagagaggatcgtggaggaggccaacaaggcttttgagtataacatgcagatattcaatgaactggaccaggccggctccacactggccagagagaccttggaggatgggttccctgtacacgatgggaaaggagacatgcgtaaatgccctttctacgctgctgaacaagacaaaggtgccctggagggcagcagctgtcccttccgaacagctatggctgtgctgaggaagcccagcctccagttcatcctggccgctggtgtggccctagctgctggactcttggcctggtactacatgtgaagcacccatcatgccacaccggtaccctcctcccgactgaccactggcctacccctttctccagccctgactaaactaccacctcaggtgactttttaaaaaatgctgggtttaagaaaggcaaccaataaaagccagatgctagagcctctgcctgacagcatcctctctatgggccatattccgcactgggcacaggccgtcaccctgggagcagtcggcacagtgcagcaagcctggcccccgacccagctctactccaggcttccacacttctgggccctaggctgcttccggtagtccctgtttttgcagtacatgggtgactatctcccctgttggaggtgagtggcctgtaagtccaagctgtgcgagggggccttgctggatgctgctgtacaacttctgggcctctcttggaccctgggagtgagggtgggtgtgggtggaagcctcagaggccttgggagctcatccctctcacccagaatccctctaaccccttgggtgcggtttgctcagccccagcttatctcctcctccgcgctgtgtaaatgctccagcactcaataaagtgggctttgcaagcta

SEQ ID NO: 13426 - DNA, 18208 bp, Homo sapiens
  source 1..18208: mol_type = unassigned DNA
gaagccgcatccagacaaaagctgccgcatccctgccctgcccaacccctggagggattcgagtttggtgcttgtccccgtctgattctcagcgccaaactttttgctagttcagagattccaagagtctgatgagttactctgagaggaaaccctctgcctgttgttgaggaggactgagcacagtgcttaggcgctgagggggaaaaagagggggaaaaaaaagaaaatgatttcctgggaagttgtccatacagtattcctgtttgctcttctttattcttccctagctcaagatgcgagcccccagtcagagatcagagctgaggaaattcccgagggggcctccacgttggcttttgtgtttgatgtgactggttctatgtatgatgatttagttcaggtgattgaaggggcttccaaaattttggagacgtctttgaaaagacctaaaagacctcttttcaactttgcgttggtgcctttccatgatccagaaattggcccagtgacaattaccacagatcccaagaaatttcaatatgaactcagagaactgtatgttcagggtggtggtgattgcccagaaatgagtattggagctataaaaattgccttggaaatttctcttcctggttctttcatctatgttttcactgatgctcggtccaaagattaccggctcacccatgaggtgctgcaacttatccaacagaaacagtcacaagtcgtatttgttctgactggagattgtgatgacaggacccatattggatataaagtctatgaagaaattgcctctacaagttctggtcaagtgttccatctggacaaaaaacaagttaatgaggtattaaaatgggtagaagaagcagtacaggcctccaaagttcaccttttatccacagatcatttggaacaggctgtaaatacttggagaattccttttgatcccagcctgaaagaggtcactgtgtctttgagtgggccttctccaatgattgaaattcgcaatcctttagggaagctgataaaaaagggatttggcctgcatgagctattaaatatccataactctgccaaagtagtgaatgtgaaagagccagaggctggaatgtggacagtgaagacctcaagcagtggaaggcactctgttcgcattactggcctcagtactattgatttccgagctggcttttctcgaaagcccaccctggacttcaaaaaaacagtcagcagaccagtgcaaggaatacctacctatgtactgctcaatacttctggaatttccactccagctagaatagatcttcttgaacttttgagtatctcaggaagttctcttaagactattcctgttaaatattacccacatcgaaaaccttatggcatatggaatatttctgactttgtaccaccaaatgaagctttctttctcaaagtaacaggctatgataaagatgattacctcttccagagagtatcaagtgtttccttttctagtattgtcccagatgctcccaaagttacgatgcctgagaaaaccccaggatactatctgcagccgggccaaattccctgctctgttgacagtcttttgccctttaccttgagctttgtcagaaatggagttacacttggagtagaccagtatttgaaagaatctgccagtgtgaacttagatattgcaaaggtcactttgtctgacgaaggtttctatgaatgcattgctgtcagcagtgcaggtactggacgggcacagacattttttgacgtatcagagccccctccggtcatccaagtgcctaacaatgttacagtcactcctggagagagagcagttttaacatgtctcatcatcagtgcggtggattacaatctaacctggcagaggaatgacagagatgtcagactggcagagccagcgagaattaggaccttggctaatctgtcattggagctaaagagtgtgaaattcaacgatgctggagagtatcattgtatggtttctagtgaaggtggatcatcagccgcttcagttttcctcacagtgcaagaaccacccaaagtcactgtgatgcccaagaatcagtctttcacaggagggtctgaggtctccatcatgtgttctgcaacaggttatcccaaaccaaagattgcctggaccgttaacgatatgtttatcgtgggttcacacaggtataggatgacctcagatggtaccttatttatcaaaaatgcagctcccaaagatgcagggatctatggttgcctagcaagtaattcagctggaacagataaacagaattctactctcagatacattgaagcccctaagttgatggtagttcagagtgagctcttggttgcccttggggatataaccgttatggaatgcaaaacctctggtattcctccacctcaagttaaatggttcaaaggagatcttgagttgaggccctcaacattcctcattattgaccctctcttgggacttttgaagattcaagaaacacaagatctggatgctggcgattatacctgtgtagccatcaatgaggctggaagagcaactggcaagataactctggatgttggctcacctccagttttcatacaagaacctgctgatgtgtctatggaaattggctcaaatgtgacattaccttgttatgttcagggttatccagaaccaacaatcaaatggcgaagattagacaacatgccaattttctcaagacctttttcagttagttccatcagccaactaagaacaggagctctctttattttaaacttatgggcaagtgataaaggaacctatatttgtgaagctgaaaaccagtttggaaagatccagtcagagacaacagtaacagtgaccggacttgttgctccacttattggaatcagcccttcagtggccaatgttattgaaggacagcagcttactttgccctgtactctgttagctggaaatcccattccagaacgtcggtggattaagaattcagctatgttgctccaaaatccttacatcactgtgcgcagtgatgggagcctccatattgaaagagttcagcttcaggatggtggtgaatatacttgtgtggccagtaacgttgctgggaccaataacaaaactacctctgtggttgtgcatgttctgccaaccattcagcatgggcagcagatactcagtacaattgaaggcattccagtaactttaccatgcaaagcaagtggaaatcccaaaccgtctgtcatctggtccaagaaaggagagctgatttcaaccagcagtgctaagttttcagcaggagctgatggtagtctgtatgtggtatcacctggaggagaggagagtggggagtatgtctgcactgccaccaatacagccggctacgccaaaaggaaagtgcagctaacagtctatgtaaggcccagagtgtttggagatcaacgaggactgtcccaggataagcctgttgagatctccgtccttgcaggggaagaggtaacacttccatgtgaagtgaagagcttacctccacccataattacttgggccaaagaaacccagctcatctcaccgttctctccaagacacacattcctcccttctggttcaatgaagatcactgaaacccgcacttcagatagtgggatgtatctttgtgttgccacaaatattgctgggaatgtgactcaggctgtcaaattaaatgtccatgttcctccaaagatacagcgtggacctaaacatctcaaagtccaagttggtcaaagagtggatattccatgtaatgctcaagggactcctcttcctgtaatcacctggtccaaaggtggaagcactatgctggttgatggagagcaccatgttagcaatccagacggaactttaagcatcgaccaagccacgccctcagatgctggcatatatacatgtgttgctactaacatagcaggcactgatgaaacagagataacgctacatgtccaagaaccacccacagtggaagatctagaacctccatataacactactttccaagaaagagtggccaatcaacgcattgaatttccatgtcctgcaaaaggtacccctaaaccaaccatcaaatggttacacaatggtagagagttgacaggcagagagcctggcatttctatcttggaagatggcacattgctggttattgcttctgttacaccctatgacaatggggagtacatctgtgtggcagtcaatgaagctggaaccacagaaagaaaatataacctcaaagtccatgttcctccagtaattaaagataaagaacaagttacaaatgtgtcggtgttgttaaatcagctgaccaatctcttctgtgaagtggaaggcactccatctcccatcattatgtggtataaagataatgtccaggtgactgaaagcagcactattcagactgtgaacaatgggaagatactgaagctcttcagagccactccagaggatgcaggaagatattcctgcaaagcaattaatattgcaggcacttctcagaagtactttaacattgatgtgctagttccacccaccataataggtaccaacttcccaaatgaagtctcagttgtcctcaaccgtgacgtcgcccttgaatgccaggtcaaaggcactccctttcctgatattcattggttcaaagatggcaagcctttatttttgggcgatcctaatgttgaacttctagacagaggacaagtcttacatttaaagaatgcacggagaaatgacaaggggcgctaccaatgtactgtgtctaatgcagctggcaaacaagccaaggatataaaactgactatctatattccacctagtattaaaggaggaaatgtcaccacagacatatcagtattgatcaacagccttattaaactggaatgtgaaacacggggacttccaatgcctgccattacttggtataaggacgggcagccaatcatgtccagctcacaagcactttatattgataaaggacaatatcttcatattcctcgagcacaggtctctgattcagcaacatatacgtgtcatgtagccaatgttgctggaactgctgaaaaatcattccatgtggatgtctatgttcctccaatgattgaaggcaacttggccacgcctttgaataagcaagtagttattgctcattctctgacactggagtgcaaagctgctggaaacccttctcccattctcacctggttgaaagatggtgtacctgtgaaagctaatgacaatatccgcatagaagctggtgggaagaaactcgaaatcatgagtgcccaagaaattgatcgaggacagtacatatgcgtggctaccagtgtggcaggagaaaaggaaatcaaatatgaagttgatgtcttggtgccaccagctatagaaggaggagatgaaacatcttacttcattgtgatggttaataacttactggagctagattgtcatgtgacaggctctcccccaccaactatcatgtggctgaaggatggccagttaattgatgaaagggatggattcaagattttattaaatggacgcaaactggttattgctcaggctcaagtgtcaaacacaggcctttatcggtgcatggcagcaaatactgctggagaccacaagaaggaatttgaagtgactgttcatgttcctccaacaatcaagtcctcaggcctttctgagagagttgtggtaaaatacaagcctgtcgccttgcagtgcatagccaatgggattccaaatccttccattacatggttaaaagatgaccagcctgtgaacactgcccaaggaaaccttaaaatacagtcttctggtcgagttctacaaattgccaaaaccctgttggaagatgctggcagatacacatgtgtggctaccaacgcagctggagaaacacaacagcacattcaactgcatgttcatgaaccacctagtctggaagatgctggaaaaatgctgaatgagactgtgttggtgagcaaccctgtacagctggagtgtaaggcagctggaaatcctgtgcctgttattacatggtacaaagataatcgtctactctcaggttccaccagcatgactttcttgaacagaggacagatcattgatattgaaagtgcccagatctcagatgctggcatatataaatgcgtggccatcaactcagctggagctacagagttattttacagtctgcaagttcatgtggccccatcaatttctggcagcaataacatggtggcagtggtggttaataacccggtgaggttagaatgtgaagccagaggtattcctgccccaagtctgacctggttgaaagatgggagtcctgtttctagtttttctaatggattacaggttctctctggtggtcgaatcctagcattgaccagtgcacaaatcagcgacacaggaaggtacacctgcgtggcagtgaatgctgctggagaaaagcaaagggacattgacctccgagtatatgttccgccaaatattatgggagaagaacagaatgtctctgtcctcattagccaagctgtggaattactatgtcaaagtgatgctattcccccacctactcttacttggttaaaagacggccaccccttgctgaagaaaccaggcctcagtatatctgaaaatagaagtgtgttaaagattgaagatgctcaggttcaagacactggtcgttacacttgtgaagcaacaaatgttgctggaaaaactgaaaaaaactacaatgtcaacatttgggtccccccaaatattggtggttctgatgaacttactcaacttacagtcattgaagggaatctcattagtctgttgtgtgaatcaagtggtattccacccccaaatctcatctggaagaagaaaggctctccagtgctgactgattccatggggcgagttagaattttatctgggggcaggcaattacaaatttcaattgctgaaaagtctgatgcagcactctattcatgtgtggcgtcgaatgttgctgggactgcaaagaaagaatacaatctgcaagtttacattagaccaaccataaccaacagtggcagccaccctactgaaattattgtgacccgagggaagagtatctccttggagtgtgaggtgcagggtattccaccaccaacagtgacctggatgaaagatggccaccccttgatcaaggcaaagggagtagaaatactggatgaaggtcacatccttcagctgaagaacattcatgtatctgacacaggccgttatgtgtgtgttgctgtgaatgtagcaggaatgactgacaaaaaatatgacttaagtgtccatgctcctccaagcatcataggaaaccacaggtcacctgaaaatattagtgtggtagaaaagaactcagtatctttgacttgtgaagcttctggaattcccctgccttccataacctggttcaaagatgggtggcctgtcagccttagcaattctgtgaggattctttcaggaggcaggatgctacggctgatgcagaccacaatggaagatgctggccaatatacttgcgttgtaaggaatgcagctggtgaagaaagaaaaatctttgggctttcagtattagtaccacctcatattgtgggtgaaaatacattggaagatgtgaaggtaaaagagaaacagagtgttacgctgacttgtgaagtgacagggaatccagtgccagaaattacatggcacaaagatgggcagcccctccaagaagatgaagcccatcacattatatctggtggccgttttcttcaaattaccaatgtccaggtgccacacactggaagatatacatgtttggcttccagtccagctggccacaagagcaggagcttcagtcttaatgtatttgtatctcctacaattgctggtgtaggtagtgatggcaaccctgaagatgtcactgtcatccttaacagccctacatctttggtctgtgaagcttattcatatcctccagctaccatcacctggtttaaggatggcactcctttagaatctaaccgaaatattcgtattcttccaggaggcagaactctgcagatcctcaatgcacaggaggacaatgctggaagatactcttgtgtagccacgaatgaggctggagaaatgataaagcactatgaagtgaaggtgtacattccacccataatcaataaaggggacctttgggggccaggtctttcccctaaagaagtgaagatcaaagtaaacaacactctgaccttggaatgtgaagcgtatgcaattccttctgcctccctcagctggtacaaggatggacagccccttaaatccgatgatcatgttaatattgctgcgaatggacacacacttcaaataaaggaggctcaaatatcagacaccggacgatatacttgtgtagcatctaacattgcaggtgaagatgagttggattttgatgtgaatattcaagttcctccaagttttcagaaactctgggaaataggaaacatgctagatactggcaggaatggtgaagccaaagatgtgatcatcaacaatcccatttctctttactgtgagacaaatgctgctccccctcctacactgacatggtacaaagatggccaccctctgacctcaagtgataaagtattgattttgccaggagggcgagtgttgcagattcctcgggctaaagtagaagatgctgggagatacacatgtgtggctgtgaatgaggctggagaagattcccttcaatatgatgtccgtgtactcgtgccgccaattatcaagggagcaaatagtgatctccctgaagaggtcaccgtgctggtgaacaagagtgcactgatagagtgtttatccagtggcagcccagcaccaaggaattcctggcagaaagatggacagcccttgctagaagatgaccatcataaatttctatctaatggacgaattctgcagattctgaatactcaaataacagatatcggcaggtatgtgtgtgttgctgagaacacagctgggagtgccaaaaaatattttaacctcaatgttcatgttcctccaagtgtcattggtcctaaatctgaaaatcttaccgtcgtggtgaacaatttcatctctttgacctgtgaggtctctggttttccacctcctgacctcagctggctcaagaatgaacagcccatcaaactgaacacaaatactctcattgtgcctggtggtcgaactctacagattattcgggccaaggtatcagatggtggtgaatacacttgtatagctatcaatcaagctggcgaaagcaagaaaaagttttccctgactgtttatgtgcccccaagcattaaagaccatgacagtgaatctctttctgtagttaatgtaagagagggaacttctgtgtctttggagtgtgagtcgaacgctgtgccacctccagtcatcacttggtataagaatgggcggatgataacagagtctactcatgtggagattttagctgatggacaaatgctacacattaagaaagctgaggtatctgacacaggccagtatgtatgtagagctataaatgtagcaggacgggatgataaaaatttccacctcaatgtatatgtgccacccagtattgaaggacctgaaagagaagtgattgtggagacgatcagcaatcctgtgacattaacatgtgatgccactgggatcccacctcccacgatagcatggttaaagaaccacaagcgcatagaaaattctgactcactggaagttcgtattttgtctggaggtagcaaactccagattgcccggtctcagcattcagatagtggaaactatacatgtattgcttcaaatatggagggaaaagcccagaaatattactttctttcaattcaagttcctccaagtgttgctggtgctgaaattccaagtgatgtcagtgtccttctaggagaaaatgttgagctggtctgcaatgcaaatggcattcctactccacttattcaatggcttaaagatggaaagcccatagctagtggtgaaacagaaagaatccgagtgagtgcaaatggcagcacattaaacatttatggagctcttacatctgacacggggaaatacacatgtgttgctactaatcccgctggagaagaagaccgaatttttaacttgaatgtctatgttacacctacaattaggggtaataaagatgaagcagagaaactaatgactttagtggatacttcaataaatattgaatgcagagccacagggacgcctccaccacagataaactggctgaagaatggacttcctctgcctctctcctcccatatccggttactggcagcaggacaagttatcaggattgtgagagctcaggtgtctgatgtcgctgtgtatacttgtgtggcctccaacagagctggggtggataataagcattacaatcttcaagtgtttgcaccaccaaatatggacaattcaatggggacagaggaaatcacagttctcaaaggtagttccacctctatggcatgcattactgatggaaccccagctcccagtatggcctggcttagagatggccagcctctggggcttgatgcccatctgacagtcagcacccatggaatggtcctgcagctcctcaaagcagagactgaagattcgggaaagtacacctgcattgcctcaaatgaagctggagaagtcagcaagcactttatcctcaaggtcctagaaccacctcacattaatggatctgaagaacatgaagagatatcagtaattgttaataacccacttgaacttacctgcattgcttctggaatcccagcccctaaaatgacctggatgaaagatggccggccccttccacagacggatcaagtgcaaactctaggaggaggagaggttcttcgaatttctactgctcaggtggaggatacaggaagatatacatgtctggcatccagtcctgcaggagatgatgataaggaatatctagtgagagtgcatgtacctcctaatattgctggaactgatgagccccgggatatcactgtgttacggaacagacaagtgacattggaatgcaagtcagatgcagtgcccccacctgtaattacttggctcagaaatggagaacggttacaggcaacacctcgagtgcgaatcctatctggagggagatacttgcaaatcaacaatgctgacctaggtgatacagccaattatacctgtgttgccagcaacattgcaggaaagactacaagagaatttattctcactgtaaatgttcctccaaacataaaggggggcccccagagccttgtaattcttttaaataagtcaactgtattggaatgcatcgctgaaggtgtgccaactccaaggataacatggagaaaggatggagctgttctagctgggaatcatgcaagatattccatcttggaaaatggattccttcatattcaatcagcacatgtcactgacactggacggtatttgtgtatggccaccaatgctgctggaacagatcgcaggcgaatagatttacaggtccatgttcctccatctattgctccgggtcctaccaacatgactgtaatagtaaatgttcaaactactctggcttgtgaggctactgggataccaaaaccatcaatcaattggagaaaaaatgggcatcttcttaatgtggatcaaaatcagaactcatacaggctcctttcttcaggttcactagtaattatttccccttctgtggatgacactgcaacctatgaatgtactgtgacaaacggtgctggagatgataaaagaactgtggatctcactgtccaagttccaccttccatagctgatgagcctacagatttcctagtaaccaaacatgccccagcagtaattacctgcactgcttcgggagttccatttccctcaattcactggaccaaaaatggtataagactgcttcccaggggagatggctatagaattctgtcctcaggagcaattgaaatacttgccacccaattaaaccatgctggaagatacacttgtgtcgctaggaatgcggctggctctgcacatcgacacgtgacccttcatgttcatgagcctccagtcattcagccccaaccaagtgaactacacgtcattctgaacaatcctattttattaccatgtgaagcaacagggacacccagtcctttcattacttggcaaaaagaaggcatcaatgttaacacttcaggcagaaaccatgcagttcttcctagtggcggcttacagatctccagagctgtccgagaggatgctggcacttacatgtgtgtggcccagaacccggctggtacagccttgggcaaaatcaagttaaatgtccaagttcctccagtcattagccctcatctaaaggaatatgttattgctgtggacaagcccatcacgttatcctgtgaagcagatggcctccctccgcctgacattacatggcataaagatgggcgtgcaattgtggaatctatccgccagcgcgtcctcagctctggctctctgcaaatagcatttgtccagcctggtgatgctggccattacacgtgcatggcagccaatgtagcaggatcaagcagcacaagcaccaagctcaccgtccatgtaccacccaggatcagaagtacagaaggacactacacggtcaatgagaattcacaagccattcttccatgcgtagctgatggaatccccacaccagcaattaactggaaaaaagacaatgttcttttagctaacttgttaggaaaatacactgctgaaccatatggagaactcattttagaaaatgttgtgctggaggattctggcttctatacctgtgttgctaacaatgctgcaggtgaagatacacacactgtcagcctgactgtgcatgttctccccacttttactgaacttcctggagacgtgtcattaaataaaggagaacagctacgattaagctgtaaagctactggtattccattgcccaaattaacatggaccttcaataacaatattattccagcccactttgacagtgtgaatggacacagtgaacttgttattgaaagagtgtcaaaagaggattcaggtacttatgtgtgcaccgcagagaacagcgttggctttgtgaaggcaattggatttgtttatgtgaaagaacctccagtcttcaaaggtgattatccttctaactggattgaaccacttggtgggaatgcaatcctgaattgtgaggtgaaaggagaccccaccccaaccatccagtggaacagaaagggagtggatattgaaattagccacagaatccggcaactgggcaatggctccctggccatctatggcactgttaatgaagatgccggtgactatacatgtgtagctaccaatgaagctggggtggtggagcgcagcatgagtctgactctgcaaagtcctcctattatcactcttgagccagtggaaactgttattaatgctggtggcaaaatcatattgaattgtcaggcaactggagagcctcaaccaaccattacatggtcccgtcaagggcactctatttcctgggatgaccgggttaacgtgttgtccaacaactcattatatattgctgatgctcagaaagaagatacctctgaatttgaatgtgttgctcgaaacttaatgggttctgtccttgtcagagtgccagtcatagtccaggttcatggtggattttcccagtggtctgcatggagagcctgcagtgtcacctgtggaaaaggcatccaaaagaggagtcgtctgtgcaaccagccccttccagccaatggtgggaagccctgccaaggttcagatttggaaatgcgaaactgtcaaaataagccttgtccagtggatggtagctggtcggaatggagtctttgggaagaatgcacaaggagctgtggacgcggcaaccaaaccaggaccaggacttgcaataatccatcagttcagcatggtgggcggccatgtgaagggaatgctgtggaaataattatgtgcaacattaggccttgcccagttcatggagcatggagcgcttggcagccttggggaacatgcagcgaaagttgtgggaaaggtactcagacaagagcaagactttgtaataacccaccaccagcgtttggtgggtcctactgtgatggagcagaaacacagatgcaagtttgcaatgaaagaaattgtccaattcatggcaagtgggcgacttgggccagttggagtgcctgttctgtgtcatgtggaggaggtgccagacagagaacaaggggctgctccgaccctgtgccccagtatggaggaaggaaatgcgaagggagtgatgtccagagtgatttttgcaacagtgacccttgcccaacccatggtaactggagtccttggagtggctggggaacatgcagccggacgtgtaacggagggcagatgcggcggtaccgcacatgtgataaccctcctccctccaatgggggaagagcttgtgggggaccagactcccagatccagaggtgcaacactgacatgtgtcctgtggatggaagttggggaagctggcatagttggagccagtgctctgcctcctgtggaggaggtgaaaagactcggaagcggctgtgcgaccatcctgtgccagttaaaggtggccgtccctgtcccggagacactactcaggtgaccaggtgcaatgtacaagcatgtccaggtgggccccagcgagccagaggaagtgttattggaaatattaatgatgttgaatttggaattgctttccttaatgccacaataactgatagccctaactctgatactagaataatacgtgccaaaattaccaatgtacctcgtagtcttggttcagcaatgagaaagatagtttctattctaaatcccatttattggacaacagcaaaggaaataggagaagcagtcaatggctttaccctcaccaatgcagtcttcaaaagagaaactcaagtggaatttgcaactggagaaatcttgcagatgagtcatattgcccggggcttggattccgatggttctttgctgctagatatcgttgtgagtggctatgtcctacagcttcagtcacctgctgaagtcactgtaaaggattacacagaggactacattcaaacaggtcctgggcagctgtacgcctactcaacccggctgttcaccattgatggcatcagcatcccatacacatggaaccacaccgttttctatgatcaggcacagggaagaatgcctttcttggttgaaacacttcatgcatcctctgtggaatctgactataaccagatagaagagacactgggttttaaaattcatgcttcaatatccaaaggagatcgcagtaatcagtgcccctccgggtttaccttagactcagttggacctttttgtgctgatgaggatgaatgtgcagcagggaatccctgctcccatagctgccacaatgccatggggacttactactgctcctgccctaaaggcctcaccatagctgcagatggaagaacttgtcaagatattgatgagtgtgctttgggtaggcatacctgccacgctggtcaggactgtgacaatacgattggatcttatcgctgtgtggtccgttgtggaagtggctttcgaagaacctctgatgggctgagttgtcaagatattaatgaatgtcaagaatccagcccctgtcaccagcgctgtttcaatgccataggaagtttccattgtggatgtgaacctgggtatcagctcaaaggcagaaaatgcatggatgtgaacgagtgtagacaaaatgtatgcagaccagatcagcactgtaagaacacccgtggtggctataagtgcattgatctttgtccaaatggaatgaccaaggcagaaaatggaacctgtattgatattgatgaatgtaaagatgggacccatcagtgcagatataaccagatatgtgagaatacaagaggcagctatcgttgtgtatgcccaagaggttatcggtctcaaggagttggaagaccctgcatggacattaatgaatgtgaacaagtgcctaaaccttgtgcacatcagtgctccaacacccccggcagcttcaagtgtatctgtccaccaggacaacatttattaggggacgggaaatcttgcgctggattggagaggctgccaaattatggcactcaatacagtagctataaccttgcacggttctcccctgtgagaaacaactatcaacctcaacagcattacagacagtactcacatctctacagctcctactcagagtatagaaacagcagaacatctctctccaggactagaaggactattaggaaaacttgccctgaaggctctgaggcaagccatgacacatgtgtagatattgatgaatgtgaaaatacagatgcctgccagcatgagtgtaagaatacctttggaagttatcagtgcatctgcccacctggctatcaactcacacacaatggaaagacatgccaagatatcgatgaatgtctggagcagaatgtgcactgtggacccaatcgcatgtgcttcaacatgagaggaagctaccagtgcatcgatacaccctgtccacccaactaccaacgggatcctgtttcagggttctgcctcaagaactgtccacccaatgatttggaatgtgccttgagcccatatgccttggaatacaaactcgtctccctcccatttggaatagccaccaatcaagatttaatccggctggttgcatacacacaggatggagtgatgcatcccaggacaactttcctcatggtagatgaggaacagactgttccttttgccttgagggatgaaaacctgaaaggagtggtgtatacaacacgaccactacgagaagcagagacctaccgcatgagggtccgagcctcatcctacagtgccaatgggaccattgaatatcagaccacattcatagtttatatagctgtgtccgcctatccatactaaggaactctccaaagcctattccacatatttaaaccgcattaatcatggcaatcaagcccccttccagattactgtctcttgaacagttgcaatcttggcagcttgaaaatggtgctacactctgttttgtgtgccttccttggtacttctgaggtattttcatgatcccaccatggtcatatcttgaagtatggtctagaaaagtcccttattattttatttattacactggagcagttacttcccaaagattattctgaacatctaacaggacatatcagtgatggtttacagtagtgtagtacctaagatcattttcctgaaagccaaaccaaacaacgaaaaacaagaacaactaattcagaatcaaatagagtttttgagcatttgactatttttagaatcataaaattagttactaagtattttgatcaaagcttataaaataacttacggagatttttgtaagtattgatacattataataggacttgcctattttcatttttaagaagaaaaacaccactcattttataaaatatagtacagctactataaggcttgtttgatcccaaatggtgcttatcttgattgaacattcagaacaaggatattattttcagtgattttgtgagatcagctgaaccacttatgataataataataaaaaagactgctttgccctcacgtcagttgtacatggcatggaactttaaaaattttaatataaactttcatccagttagcttcataacttttacgttccagaattttgtttattttcctgtcaatgaaagcaatttttaaagataccagtgggacagatttggttttttaaaaatctcatgtgttcaaattaacataaatattacacgtcaatacactgtacatggtggtaatagactctaagcaattgccaagatgtattctatttttatgaagtgtatatatattaccttagtgtgcattttctatataatatcttgatggactcttttataaaattattttataaaaaacaatgttacactaaaatcagcctaaataaattttcacaactttttttcataa

SEQ ID NO: 13427 - DNA, 17861 bp, Homo sapiens
  source 1..17861: mol_type = unassigned DNA
gaagccgcatccagacaaaagctgccgcatccctgccctgcccaacccctggagggattcgagtttggtgcttgtccccgtctgattctcagcgccaaactttttgctagttcagagattccaagagtctgatgagttactctgagaggaaaccctctgcctgttgttgaggaggactgagcacagtgcttaggcgctgagggggaaaaagagggggaaaaaaaagaaaatgatttcctgggaagttgtccatacagtattcctgtttgctcttctttattcttccctagctcaagatgcgagcccccagtcagagatcagagctgaggaaattcccgagggggcctccacgttggcttttgtgtttgatgtgactggttctatgtatgatgatttagttcaggtgattgaaggggcttccaaaattttggagacgtctttgaaaagacctaaaagacctcttttcaactttgcgttggtgcctttccatgatccagaaattggcccagtgacaattaccacagatcccaagaaatttcaatatgaactcagagaactgtatgttcagggtggtggtgattgcccagaaatgagtattggagctataaaaattgccttggaaatttctcttcctggttctttcatctatgttttcactgatgctcggtccaaagattaccggctcacccatgaggtgctgcaacttatccaacagaaacagtcacaagtcgtatttgttctgactggagattgtgatgacaggacccatattggatataaagtctatgaagaaattgcctctacaagttctggtcaagtgttccatctggacaaaaaacaagttaatgaggtattaaaatgggtagaagaagcagtacaggcctccaaagttcaccttttatccacagatcatttggaacaggctgtaaatacttggagaattccttttgatcccagcctgaaagaggtcactgtgtctttgagtgggccttctccaatgattgaaattcgcaatcctttagggaagctgataaaaaagggatttggcctgcatgagctattaaatatccataactctgccaaagtagtgaatgtgaaagagccagaggctggaatgtggacagtgaagacctcaagcagtggaaggcactctgttcgcattactggcctcagtactattgatttccgagctggcttttctcgaaagcccaccctggacttcaaaaaaacagtcagcagaccagtgcaaggaatacctacctatgtactgctcaatacttctggaatttccactccagctagaatagatcttcttgaacttttgagtatctcaggaagttctcttaagactattcctgttaaatattacccacatcgaaaaccttatggcatatggaatatttctgactttgtaccaccaaatgaagctttctttctcaaagtaacaggctatgataaagatgattacctcttccagagagtatcaagtgtttccttttctagtattgtcccagatgctcccaaagttacgatgcctgagaaaaccccaggatactatctgcagccgggccaaattccctgctctgttgacagtcttttgccctttaccttgagctttgtcagaaatggagttacacttggagtagaccagtatttgaaagaatctgccagtgtgaacttagatattgcaaaggtcactttgtctgacgaaggtttctatgaatgcattgctgtcagcagtgcaggtactggacgggcacagacattttttgacgtatcagagccccctccggtcatccaagtgcctaacaatgttacagtcactcctggagagagagcagttttaacatgtctcatcatcagtgcggtggattacaatctaacctggcagaggaatgacagagatgtcagactggcagagccagcgagaattaggaccttggctaatctgtcattggagctaaagagtgtgaaattcaacgatgctggagagtatcattgtatggtttctagtgaaggtggatcatcagccgcttcagttttcctcacagtgcaagaaccacccaaagtcactgtgatgcccaagaatcagtctttcacaggagggtctgaggtctccatcatgtgttctgcaacaggttatcccaaaccaaagattgcctggaccgttaacgatatgtttatcgtgggttcacacaggtataggatgacctcagatggtaccttatttatcaaaaatgcagctcccaaagatgcagggatctatggttgcctagcaagtaattcagctggaacagataaacagaattctactctcagatacattgaagcccctaagttgatggtagttcagagtgagctcttggttgcccttggggatataaccgttatggaatgcaaaacctctggtattcctccacctcaagttaaatggttcaaaggagatcttgagttgaggccctcaacattcctcattattgaccctctcttgggacttttgaagattcaagaaacacaagatctggatgctggcgattatacctgtgtagccatcaatgaggctggaagagcaactggcaagataactctggatgttggctcacctccagttttcatacaagaacctgctgatgtgtctatggaaattggctcaaatgtgacattaccttgttatgttcagggttatccagaaccaacaatcaaatggcgaagattagacaacatgccaattttctcaagacctttttcagttagttccatcagccaactaagaacaggagctctctttattttaaacttatgggcaagtgataaaggaacctatatttgtgaagctgaaaaccagtttggaaagatccagtcagagacaacagtaacagtgaccggacttgttgctccacttattggaatcagcccttcagtggccaatgttattgaaggacagcagcttactttgccctgtactctgttagctggaaatcccattccagaacgtcggtggattaagaattcagctatgttgctccaaaatccttacatcactgtgcgcagtgatgggagcctccatattgaaagagttcagcttcaggatggtggtgaatatacttgtgtggccagtaacgttgctgggaccaataacaaaactacctctgtggttgtgcatgttctgccaaccattcagcatgggcagcagatactcagtacaattgaaggcattccagtaactttaccatgcaaagcaagtggaaatcccaaaccgtctgtcatctggtccaagaaaggagagctgatttcaaccagcagtgctaagttttcagcaggagctgatggtagtctgtatgtggtatcacctggaggagaggagagtggggagtatgtctgcactgccaccaatacagccggctacgccaaaaggaaagtgcagctaacagtctatgtaaggcccagagtgtttggagatcaacgaggactgtcccaggataagcctgttgagatctccgtccttgcaggggaagaggtaacacttccatgtgaagtgaagagcttacctccacccataattacttgggccaaagaaacccagctcatctcaccgttctctccaagacacacattcctcccttctggttcaatgaagatcactgaaacccgcacttcagatagtgggatgtatctttgtgttgccacaaatattgctgggaatgtgactcaggctgtcaaattaaatgtccatgttcctccaaagatacagcgtggacctaaacatctcaaagtccaagttggtcaaagagtggatattccatgtaatgctcaagggactcctcttcctgtaatcacctggtccaaaggtggaagcactatgctggttgatggagagcaccatgttagcaatccagacggaactttaagcatcgaccaagccacgccctcagatgctggcatatatacatgtgttgctactaacatagcaggcactgatgaaacagagataacgctacatgtccaagaaccacccacagtggaagatctagaacctccatataacactactttccaagaaagagtggccaatcaacgcattgaatttccatgtcctgcaaaaggtacccctaaaccaaccatcaaatggttacacaatggtagagagttgacaggcagagagcctggcatttctatcttggaagatggcacattgctggttattgcttctgttacaccctatgacaatggggagtacatctgtgtggcagtcaatgaagctggaaccacagaaagaaaatataacctcaaagtccatgttcctccagtaattaaagataaagaacaagttacaaatgtgtcggtgttgttaaatcagctgaccaatctcttctgtgaagtggaaggcactccatctcccatcattatgtggtataaagataatgtccaggtgactgaaagcagcactattcagactgtgaacaatgggaagatactgaagctcttcagagccactccagaggatgcaggaagatattcctgcaaagcaattaatattgcaggcacttctcagaagtactttaacattgatgtgctagttccacccaccataataggtaccaacttcccaaatgaagtctcagttgtcctcaaccgtgacgtcgcccttgaatgccaggtcaaaggcactccctttcctgatattcattggttcaaagatggcaagcctttatttttgggcgatcctaatgttgaacttctagacagaggacaagtcttacatttaaagaatgcacggagaaatgacaaggggcgctaccaatgtactgtgtctaatgcagctggcaaacaagccaaggatataaaactgactatctatattccacctagtattaaaggaggaaatgtcaccacagacatatcagtattgatcaacagccttattaaactggaatgtgaaacacggggacttccaatgcctgccattacttggtataaggacgggcagccaatcatgtccagctcacaagcactttatattgataaaggacaatatcttcatattcctcgagcacaggtctctgattcagcaacatatacgtgtcatgtagccaatgttgctggaactgctgaaaaatcattccatgtggatgtctatgttcctccaatgattgaaggcaacttggccacgcctttgaataagcaagtagttattgctcattctctgacactggagtgcaaagctgctggaaacccttctcccattctcacctggttgaaagatggtgtacctgtgaaagctaatgacaatatccgcatagaagctggtgggaagaaactcgaaatcatgagtgcccaagaaattgatcgaggacagtacatatgcgtggctaccagtgtggcaggagaaaaggaaatcaaatatgaagttgatgtcttggtgccaccagctatagaaggaggagatgaaacatcttacttcattgtgatggttaataacttactggagctagattgtcatgtgacaggctctcccccaccaactatcatgtggctgaaggatggccagttaattgatgaaagggatggattcaagattttattaaatggacgcaaactggttattgctcaggctcaagtgtcaaacacaggcctttatcggtgcatggcagcaaatactgctggagaccacaagaaggaatttgaagtgactgttcatgttcctccaacaatcaagtcctcaggcctttctgagagagttgtggtaaaatacaagcctgtcgccttgcagtgcatagccaatgggattccaaatccttccattacatggttaaaagatgaccagcctgtgaacactgcccaaggaaaccttaaaatacagtcttctggtcgagttctacaaattgccaaaaccctgttggaagatgctggcagatacacatgtgtggctaccaacgcagctggagaaacacaacagcacattcaactgcatgttcatgaaccacctagtctggaagatgctggaaaaatgctgaatgagactgtgttggtgagcaaccctgtacagctggagtgtaaggcagctggaaatcctgtgcctgttattacatggtacaaagataatcgtctactctcaggttccaccagcatgactttcttgaacagaggacagatcattgatattgaaagtgcccagatctcagatgctggcatatataaatgcgtggccatcaactcagctggagctacagagttattttacagtctgcaagttcatgtggccccatcaatttctggcagcaataacatggtggcagtggtggttaataacccggtgaggttagaatgtgaagccagaggtattcctgccccaagtctgacctggttgaaagatgggagtcctgtttctagtttttctaatggattacaggttctctctggtggtcgaatcctagcattgaccagtgcacaaatcagcgacacaggaaggtacacctgcgtggcagtgaatgctgctggagaaaagcaaagggacattgacctccgagtatatgttccgccaaatattatgggagaagaacagaatgtctctgtcctcattagccaagctgtggaattactatgtcaaagtgatgctattcccccacctactcttacttggttaaaagacggccaccccttgctgaagaaaccaggcctcagtatatctgaaaatagaagtgtgttaaagattgaagatgctcaggttcaagacactggtcgttacacttgtgaagcaacaaatgttgctggaaaaactgaaaaaaactacaatgtcaacatttgggtccccccaaatattggtggttctgatgaacttactcaacttacagtcattgaagggaatctcattagtctgttgtgtgaatcaagtggtattccacccccaaatctcatctggaagaagaaaggctctccagtgctgactgattccatggggcgagttagaattttatctgggggcaggcaattacaaatttcaattgctgaaaagtctgatgcagcactctattcatgtgtggcgtcgaatgttgctgggactgcaaagaaagaatacaatctgcaagtttacattagaccaaccataaccaacagtggcagccaccctactgaaattattgtgacccgagggaagagtatctccttggagtgtgaggtgcagggtattccaccaccaacagtgacctggatgaaagatggccaccccttgatcaaggcaaagggagtagaaatactggatgaaggtcacatccttcagctgaagaacattcatgtatctgacacaggccgttatgtgtgtgttgctgtgaatgtagcaggaatgactgacaaaaaatatgacttaagtgtccatgctcctccaagcatcataggaaaccacaggtcacctgaaaatattagtgtggtagaaaagaactcagtatctttgacttgtgaagcttctggaattcccctgccttccataacctggttcaaagatgggtggcctgtcagccttagcaattctgtgaggattctttcaggaggcaggatgctacggctgatgcagaccacaatggaagatgctggccaatatacttgcgttgtaaggaatgcagctggtgaagaaagaaaaatctttgggctttcagtattagtaccacctcatattgtgggtgaaaatacattggaagatgtgaaggtaaaagagaaacagagtgttacgctgacttgtgaagtgacagggaatccagtgccagaaattacatggcacaaagatgggcagcccctccaagaagatgaagcccatcacattatatctggtggccgttttcttcaaattaccaatgtccaggtgccacacactggaagatatacatgtttggcttccagtccagctggccacaagagcaggagcttcagtcttaatgtatttgtatctcctacaattgctggtgtaggtagtgatggcaaccctgaagatgtcactgtcatccttaacagccctacatctttggtctgtgaagcttattcatatcctccagctaccatcacctggtttaaggatggcactcctttagaatctaaccgaaatattcgtattcttccaggaggcagaactctgcagatcctcaatgcacaggaggacaatgctggaagatactcttgtgtagccacgaatgaggctggagaaatgataaagcactatgaagtgaaggtgtacattccacccataatcaataaaggggacctttgggggccaggtctttcccctaaagaagtgaagatcaaagtaaacaacactctgaccttggaatgtgaagcgtatgcaattccttctgcctccctcagctggtacaaggatggacagccccttaaatccgatgatcatgttaatattgctgcgaatggacacacacttcaaataaaggaggctcaaatatcagacaccggacgatatacttgtgtagcatctaacattgcaggtgaagatgagttggattttgatgtgaatattcaagttcctccaagttttcagaaactctgggaaataggaaacatgctagatactggcaggaatggtgaagccaaagatgtgatcatcaacaatcccatttctctttactgtgagacaaatgctgctccccctcctacactgacatggtacaaagatggccaccctctgacctcaagtgataaagtattgattttgccaggagggcgagtgttgcagattcctcgggctaaagtagaagatgctgggagatacacatgtgtggctgtgaatgaggctggagaagattcccttcaatatgatgtccgtgtactcgtgccgccaattatcaagggagcaaatagtgatctccctgaagaggtcaccgtgctggtgaacaagagtgcactgatagagtgtttatccagtggcagcccagcaccaaggaattcctggcagaaagatggacagcccttgctagaagatgaccatcataaatttctatctaatggacgaattctgcagattctgaatactcaaataacagatatcggcaggtatgtgtgtgttgctgagaacacagctgggagtgccaaaaaatattttaacctcaatgttcatgttcctccaagtgtcattggtcctaaatctgaaaatcttaccgtcgtggtgaacaatttcatctctttgacctgtgaggtctctggttttccacctcctgacctcagctggctcaagaatgaacagcccatcaaactgaacacaaatactctcattgtgcctggtggtcgaactctacagattattcgggccaaggtatcagatggtggtgaatacacttgtatagctatcaatcaagctggcgaaagcaagaaaaagttttccctgactgtttatgtgcccccaagcattaaagaccatgacagtgaatctctttctgtagttaatgtaagagagggaacttctgtgtctttggagtgtgagtcgaacgctgtgccacctccagtcatcacttggtataagaatgggcggatgataacagagtctactcatgtggagattttagctgatggacaaatgctacacattaagaaagctgaggtatctgacacaggccagtatgtatgtagagctataaatgtagcaggacgggatgataaaaatttccacctcaatgtatatgtgccacccagtattgaaggacctgaaagagaagtgattgtggagacgatcagcaatcctgtgacattaacatgtgatgccactgggatcccacctcccacgatagcatggttaaagaaccacaagcgcatagaaaattctgactcactggaagttcgtattttgtctggaggtagcaaactccagattgcccggtctcagcattcagatagtggaaactatacatgtattgcttcaaatatggagggaaaagcccagaaatattactttctttcaattcaagttcctccaagtgttgctggtgctgaaattccaagtgatgtcagtgtccttctaggagaaaatgttgagctggtctgcaatgcaaatggcattcctactccacttattcaatggcttaaagatggaaagcccatagctagtggtgaaacagaaagaatccgagtgagtgcaaatggcagcacattaaacatttatggagctcttacatctgacacggggaaatacacatgtgttgctactaatcccgctggagaagaagaccgaatttttaacttgaatgtctatgttacacctacaattaggggtaataaagatgaagcagagaaactaatgactttagtggatacttcaataaatattgaatgcagagccacagggacgcctccaccacagataaactggctgaagaatggacttcctctgcctctctcctcccatatccggttactggcagcaggacaagttatcaggattgtgagagctcaggtgtctgatgtcgctgtgtatacttgtgtggcctccaacagagctggggtggataataagcattacaatcttcaagtgtttgcaccaccaaatatggacaattcaatggggacagaggaaatcacagttctcaaaggtagttccacctctatggcatgcattactgatggaaccccagctcccagtatggcctggcttagagatggccagcctctggggcttgatgcccatctgacagtcagcacccatggaatggtcctgcagctcctcaaagcagagactgaagattcgggaaagtacacctgcattgcctcaaatgaagctggagaagtcagcaagcactttatcctcaaggtcctagaaccacctcacattaatggatctgaagaacatgaagagatatcagtaattgttaataacccacttgaacttacctgcattgcttctggaatcccagcccctaaaatgacctggatgaaagatggccggccccttccacagacggatcaagtgcaaactctaggaggaggagaggttcttcgaatttctactgctcaggtggaggatacaggaagatatacatgtctggcatccagtcctgcaggagatgatgataaggaatatctagtgagagtgcatgtacctcctaatattgctggaactgatgagccccgggatatcactgtgttacggaacagacaagtgacattggaatgcaagtcagatgcagtgcccccacctgtaattacttggctcagaaatggagaacggttacaggcaacacctcgagtgcgaatcctatctggagggagatacttgcaaatcaacaatgctgacctaggtgatacagccaattatacctgtgttgccagcaacattgcaggaaagactacaagagaatttattctcactgtaaatgttcctccaaacataaaggggggcccccagagccttgtaattcttttaaataagtcaactgtattggaatgcatcgctgaaggtgtgccaactccaaggataacatggagaaaggatggagctgttctagctgggaatcatgcaagatattccatcttggaaaatggattccttcatattcaatcagcacatgtcactgacactggacggtatttgtgtatggccaccaatgctgctggaacagatcgcaggcgaatagatttacaggtccatgttcctccatctattgctccgggtcctaccaacatgactgtaatagtaaatgttcaaactactctggcttgtgaggctactgggataccaaaaccatcaatcaattggagaaaaaatgggcatcttcttaatgtggatcaaaatcagaactcatacaggctcctttcttcaggttcactagtaattatttccccttctgtggatgacactgcaacctatgaatgtactgtgacaaacggtgctggagatgataaaagaactgtggatctcactgtccaagttccaccttccatagctgatgagcctacagatttcctagtaaccaaacatgccccagcagtaattacctgcactgcttcgggagttccatttccctcaattcactggaccaaaaatggtataagactgcttcccaggggagatggctatagaattctgtcctcaggagcaattgaaatacttgccacccaattaaaccatgctggaagatacacttgtgtcgctaggaatgcggctggctctgcacatcgacacgtgacccttcatgttcatgagcctccagtcattcagccccaaccaagtgaactacacgtcattctgaacaatcctattttattaccatgtgaagcaacagggacacccagtcctttcattacttggcaaaaagaaggcatcaatgttaacacttcaggcagaaaccatgcagttcttcctagtggcggcttacagatctccagagctgtccgagaggatgctggcacttacatgtgtgtggcccagaacccggctggtacagccttgggcaaaatcaagttaaatgtccaagttcctccagtcattagccctcatctaaaggaatatgttattgctgtggacaagcccatcacgttatcctgtgaagcagatggcctccctccgcctgacattacatggcataaagatgggcgtgcaattgtggaatctatccgccagcgcgtcctcagctctggctctctgcaaatagcatttgtccagcctggtgatgctggccattacacgtgcatggcagccaatgtagcaggatcaagcagcacaagcaccaagctcaccgtccatgtaccacccaggatcagaagtacagaaggacactacacggtcaatgagaattcacaagccattcttccatgcgtagctgatggaatccccacaccagcaattaactggaaaaaagacaatgttcttttagctaacttgttaggaaaatacactgctgaaccatatggagaactcattttagaaaatgttgtgctggaggattctggcttctatacctgtgttgctaacaatgctgcaggtgaagatacacacactgtcagcctgactgtgcatgttctccccacttttactgaacttcctggagacgtgtcattaaataaaggagaacagctacgattaagctgtaaagctactggtattccattgcccaaattaacatggaccttcaataacaatattattccagcccactttgacagtgtgaatggacacagtgaacttgttattgaaagagtgtcaaaagaggattcaggtacttatgtgtgcaccgcagagaacagcgttggctttgtgaaggcaattggatttgtttatgtgaaagaacctccagtcttcaaaggtgattatccttctaactggattgaaccacttggtgggaatgcaatcctgaattgtgaggtgaaaggagaccccaccccaaccatccagtggaacagaaagggagtggatattgaaattagccacagaatccggcaactgggcaatggctccctggccatctatggcactgttaatgaagatgccggtgactatacatgtgtagctaccaatgaagctggggtggtggagcgcagcatgagtctgactctgcaaagtcctcctattatcactcttgagccagtggaaactgttattaatgctggtggcaaaatcatattgaattgtcaggcaactggagagcctcaaccaaccattacatggtcccgtcaagggcactctatttcctgggatgaccgggttaacgtgttgtccaacaactcattatatattgctgatgctcagaaagaagatacctctgaatttgaatgtgttgctcgaaacttaatgggttctgtccttgtcagagtgccagtcatagtccaggttcatggtggattttcccagtggtctgcatggagagcctgcagtgtcacctgtggaaaaggcatccaaaagaggagtcgtctgtgcaaccagccccttccagccaatggtgggaagccctgccaaggttcagatttggaaatgcgaaactgtcaaaataagccttgtccagtggatggtagctggtcggaatggagtctttgggaagaatgcacaaggagctgtggacgcggcaaccaaaccaggaccaggacttgcaataatccatcagttcagcatggtgggcggccatgtgaagggaatgctgtggaaataattatgtgcaacattaggccttgcccagttcatggagcatggagcgcttggcagccttggggaacatgcagcgaaagttgtgggaaaggtactcagacaagagcaagactttgtaataacccaccaccagcgtttggtgggtcctactgtgatggagcagaaacacagatgcaagtttgcaatgaaagaaattgtccaattcatggcaagtgggcgacttgggccagttggagtgcctgttctgtgtcatgtggaggaggtgccagacagagaacaaggggctgctccgaccctgtgccccagtatggaggaaggaaatgcgaagggagtgatgtccagagtgatttttgcaacagtgacccttgcccaacccatggtaactggagtccttggagtggctggggaacatgcagccggacgtgtaacggagggcagatgcggcggtaccgcacatgtgataaccctcctccctccaatgggggaagagcttgtgggggaccagactcccagatccagaggtgcaacactgacatgtgtcctgtggatggaagttggggaagctggcatagttggagccagtgctctgcctcctgtggaggaggtgaaaagactcggaagcggctgtgcgaccatcctgtgccagttaaaggtggccgtccctgtcccggagacactactcaggtgaccaggtgcaatgtacaagcatgtccaggtgggccccagcgagccagaggaagtgttattggaaatattaatgatgttgaatttggaattgctttccttaatgccacaataactgatagccctaactctgatactagaataatacgtgccaaaattaccaatgtacctcgtagtcttggttcagcaatgagaaagatagtttctattctaaatcccatttattggacaacagcaaaggaaataggagaagcagtcaatggctttaccctcaccaatgcagtcttcaaaagagaaactcaagtggaatttgcaactggagaaatcttgcagatgagtcatattgcccggggcttggattccgatggttctttgctgctagatatcgttgtgagtggctatgtcctacagcttcagtcacctgctgaagtcactgtaaaggattacacagaggactacattcaaacaggtcctgggcagctgtacgcctactcaacccggctgttcaccattgatggcatcagcatcccatacacatggaaccacaccgttttctatgatcaggcacagggaagaatgcctttcttggttgaaacacttcatgcatcctctgtggaatctgactataaccagatagaagagacactgggttttaaaattcatgcttcaatatccaaaggagatcgcagtaatcagtgcccctccgggtttaccttagactcagttggacctttttgtgctgatgaggatgaatgtgcagcagggaatccctgctcccatagctgccacaatgccatggggacttactactgctcctgccctaaaggcctcaccatagctgcagatggaagaacttgtcaagatattgatgagtgtgctttgggtaggcatacctgccacgctggtcaggactgtgacaatacgattggatcttatcgctgtgtggtccgttgtggaagtggctttcgaagaacctctgatgggctgagttgtcaagatattaatgaatgtcaagaatccagcccctgtcaccagcgctgtttcaatgccataggaagtttccattgtggatgtgaacctgggtatcagctcaaaggcagaaaatgcatggatgtgaacgagtgtagacaaaatgtatgcagaccagatcagcactgtaagaacacccgtggtggctataagtgcattgatctttgtccaaatggaatgaccaaggcagaaaatggaacctgtattgatattgatgaatgtaaagatgggacccatcagtgcagatataaccagatatgtgagaatacaagaggcagctatcgttgtgtatgcccaagaggttatcggtctcaaggagttggaagaccctgcatggatattgatgaatgtgaaaatacagatgcctgccagcatgagtgtaagaatacctttggaagttatcagtgcatctgcccacctggctatcaactcacacacaatggaaagacatgccaagatatcgatgaatgtctggagcagaatgtgcactgtggacccaatcgcatgtgcttcaacatgagaggaagctaccagtgcatcgatacaccctgtccacccaactaccaacgggatcctgtttcagggttctgcctcaagaactgtccacccaatgatttggaatgtgccttgagcccatatgccttggaatacaaactcgtctccctcccatttggaatagccaccaatcaagatttaatccggctggttgcatacacacaggatggagtgatgcatcccaggacaactttcctcatggtagatgaggaacagactgttccttttgccttgagggatgaaaacctgaaaggagtggtgtatacaacacgaccactacgagaagcagagacctaccgcatgagggtccgagcctcatcctacagtgccaatgggaccattgaatatcagaccacattcatagtttatatagctgtgtccgcctatccatactaaggaactctccaaagcctattccacatatttaaaccgcattaatcatggcaatcaagcccccttccagattactgtctcttgaacagttgcaatcttggcagcttgaaaatggtgctacactctgttttgtgtgccttccttggtacttctgaggtattttcatgatcccaccatggtcatatcttgaagtatggtctagaaaagtcccttattattttatttattacactggagcagttacttcccaaagattattctgaacatctaacaggacatatcagtgatggtttacagtagtgtagtacctaagatcattttcctgaaagccaaaccaaacaacgaaaaacaagaacaactaattcagaatcaaatagagtttttgagcatttgactatttttagaatcataaaattagttactaagtattttgatcaaagcttataaaataacttacggagatttttgtaagtattgatacattataataggacttgcctattttcatttttaagaagaaaaacaccactcattttataaaatatagtacagctactataaggcttgtttgatcccaaatggtgcttatcttgattgaacattcagaacaaggatattattttcagtgattttgtgagatcagctgaaccacttatgataataataataaaaaagactgctttgccctcacgtcagttgtacatggcatggaactttaaaaattttaatataaactttcatccagttagcttcataacttttacgttccagaattttgtttattttcctgtcaatgaaagcaatttttaaagataccagtgggacagatttggttttttaaaaatctcatgtgttcaaattaacataaatattacacgtcaatacactgtacatggtggtaatagactctaagcaattgccaagatgtattctatttttatgaagtgtatatatattaccttagtgtgcattttctatataatatcttgatggactcttttataaaattattttataaaaaacaatgttacactaaaatcagcctaaataaattttcacaactttttttcataacctt

SEQ ID NO: 13428 - DNA, 720 bp, Homo sapiens
  source 1..720: mol_type = unassigned DNA
gccataggaagtttccattgtggatgtgaacctgggtatcagctcaaaggcagaaaatgcatggatgtgaacgagtgtagacaaaatgtatgcagaccagatcagcactgtaagaacacccgtggtggctataagtgcattgatctttgtccaaatggaatgaccaaggcagaaaatggaacctgtattgatattgatgaatgtaaagatgggacccatcagtgcagatataaccagatatgtgagaatacaagaggcagctatcgttgtgtatgcccaagaggttatcggtctcaaggagttggaagaccctgcatggatattgatgaatgtgaaaatacagatgcctgccagcatgagtgtaagaatacctttggaagttatcagtgcatctgcccacctggctatcaactcacacacaatggaaagacatgccaagatatcgatgaatgtctggagcagaatgtgcactgtggacccaatcgcatgtgcttcaacatgagaggaagctaccagtgcatcgatacaccctgtccacccaactaccaacgggatcctgtttcagggttctgcctcaagaactgtccacccaatgatttggaatgtgccttgagcccatatgccttggaatacaaactcgtctccctcccatttggaatagccaccaatcaagatttaatccggctggttgcatacacacaggatggagtgatgcatccc

SEQ ID NO: 13429 - DNA, 2186 bp, Homo sapiens
  source 1..2186: mol_type = unassigned DNA
agacatatgacagaagactgaacaaccagaagttatgaagataggtactgtgggtgttagaaagattcacggcaaaacagggaagcatctaggctgcttgtggaagtcagaccaaaatagcaggaaggtattgcagcaagatggatttgggaaaggaccaatctcatttgaagcaccatcagacacctgaccctcatcaagaagagaaccattctccagaagtcattggaacctggagtttgagaaacagagaactacttagaaaaagaaaagctgaagtgcatgaaaaggaaacatcacaatggctatttggagaacagaaaaaacgcaagcagcagagaacaggaaaaggaaatcgaagaggcagaaagagacaacaaaacacagaattgaaggtggagcctcagccacagatagaaaaggaaatagtggagaaagcactggcacctatagagaaaaaaactgagccacctgggagcataaccaaagtatttccttcagtagcctccccgcaaaaagttgtgcctgaggaacacttttctgaaatatgtcaagaaagtaacatatatcaggagaatttttctgagtaccaagaaatagcagtacaaaaccattcttctgaaacatgccaacatgtgtctgaacctgaagacctctctcctaaaatgtaccaagaaatatctgtacttcaagacaattcttccaaaatatgccaagacatgaaggaacctgaagacaactctcctaacacatgccaagtaatatctgtaattcaagaccatcctttcaaaatgtaccaagatatggctaaacgagaagatctggctcctaaaatgtgccaagaagctgctgtacccaaaatccttccttgtccaacatctgaagacacagctgatctggcaggatgctctcttcaagcatatccaaaaccagatgtgcctaaaggctatattcttgacacagaccaaaatccagcagaaccagaggaatacaatgaaacagatcaaggaatagctgagacagaaggcctttttcctaaaatacaagaaatagctgagcctaaagacctttctacaaaaacacaccaagaatcagctgaacctaaataccttcctcataaaacatgtaacgaaattattgtgcctaaagccccctctcataaaacaatccaagaaacacctcattctgaagactattcaattgaaataaaccaagaaactcctgggtctgaaaaatattcacctgaaacgtatcaagaaatacctgggcttgaagaatattcacctgaaatataccaagaaacatcccagcttgaagaatattcacctgaaatataccaagaaacaccggggcctgaagacctctctactgagacatataaaaataaggatgtgcctaaagaatgctttccagaaccacaccaagaaacaggtgggccccaaggccaggatcctaaagcacaccaggaagatgctaaagatgcttatacttttcctcaagaaatgaaagaaaaacccaaagaagagccaggaataccagcaattctgaatgagagtcatccagaaaatgatgtctatagttatgttttgttttaacaatgctcaaccataaagttgtggtccaatggaacatacagcttaatagtttatgcgtgattttctcaaaatattgtaaaacttttgacaatgctcattaatattattttttctatttgtagaccatatctgaaagaaataacattttttaaggctctaccacatagacaatatcatgctagaatgtgtgtgtgtgtgtgtgtgtgtgtgtgtgtatgtatgtataggtcggggagaggatagtggtgggaacagacaaataaggaagcggggaggactggataattggttttcccccctaagaacatttatttacgtcttaagagcagataagtgactaagactgaacacatacattttgtggagtatatagttttcttgtaaatgctgttcaattattaatgtaacagtagcatcaaaattttattcaggctttagttgactcttttggtcagttttaacaattctccttaaaagatattttggagtgatgaatgtagtttacttttgtatttgaattttgattttctatttttattttttaaatattgtatttgtgcacaatgtacattaaatcattattacatgctt

SEQ ID NO: 13430 - DNA, 2290 bp, Homo sapiens
  source 1..2290: mol_type = unassigned DNA
cggcagacatatgacagaagactgaacaaccagaagttatgaagataggtactgtgggtgttagaaagattcacggcaaaacagggaaggcaagggcgattatggggactacagtgagccaagcctcccaccggatcatactgtggagacagaaaagtgaatcaggagctgtatctgctctctaaggcatctaggctgcttgtggaagtcagaccaaaatagcaggaaggtattgcagcaagatggatttgggaaaggaccaatctcatttgaagcaccatcagacacctgaccctcatcaagaagagaaccattctccagaagtcattggaacctggagtttgagaaacagagaactacttagaaaaagaaaagctgaagtgcatgaaaaggaaacatcacaatggctatttggagaacagaaaaaacgcaagcagcagagaacaggaaaaggaaatcgaagaggcagaaagagacaacaaaacacagaattgaaggtggagcctcagccacagatagaaaaggaaatagtggagaaagcactggcacctatagagaaaaaaactgagccacctgggagcataaccaaagtatttccttcagtagcctccccgcaaaaagttgtgcctgaggaacacttttctgaaatatgtcaagaaagtaacatatatcaggagaatttttctgagtaccaagaaatagcagtacaaaaccattcttctgaaacatgccaacatgtgtctgaacctgaagacctctctcctaaaatgtaccaagaaatatctgtacttcaagacaattcttccaaaatatgccaagacatgaaggaacctgaagacaactctcctaacacatgccaagtaatatctgtaattcaagaccatcctttcaaaatgtaccaagatatggctaaacgagaagatctggctcctaaaatgtgccaagaagctgctgtacccaaaatccttccttgtccaacatctgaagacacagctgatctggcaggatgctctcttcaagcatatccaaaaccagatgtgcctaaaggctatattcttgacacagaccaaaatccagcagaaccagaggaatacaatgaaacagatcaaggaatagctgagacagaaggcctttttcctaaaatacaagaaatagctgagcctaaagacctttctacaaaaacacaccaagaatcagctgaacctaaataccttcctcataaaacatgtaacgaaattattgtgcctaaagccccctctcataaaacaatccaagaaacacctcattctgaagactattcaattgaaataaaccaagaaactcctgggtctgaaaaatattcacctgaaacgtatcaagaaatacctgggcttgaagaatattcacctgaaatataccaagaaacatcccagcttgaagaatattcacctgaaatataccaagaaacaccggggcctgaagacctctctactgagacatataaaaataaggatgtgcctaaagaatgctttccagaaccacaccaagaaacaggtgggccccaaggccaggatcctaaagcacaccaggaagatgctaaagatgcttatacttttcctcaagaaatgaaagaaaaacccaaagaagagccaggaataccagcaattctgaatgagagtcatccagaaaatgatgtctatagttatgttttgttttaacaatgctcaaccataaagttgtggtccaatggaacatacagcttaatagtttatgcgtgattttctcaaaatattgtaaaacttttgacaatgctcattaatattattttttctatttgtagaccatatctgaaagaaataacattttttaaggctctaccacatagacaatatcatgctagaatgtgtgtgtgtgtgtgtgtgtgtgtgtgtgtatgtatgtataggtcggggagaggatagtggtgggaacagacaaataaggaagcggggaggactggataattggttttcccccctaagaacatttatttacgtcttaagagcagataagtgactaagactgaacacatacattttgtggagtatatagttttcttgtaaatgctgttcaattattaatgtaacagtagcatcaaaattttattcaggctttagttgactcttttggtcagttttaacaattctccttaaaagatattttggagtgatgaatgtagtttacttttgtatttgaattttgattttctatttttattttttaaatattgtatttgtgcacaatgtacattaaatcattattacatgcttaa

SEQ ID NO: 13431 - DNA, 577 bp, Homo sapiens
  source 1..577: mol_type = unassigned DNA
actcttctggtccccacagactcagagagaacccaccatggtgctgtctcctgccgacaagaccaacgtcaaggccgcctggggtaaggtcggcgcgcacgctggcgagtatggtgcggaggccctggagaggatgttcctgtccttccccaccaccaagacctacttcccgcacttcgacctgagccacggctctgcccaggttaagggccacggcaagaaggtggccgacgcgctgaccaacgccgtggcgcacgtggacgacatgcccaacgcgctgtccgccctgagcgacctgcacgcgcacaagcttcgggtggacccggtcaacttcaagctcctaagccactgcctgctggtgaccctggccgcccacctccccgccgagttcacccctgcggtgcacgcctccctggacaagttcctggcttctgtgagcaccgtgctgacctccaaataccgttaagctggagcctcggtggccatgcttcttgccccttgggcctccccccagcccctcctccccttcctgcacccgtacccccgtggtctttgaataaagtctgagtgggcggca

SEQ ID NO: 13432 - DNA, 605 bp, Homo sapiens
  source 1..605: mol_type = unassigned DNA
cataaaccctggcgcgctcgcgggccggcactcttctggtccccacagactcagagagaacccaccatggtgctgtctcctgccgacaagaccaacgtcaaggccgcctggggtaaggtcggcgcgcacgctggcgagtatggtgcggaggccctggagaggatgttcctgtccttccccaccaccaagacctacttcccgcacttcgacctgagccacggctctgcccaggttaagggccacggcaagaaggtggccgacgcgctgaccaacgccgtggcgcacgtggacgacatgcccaacgcgctgtccgccctgagcgacctgcacgcgcacaagcttcgggtggacccggtcaacttcaagctcctaagccactgcctgctggtgaccctggccgcccacctccccgccgagttcacccctgcggtgcacgcctccctggacaagttcctggcttctgtgagcaccgtgctgacctccaaataccgttaagctggagcctcggtagccgttcctcctgcccgctgggcctcccaacgggccctcctcccctccttgcaccggcccttcctggtctttgaataaagtctgagtgggcagca

SEQ ID NO: 13433 - DNA, 605 bp, Homo sapiens; identical to SEQ ID NO: 13432
  source 1..605: mol_type = unassigned DNA

SEQ ID NO: 13434 - DNA, 754 bp, Homo sapiens
  source 1..754: mol_type = unassigned DNA
cggctgtcatcacttagacctcaccctgtggagccacaccctagggttggccaatctactcccaggagcagggagggcaggagccagggctgggcataaaagtcagggcagagccatctattgcttacatttgcttctgacacaactgtgttcactagcaacctcaaacagacaccatggtgcatctgactcctgaggagaagtctgccgttactgccctgtggggcaaggtgaacgtggatgaagttggtggtgaggccctgggcaggctgctggtggtctacccttggacccagaggttctttgagtcctttggggatctgtccactcctgatgctgttatgggcaaccctaaggtgaaggctcatggcaagaaagtgctcggtgcctttagtgatggcctggctcacctggacaacctcaagggcacctttgccacactgagtgagctgcactgtgacaagctgcacgtggatcctgagaacttcaggctcctgggcaacgtgctggtctgtgtgctggcccatcactttggcaaagaattcaccccaccagtgcaggctgcctatcagaaagtggtggctggtgtggctaatgccctggcccacaagtatcactaagctcgctttcttgctgtccaatttctattaaaggttcctttgttccctaagtccaactactaaactgggggatattatgaagggccttgagcatctggattctgcctaataaaaaacatttattttcattgcaa

SEQ ID NO: 13435 - DNA, 502 bp, Homo sapiens
  source 1..502: mol_type = unassigned DNA
ttggaaaagcaacccctgccttgaagccaggatgatggtatctgcagcagttgccaacacaagagaaggatccatagttcatcatttaaaaaagaaaacaaaatagaaaaaggaaaactatttctgagcataagaagttgtaggaaggttttaatccaaataaggagaagatatgcttagaaccgaggtagagttttcatccattctgtcctcaacctcaaacagacaccatggtgcatctgactcctgaggagaagtctgccgttactgccctgtggggcaaggtgaacgtggatgaagttggtggtgaggccctgggcaggctgctggtggtctacccttggacccagaggttctttgagtcctttggggatctgtccactcctgatgctgttatgggcaaccctaaggtgaaggctcatggcaagaaagtgctcggtgcctttagtgatggcctggctcacctggacaacctcaagggcacctttgccacactgagtga

SEQ ID NO: 13436 - DNA, 486 bp, Homo sapiens
  source 1..486: mol_type = unassigned DNA
acactttcttctgacataacagtgttcactagcaacctcaaacagacaccatggtgcatctgactcctgaggagaagactgctgtcaatgccctgtggggcaaagtgaacgtggatgcagttggtggtgaggccctgggcagattactggtggtctacccttggacccagaggttctttgagtcctttggggatctgtcctctcctgatgctgttatgggcaaccctaaggtgaaggctcatggcaagaaggtgctaggtgcctttagtgatggcctggctcacctggacaacctcaagggcactttttctcagctgagtgagctgcactgtgacaagctgcacgtggatcctgagaacttcagggtgtgtaagaaggttcctgaggctctacagatagggagcacttgtttattttacaaagagtacatgggaaaagagaaaagcaagggaaccgtacaaggcattaatgggtgacacttctacc

SEQ ID NO: 13437 - DNA, 785 bp, Homo sapiens
  source 1..785: mol_type = unassigned DNA
atgacagaacagccaatctcagggcaagttaagggaatagtggaatgaaggttcatttttcattctcacaaactaatgaaaccctgcttatcttaaaccaacctgctcactggagcagggaggacaggaccagcataaaaggcagggcagagtcgactgttgcttacactttcttctgacataacagtgttcactagcaacctcaaacagacaccatggtgcatctgactcctgaggagaagactgctgtcaatgccctgtggggcaaagtgaacgtggatgcagttggtggtgaggccctgggcagattactggtggtctacccttggacccagaggttctttgagtcctttggggatctgtcctctcctgatgctgttatgggcaaccctaaggtgaaggctcatggcaagaaggtgctaggtgcctttagtgatggcctggctcacctggacaacctcaagggcactttttctcagctgagtgagctgcactgtgacaagctgcacgtggatcctgagaacttcaggctcttgggcaatgtgctggtgtgtgtgctggcccgcaactttggcaaggaattcaccccacaaatgcaggctgcctatcagaaggtggtggctggtgtggctaatgccctggctcacaagtaccattgagatcctggactgtttcctgataaccataagaagaccctatttccctagattctattttctgaacttgggaacacaatgcctacttcaagggtatggcttctgcctaataaagaatgttcagctcaa

SEQ ID NO: 13438 - DNA, 566 bp, Homo sapiens
  source 1..566: mol_type = unassigned DNA
attgtggcattatttgaattcagaaaagagtgaaaaactactgggatcttcattcctgggtctaattccacatttttttttaagaacacatctgtaaaaatgttctgtactagcatattcccaggaacttcgttaaatttaatctggctgaatatgggaggacaggaccagcataaaaggcagggcagagtcgactgttgcttacactttcttctgacataacagtgttcactagcaacctcaaacagacaccatggtgcatctgactcctgaggagaagactgctgtcaatgccctgtggggcaaagtgaacgtggatgcagttggtggtgaggccctgggcagattactggtggtctacccttggacccagaggttctttgagtcctttggggatctgtcctctcctgatgctgttatgggcaaccctaaggtgaaggctcatggcaagaaggtgctaggtgcctttagtgatggcctggctcacctggacaacctcaagggcactttttctcagctgagtgagctgcactgtgacaagctgcacgtggatcctgagaacttca

SEQ ID NO: 13439 - DNA, 827 bp, Homo sapiens
  source 1..827: mol_type = unassigned DNA
agatagatgaggagccaacaaaaaagagcctcaggatccagcacacattatcacaaacttagtgtccatccatcactgctgaccctctccggacctgactccacccctgagggacacaggtcagccttgaccaatgacttttaagtaccatggagaacagggggccagaacttcggcagtaaagaataaaaggccagacagagaggcagcagcacatatctgcttccgacacagctgcaatcactagcaagctctcaggcctggcatcatggtgcattttactgctgaggagaaggctgccgtcactagcctgtggagcaagatgaatgtggaagaggctggaggtgaagccttgggcagactcctcgttgtttacccctggacccagagattttttgacagctttggaaacctgtcgtctccctctgccatcctgggcaaccccaaggtcaaggcccatggcaagaaggtgctgacttcctttggagatgctattaaaaacatggacaacctcaagcccgcctttgctaagctgagtgagctgcactgtgacaagctgcatgtggatcctgagaacttcaagctcctgggtaacgtgatggtgattattctggctactcactttggcaaggagttcacccctgaagtgcaggctgcctggcagaagctggtgtctgctgtcgccattgccctggcccataagtaccactgagttctcttccagtttgcaggtgttcctgtgaccctgacaccctccttctgcacatggggactgggcttggccttgagagaaagccttctgtttaataaagtacattttcttcagt

SEQ ID NO: 13440 - DNA, 906 bp, Homo sapiens
  source 1..906: mol_type = unassigned DNA
gccatggttgtgaggcctccccagctatgtggaactagacttcaagaagttaagcaacttgctcaagatcatctaagaaatagatgaggagccaacaaaaaagagcctcaggatccagcacacattatcacaaacttagtgtccatccatcactgctgaccctctccggacctgactccacccctgagggacacaggtcagccttgaccaatgacttttaagtaccatggagaacagggggccagaacttcggcagtaaagaataaaaggccagacagagaggcagcagcacatatctgcttccgacacagctgcaatcactagcaagctctcaggcctggcatcatggtgcattttactgctgaggagaaggctgccgtcactagcctgtggagcaagatgaatgtggaagaggctggaggtgaagccttgggcagactcctcgttgtttacccctggacccagagattttttgacagctttggaaacctgtcgtctccctctgccatcctgggcaaccccaaggtcaaggcccatggcaagaaggtgctgacttcctttggagatgctattaaaaacatggacaacctcaagcccgcctttgctaagctgagtgagctgcactgtgacaagctgcatgtggatcctgagaacttcaagctcctgggtaacgtgatggtgattattctggctactcactttggcaaggagttcacccctgaagtgcaggctgcctggcagaagctggtgtctgctgtcgccattgccctggcccataagtaccactgagttctcttccagtttgcaggtgttcctgtgaccctgacaccctccttctgcacatggggactgggcttggccttgagagaaagccttctgtttaataaagtacattttcttcagtaa

SEQ ID NO: 13441 - DNA, 578 bp, Homo sapiens
  source 1..578: mol_type = unassigned DNA
cttgcttctcctggccatggttgtgaggcctccccagctatgtggaactatagatgaggagccaacaaaaaagagcctcaggatccagcacacattatcacaaacttagtgtccatccatcactgctgaccctctccggacctgactccacccctgagggacacaggtcagccttgaccaatgacttttaagtaccatggagaacagggggccagaacttcggcagtaaagaataaaaggccagacagagaggcagcagcacatatctgcttccgacacagctgcaatcactagcaagctctcaggcctggcatcatggtgcattttactgctgaggagaaggctgccgtcactagcctgtggagcaagatgaatgtggaagaggctggaggtgaagccttgggcagactcctcgttgtttacccctggacccagagattttttgacagctttggaaacctgtcgtctccctctgccatcctgggcaaccccaaggtcaaggcccatggcaagaaggtgctgacttcctttggagatgctattaaaaacatggacaacctcaagcccgcctttgctaa

SEQ ID NO: 13442 - DNA, 808 bp, Homo sapiens
  source 1..808: mol_type = unassigned DNA
gaagaataaaaggaagcacccttcagcagttccacacactcgcttctggaacgtctgaggttatcaataagctcctagtccagacgccatgggtcatttcacagaggaggacaaggctactatcacaagcctgtggggcaaggtgaatgtggaagatgctggaggagaaaccctgggaaggctcctggttgtctacccatggacccagaggttctttgacagctttggcaacctgtcctctgcctctgccatcatgggcaaccccaaagtcaaggcacatggcaagaaggtgctgacttccttgggagatgccacaaagcacctggatgatctcaagggcacctttgcccagctgagtgaactgcactgtgacaagctgcatgtggatcctgagaacttcaagctcctgggaaatgtgctggtgaccgttttggcaatccatttcggcaaagaattcacccctgaggtgcaggcttcctggcagaagatggtgactgcagtggccagtgccctgtcctccagataccactgagctcactgcccatgattcagagctttcaaggataggctttattctgcaagcaatacaaataataaatctattctgctgagagatcacacatgattttcttcagctcttttttttacatctttttaaatatatgagccacaaagggtttatattgagggaagtgtgtatgtgtatttctgcatgcctgtttgtgtttgtggtgtgtgcatgctcctcatttatttttatatgagatgtgcattttgatgagcaaataaaagcagtaaagacacttgt

SEQ ID NO: 13443 - DNA, 602 bp, Homo sapiens
  source 1..602: mol_type = unassigned DNA
ataaaaggaagcacccttcagcagttccacacactcgcttctggaacgtctgaggttatcaataagctcctagtccagacgccatgggtcatttcacagaggaggacaaggctactatcacaagcctgtggggcaaggtgaatgtggaagatgctggaggagaaaccctgggaaggctcctggttgtctacccatggacccagaggttctttgacagctttggcaacctgtcctctgcctctgccatcatgggcaaccccaaagtcaaggcacatggcaagaaggtgctgacttccttgggagatgccataaagcacctggatgatctcaagggcacctttgcccagctgagtgaactgcactgtgacaagctgcatgtggatcctgagaacttcaagctcctgggaaatgtgctggtgaccgttttggcaatccatttcggcaaagaattcacccctgaggtgcaggcttcctggcagaagatggtgactggagtggccagtgccctgtcctccagataccactgagctcactgcccatgatgcagagctttcaaggataggctttattctgcaagcaatcaaataataaatctattctgc

SEQ ID NO: 13444 - DNA, 560 bp, Homo sapiens
  source 1..560: mol_type = unassigned DNA
ataaaaggaagcacccttcagcagttccacacactcgcttctggaacgtctgaggttatcaataagctcctagtccagacgccatgggtcatttcacagaggaggacaaggctactatcacaagcctgtggggcaaggtgaatgtggaagatgctggaggagaaaccctgggaaggctcctggttgtctacccatggacccagaggttctttgacagctttggcaacctgtcctctgcctctgccatcatgggcaaccccaaagtcaaggcacatggcaagaaggtgctgacttccttgggagatgccataaagcacctggatgatctcaagggcacctttgcccagctgagtgaactgcactgtgacaagctgcatgtggatcctgagaacttcaagctcctgggaaatgtgctggtgaccgttttggcaatccatttcggcaaagaattcacccctgaggtgcaggcttcctggcagaagatggactggagtggccagtgccctgtcctccagataccactgagctcactgcccatgatgcagagctttcaaggatag

SEQ ID NO: 13445 - DNA, 694 bp, Homo sapiens
  source 1..694: mol_type = unassigned DNA
ggccatggttgtgaggcctccccagctatgtggaactgtaagtccggtaaacctctttcttttataaattgcccagtctcgggtatatcttcattagcagcgtgaaaacggacaaatacagcttcagtttcccctcactccactccccattaggggatagtttttgtccagattaaagaaaaacctattgtttatggtggtgctaggggaaatgaagaggaaagtcttgcctctccattttcttccgttcatgaggctcctggttgtctacccatggacccagaggttctttgacagctttggcaacctgtcctctgcctctgccatcatgggcaaccccaaagtcaaggcacatggcaagaaggtgctgacttccttgggagatgccataaagcacctggatgatctcaagggcacctttgcccagctgagtgaactgcactgtgacaagctgcatgtggatcctgagaacttcaagctcctgggaaatgtgctggtgaccgttttggcaatccatttcggcaaagaattcacccctgaggtgcaggcttcctggcagaagatggtgactggagtggccagtgccctgtcctccagataccactgagctcactgcccatgatgcagagctttcaaggataggctttattctgcaagcaatcaaataataaatctattctgctaagagatcaca

SEQ ID NO: 13446 - DNA, 1772 bp, Homo sapiens
  source 1..1772: mol_type = unassigned DNA
gaatgtatccagagaatcaacatacaatgagcaaaagtgaagcttttcctagacttgaccctcatcaaatctcctctgtccccactctcttctgaagaaggaaaggctggagtacaatggcgagatcttggctcactgcaacctccacctcctgggttcaactgattctcctgcctcagcctcccgagtagctgggactacaggcatccgccaccacacccggctaatttttgcatttttttagtagagacacagtttcaccacattggccaggctggtcttgaactcctgatctctggtgatcttcctgccttgtcctccctaagtgctgggattacaagcgtgaaccaccgcgcctggtctgatgaatacatgtaaagcttattgagcctcagaactctaactacagggtttcaatagcacagaaactctgagaagaaaaagaatgtcaaagttcctccctaaggagactgattagatgcaagtgtgtccggaattggtgggttcttggtctgacttcaagaatgaagccgcggaccctcacggtgagtattacagttcttgaagactgcgtgtccagagtttgttccttctgatgttcagatgtgtttggagttttttccttctggtgggttcgtggtctcgctagctcaggagtgaagctgcataccttcgcgtcctaggacagaatatggatgctgaaaaatgattctttcaaagtgctgagttgttgcctcacgcccagttgtctggcatctcttcactgaaactattacagttagatctcatctctatgggtggaaggcctcactggagctacagacaagaaggtgaaaaacggctgacaaaagaagtcctggtatcttctatggtgggagaagaaaactagctaaagggaagaataaattagagaaaaattggaatgactgaatcggaacaaggcaaaggctataaaaaaaattaagcagcagtatcctcttgggggccccttccccacactatctcaatgcaaatatctgtctgaaacggtccctggctaaactccacccatgggttggccagccttgccttgaccaatagccttgacaaggcaaacttgaccaatagtcttagagtatccagtgaggccaggggccggcggctggctagggatgaagaataaaaggaagcacccttcagcagttccacacactcgcttctggaacgtctgaggttatcaataagctcctagtccagacgccatgggtcatttcacagaggaggacaaggctactatcacaagcctgtggggcaaggtgaatgtggaagatgctggaggagaaaccctgggaaggctcctggttgtctacccatggacccagaggttctttgacagctttggcaacctgtcctctgcctctgccatcatgggcaaccccaaagtcaaggcacatggcaagaaggtgctgacttccttgggagatgccataaagcacctggatgatctcaagggcacctttgcccagctgagtgaactgcactgtgacaagctgcatgtggatcctgagaacttcaagctcctgggaaatgtgctggtgaccgttttggcaatccatttcggcaaagaattcacccctgaggtgcaggcttcctggcagaagatggtgactggagtggccagtgccctgtcctccagataccactgagctcactgcccatgatgcagagctttcaaggataggctttattctgcaagcaatcaaataataaatctattctgctaagagatcaca

SEQ ID NO: 13447 - DNA, 506 bp, Homo sapiens
  source 1..506: mol_type = unassigned DNA
agagcacgtcaggcggcgccatgctcagcgcccaggagcgcgcccaaatcgcgcaggtctgggacctgattgcgggccacgaggcgcaattcggggcggagctgctgctcaggctcttcacggtgtaccccagcaccaaggtctacttcccgcacctgagcgcctgccaggacgcgacgcagctgctgagccacgggcagcgcatgctggcggctgtgggcgcggcggtgcagcacgtggacaacctgcgcgccgcgctgagcccgctggcggacctgcacgcgctcgtgctgcgcgtggacccagccaactttccgctgctaatccagtgtttccacgtcgtgctggcctcccacctgcaggacgagttcaccgtgcaaatgcaagcggcgtgggacaagttcctgactggtgtggccgtggtgctgaccgaaaaataccgctgagccctgtgctgcgcaggccttggtctgtgcctgtcaataaacagaggcccgaaccatctg

SEQ ID NO: 13448 - DNA, 536 bp, Homo sapiens
  source 1..536: mol_type = unassigned DNA
ggggtcgcagggcgcggcgggttccagcgcggggatggcgctgtccgcggaggaccgggcgctggtgcgcgccctgtggaagaagctgggcagcaacgtcggcgtctacacgacagaggccctggaaaggaccttcctggctttccccgccacgaagacctacttctcccacctggacctgagccccggctcctcacaagtcagagcccacggccagaaggtggcggacgcgctgagcctcgccgtggagcgcctggacgacctaccccacgcgctgtccgcgctgagccacctgcacgcgtgccagctgcgagtggacccggccagcttccagctcctgggccactgcctgctggtaaccctcgcccggcactaccccggagacttcagccccgcgctgcaggcgtcgctggacaagttcctgagccacgttatctcggcgctggtttccgagtaccgctgaactgtgggtgggtggccgcgggatccccaggcgaccttccccgtgtttgagtaaagcctctcccaggagcagc

SEQ ID NO: 13449 - DNA, 755 bp, Homo sapiens
  source 1..755: mol_type = unassigned DNA
ggagtgatagcccccaaaccccagtcccaccaggccctgagggcccctttgtcactggatctgataagaaacaccacccctgcagccccctcccctcacctgaccaatggccacagcctggctgggcccagctccctgtatataaggggaccctgggggctgagcactaccaaggccagtcctgagcaggcccaactccagtgcagctgcccaccctgccgccatgtctctgaccaagactgagaggaccatcattgtgtccatgtgggccaagatctccacgcaggccgacaccatcggcaccgagactctggagaggctcttcctcagccacccgcagaccaagacctacttcccgcacttcgacctgcacccggggtccgcgcagttgcgcgcgcacggctccaaggtggtggccgccgtgggcgacgcggtgaagagcatcgacgacatcggcggcgccctgtccaagctgagcgagctgcacgcctacatcctgcgcgtggacccggtcaacttcaagctcctgtcccactgcctgctggtcaccctggccgcgcgcttccccgccgacttcacggccgaggcccacgccgcctgggacaagttcctatcggtcgtatcctctgtcctgaccgagaagtaccgctgagcgccgcctccgggacccccaggacaggctgcggcccctcccccgtcctggaggttccccagccccacttaccgcgtaatgcgccaataaaccaatgaacgaa

SEQ ID NO: 13450 - DNA, 1652 bp, Homo sapiens
  source 1..1652: mol_type = unassigned DNA
cattcccagtagagttggaggtgggggtggtgctgctgccaactctatatagggagttcaactggtcacccagagctgtcctgtggcctctgcagctcagcatggctagggtactgggagcacccgttgcactggggttgtggagcctatgctggtctctggccattgccacccctcttcctccgactagtgcccatgggaatgttgctgaaggcgagaccaagccagacccagacgtgactgaacgctgctcagatggctggagctttgatgctaccaccctggatgacaatggaaccatgctgttttttaaaggggagtttgtgtggaagagtcacaaatgggaccgggagttaatctcagagagatggaagaatttccccagccctgtggatgctgcattccgtcaaggtcacaacagtgtctttctgatcaagggggacaaagtctgggtataccctcctgaaaagaaggagaaaggatacccaaagttgctccaagatgaatttcctggaatcccatccccactggatgcagctgtggaatgtcaccgtggagaatgtcaagctgaaggcgtcctcttcttccaaggtgaccgcgagtggttctgggacttggctacgggaaccatgaaggagcgttcctggccagctgttgggaactgctcctctgccctgagatggctgggccgctactactgcttccagggtaaccaattcctgcgcttcgaccctgtcaggggagaggtgcctcccaggtacccgcgggatgtccgagactacttcatgccctgccctggcagaggccatggacacaggaatgggactggccatgggaacagtacccaccatggccctgagtatatgcgctgtagcccacatctagtcttgtctgcactgacgtctgacaaccatggtgccacctatgccttcagtgggacccactactggcgtctggacaccagccgggatggctggcatagctggcccattgctcatcagtggccccagggtccttcagcagtggatgctgccttttcctgggaagaaaaactctatctggtccagggcacccaggtatatgtcttcctgacaaagggaggctataccctagtaagcggttatccgaagcggctggagaaggaagtcgggacccctcatgggattatcctggactctgtggatgcggcctttatctgccctgggtcttctcggctccatatcatggcaggacggcggctgtggtggctggacctgaagtcaggagcccaagccacgtggacagagcttccttggccccatgagaaggtagacggagccttgtgtatggaaaagtcccttggccctaactcatgttccgccaatggtcccggcttgtacctcatccatggtcccaatttgtactgctacagtgatgtggagaaactgaatgcagccaaggcccttccgcaaccccagaatgtgaccagtctcctgggctgcactcactgaggggccttctgacatgagtctggcctggccccacctcctagttcctcataataaagacagattgcttcttcgcttctcactgaggggccttctgacatgagtctggcctggccccacctccccagtttctcataataaagacagattgcttcttcacttgaa

SEQ ID NO: 13451 - DNA, 826 bp, Homo sapiens
  source 1..826: mol_type = unassigned DNA
aactctatatagggagttcaactggtcacccagagctgtcctgtggcctctgcagctcagcatggctagggtactgggagcacccgttgcactggggttgtggagcctatgctggtctctggccattgccacccctcttcctccgactagtgcccatgggaatgttgctgaaggcgagaccaagccagacccagacgtgactgaacgctgctcagatggctggagctttgatgctaccaccctggatgacaatggaaccatgctgttttttaaaggggagtttgtgtggaagagtcacaaatgggaccgggagttaatctcagagagatggaagaatttccccagccctgtggatgctgcattccgtcaaggtcacaacagtgtctttctgatcaagggggacaaagtctgggtataccctcctgaaaagaaggagaaaggatacccaaagttgctccaagatgaatttcctggaatcccatccccactggatgcagctgtggaatgtcaccgtggagaatgtcaagctgaaggcgtcctcttcttccaaggtgaccgcgagtggttctgggacttggctacgggaaccatgaaggagcgttcctggccagctgttgggaactgctcctctgccctgagatggctgggccgctactactgcttccagggtaaccaattcctgcgcttcgaccctgtcaggggagaggtgcctcccaggtacccgcgggatgtccgagactacttcatgccctgccctggcagaggccatggacacaggaatgggactggccatgggaacagtatatgcgctgtagcccacatctag

SEQ ID NO: 13452 - DNA, 2122 bp, Homo sapiens
  source 1..2122: mol_type = unassigned DNA
gaatagtcagtacctagaagccactcttctttgaaaaggattatcacctgatcaggttctctctgcatttgcccctttagattgtgaaatgtggctcaaggtcttcacaactttcctttcctttgcaacaggtgcttgctcggggctgaaggtgacagtgccatcacacactgtccatggcgtcagaggtcaggccctctacctacccgtccactatggcttccacactccagcatcagacatccagatcatatggctatttgagagaccccacacaatgcccaaatacttactgggctctgtgaataagtctgtggttcctgacttggaataccaacacaagttcaccatgatgccacccaatgcatctctgcttatcaacccactgcagttccctgatgaaggcaattacatcgtgaaggtcaacattcagggaaatggaactctatctgccagtcagaagatacaagtcacggttgatgatcctgtcacaaagccagtggtgcagattcatcctccctctggggctgtggagtatgtggggaacatgaccctgacatgccatgtggaagggggcactcggctagcttaccaatggctaaaaaatgggagacctgtccacaccagctccacctactccttttctccccaaaacaatacccttcatattgctccagtaaccaaggaagacattgggaattacagctgcctggtgaggaaccctgtcagtgaaatggaaagtgatatcattatgcccatcatatattatggaccttatggacttcaagtgaattctgataaagggctaaaagtaggggaagtgtttactgttgaccttggagaggccatcctatttgattgttctgctgattctcatccccccaacacctactcctggattaggaggactgacaatactacatatatcattaagcatgggcctcgcttagaagttgcatctgagaaagtagcccagaagacaatggactatgtgtgctgtgcttacaacaacataaccggcaggcaagatgaaactcatttcacagttatcatcacttccgtaggactggagaagcttgcacagaaaggaaaatcattgtcacctttagcaagtataactggaatatcactatttttgattatatccatgtgtcttctcttcctatggaaaaaatatcaaccctacaaagttataaaacagaaactagaaggcaggccagaaacagaatacaggaaagctcaaacattttcaggccatgaagatgctctggatgacttcggaatatatgaatttgttgcttttccagatgtttctggtgtttccaggatcccaagcaggtctgttccagcctctgattgtgtatcggggcaagatttgcacagtacagtgtatgaagttattcagcacatccctgcccagcagcaagaccatccagagtgaactttcatgggctaaacagtacattcgagtgaaattctgaagaaacattttaaggaaaaacagtggaaaagtatattaatctggaatcagtgaagaaaccaagaccaacacctcttactcattattcctttacatgcagaatagaggcatttatgcaaattgaactgcaggtttttcagcatatacacaatgtcttgtgcaacagaaaaacatgttggggaaatattcctcagtggagagtcgttctcatgctgacggggagaacgaaagtgacaggggtttcctcataagttttgtatgaaatatctctacaaacctcaattagttctactctacactttcactatcatcaacactgagactatcctgtctcacctacaaatgtggaaactttacattgttcgatttttcagcagactttgttttattaaatttttattagtgttaagaatgctaaatttatgtttcaattttatttccaaatttctatcttgttatttgtacaacaaagtaataaggatggttgtcacaaaaacaaaactatgccttctcttttttttcaatcaccagtagtatttttgagaagacttgtgaacacttaaggaaatgactattaaagtcttatttttatttttttcaaggaaagatggattcaaataaattattctgtttttgctttta

SEQ ID NO: 13453 - DNA, 2148 bp, Homo sapiens
  source 1..2148: mol_type = unassigned DNA
acctcactgctaatttccctagcaaataaaccagcagctgctggtccaagttaccactgagaacagggcactgcatgcatgggacaggatgctttcatggagcccttcggtgacacacttggggtctttcagtgcaaaatatacctccttctcttcggtgcttgctcggggctgaaggtgacagtgccatcacacactgtccatggcgtcagaggtcaggccctctacctacccgtccactatggcttccacactccagcatcagacatccagatcatatggctatttgagagaccccacacaatgcccaaatacttactgggctctgtgaataagtctgtggttcctgacttggaataccaacacaagttcaccatgatgccacccaatgcatctctgcttatcaacccactgcagttccctgatgaaggcaattacatcgtgaaggtcaacattcagggaaatggaactctatctgccagtcagaagatacaagtcacggttgatgatcctgtcacaaagccagtggtgcagattcatcctccctctggggctgtggagtatgtggggaacatgaccctgacatgccatgtggaagggggcactcggctagcttaccaatggctaaaaaatgggagacctgtccacaccagctccacctactccttttctccccaaaacaatacccttcatattgctccagtaaccaaggaagacattgggaattacagctgcctggtgaggaaccctgtcagtgaaatggaaagtgatatcattatgcccatcatatattatggaccttatggacttcaagtgaattctgataaagggctaaaagtaggggaagtgtttactgttgaccttggagaggccatcctatttgattgttctgctgattctcatccccccaacacctactcctggattaggaggactgacaatactacatatatcattaagcatgggcctcgcttagaagttgcatctgagaaagtagcccagaagacaatggactatgtgtgctgtgcttacaacaacataaccggcaggcaagatgaaactcatttcacagttatcatcacttccgtaggactggagaagcttgcacagaaaggaaaatcattgtcacctttagcaagtataactggaatatcactatttttgattatatccatgtgtcttctcttcctatggaaaaaatatcaaccctacaaagttataaaacagaaactagaaggcaggccagaaacagaatacaggaaagctcaaacattttcaggccatgaagatgctctggatgacttcggaatatatgaatttgttgcttttccagatgtttctggtgtttccaggatcccaagcaggtctgttccagcctctgattgtgtatcggggcaagatttgcacagtacagtgtatgaagttattcagcacatccctgcccagcagcaagaccatccagagtgaactttcatgggctaaacagtacattcgagtgaaattctgaagaaacattttaaggaaaaacagtggaaaagtatattaatctggaatcagtgaagaaaccaagaccaacacctcttactcattattcctttacatgcagaatagaggcatttatgcaaattgaactgcaggtttttcagcatatacacaatgtcttgtgcaacagaaaaacatgttggggaaatattcctcagtggagagtcgttctcatgctgacggggagaacgaaagtgacaggggtttcctcataagttttgtatgaaatatctctacaaacctcaattagttctactctacactttcactatcatcaacactgagactatcctgtctcacctacaaatgtggaaactttacattgttcgatttttcagcagactttgttttattaaatttttattagtgttaagaatgctaaatttatgtttcaattttatttccaaatttctatcttgttatttgtacaacaaagtaataaggatggttgtcacaaaaacaaaactatgccttctcttttttttcaatcaccagtagtatttttgagaagacttgtgaacacttaaggaaatgactattaaagtcttatttttatttttttcaaggaaagatggattcaaataaattattctgtttttgctttta

SEQ ID NO: 13454 - DNA, 2314 bp, Homo sapiens
  source 1..2314: mol_type = unassigned DNA
gccagatcgcggccggcgccagcgccaccgtccggtccacccgccagcccgcacagccgcgccgccgccgagcgtttcgtgagcggcgctccgaggatcaggaatggggcttcgggcgctgggcgcgctccgaacccggcgcacgtaagagcctgggagcgcccgagccgcccggctgcccggagccccatcgcctaggaccgggagatgctggaaatgcaaccgcctgttccccgaggagccgctgcccccgggaccccctggcactgtgcgcaccctggtcagcagcccccggagaagacggcgcccccaacgcccgacccgcgtggccgtggcagcgccacgcgagccctctaggcgaccgcagggccacagcagctcagccgccggtgccccctcggaaaccatgacccccggcgcgggcccatggagccatggcctatagggtcctgggccgcgcggggccacctcagccgcggagggcgcgcaggctgctcttcgccttcacgctctcgctctcctgcacttacctgtgttacagcttcctgtgctgctgcgacgacctgggtcggagccgcctcctcggcgcgcctcgctgcctccgcggccccagcgcgggcggccagaaacttctccagaagtcccgcccctgtgatccctccgggccgacgcccagcgagcccagcgctcccagcgcgcccgccgccgccgtgcccgcccctcgcctctccggttccaaccactccggctcacccaagctgggtaccaagcggttgccccaagccctcattgtgggcgtgaagaaggggggcacccgggccgtgctggagtttatccgagtacacccggacgtgcgggccttgggcacggaaccccacttctttgacaggaactacggccgcgggctggattggtacaggagcctgatgcccaggaccctcgagagccagatcacgctggagaagacgcccagctactttgtcactcaagaggctcctcgacgcatcttcaacatgtcccgagacaccaagctgatcgtggttgtgcggaaccctgtgacccgtgccatctctgattacacgcagacactctccaagaagcccgacatcccgacctttgagggcctctccttccgcaaccgcaccctgggcctggtggacgtgtcatggaacgccatccgcatcggcatgtacgtgctgcacctggagagctggctgcagtacttcccgctagctcagattcacttcgtcagtggcgagcgactcatcactgacccggccggcgagatggggcgagtccaggacttcctgggcattaagagattcatcacggacaagcacttctatttcaacaagaccaaaggattcccttgcttgaaaaaaacagaatcgagcctcctgcctcgatgcttgggcaaatcaaaagggagaactcatgtacagattgatcctgaagtgatagaccagctccgagaattttatagaccgtataatatcaaattttatgaaaccgttgggcaggacttcaggtgggaataagcccacgaaaggaaagggctctcaagggctcttctgctcatctcttccgtgagatttgctcccagaccctctgatctccctccaacaaaccctggctccagccccctttcccaacttgagttgcatcatcttggaaccaggaagcccagctaaagccaagagaccagagagtccctgccactagttttcatcagtctgttcaagcaaagttgatctgctcctggcacgtccagtaaattccagaatcattctcctttctgcccataaagggccttggagaattgctttaagaagagtgaatgttccaatgatgatagatattataagcgatgatggttctgttgctatgaacacagcagtcggtccctgtcattgtccacccaggagtggccttgttaattccaagtggcatgtatcttccctctgagcttcatttcttcaagatgctctgggtggtgggatgggagaccatcctcagccctcctcagaccttatcaattcattgagagattgcaaagctgaaagcacctccggccactcctgggagacagaccctttggtgatgaaataaaccagtgacttcagagcctatggtctcaactgtgcttgaaaaacactgtctctgaaaacaactttgtgattctccctgctccctgtggacaaaagcacataattctgctgttacgggtactttgctcatacgagctttcatgttcagcatgcaatggaatcatgcttgtccatgtgaaataaatatggctctctcgtgtccttaa

SEQ ID NO: 13455 - DNA, 2724 bp, Homo sapiens
  source 1..2724: mol_type = unassigned DNA
gccagatcgcggccggcgccagcgccaccgtccggtccacccgccagcccgcacagccgcgccgccgccgagcgtttcgtgagcggcgctccgaggatcaggaatggggcttcgggcgctgggcgcgctccgaacccggcgcacgtaagagcctgggagcgcccgagccgcccggctgcccggagccccatcgcctaggaccgggagatgctggaaatgcaaccgcctgttccccgaggagccgctgcccccgggaccccctggcactgtgcgcaccctggtcagcagcccccggagaagacggcgcccccaacgcccgacccgcgtggccgtggcagcgccacgcgagccctctaggcgaccgcagggccacagcagctcagccgccggtgccccctcggaaaccatgacccccggcgcgggcccatggagccatggcctatagggtcctgggccgcgcggggccacctcagccgcggagggcgcgcaggctgctcttcgccttcacgctctcgctctcctgcacttacctgtgttacagcttcctgtgctgctgcgacgacctgggtcggagccgcctcctcggcgcgcctcgctgcctccgcggccccagcgcgggcggccagaaacttctccagaagtcccgcccctgtgatccctccgggccgacgcccagcgagcccagcgctcccagcgcgcccgccgccgccgtgcccgcccctcgcctctccggttccaaccactccggctcacccaagctgggtaccaagcggttgccccaagccctcattgtgggcgtgaagaaggggggcacccgggccgtgctggagtttatccgagtacacccggacgtgcgggccttgggcacggaaccccacttctttgacaggaactacggccgcgggctggattggtacaggagcctgatgcccaggaccctcgagagccagatcacgctggagaagacgcccagctactttgtcactcaagaggctcctcgacgcatcttcaacatgtcccgagacaccaagctgatcgtggttgtgcggaaccctgtgacccgtgccatctctgattacacgcagacactctccaagaagcccgacatcccgacctttgagggcctctccttccgcaaccgcaccctgggcctggtggacgtgtcatggaacgccatccgcatcggcatgtacgtgctgcacctggagagctggctgcagtacttcccgctagctcagattcacttcgtcagtggcgagcgactcatcactgacccggccggcgagatggggcgagtccaggacttcctgggcattaagagattcatcacggacaagcacttctatttcaacaagaccaaaggattcccttgcttgaaaaacagaatcgagcctcctgcctcgatgcttgggcaaatcaaaagggagaactcatgtacagattgatcctgaagtgatagaccagctccgagaattttatagaccgtataatatcaaattttatgaaaccgttgggcaggacttcaggtgggaataagcccacgaaaggaaagggctctcaagggctcttctgctcatctcttccgtgagatttgctcccagaccctctgatctccctccaacaaaccctggctccagccccctttcccaacttgagttgcatcatcttggaaccaggaagcccagctaaagccaagagaccagagagtccctgccactagttttcatcagtctgttcaagcaaagttgatctgctcctggcacgtccagtaaattccagaatcattctcctttctgcccataaagggccttggagaattgctttaagaagagtgaatgttccaatgatgatagatattataagcgatgatggttctgttgctatgaacacagcagtcggtccctgtcattgtccacccaggagtggccttgttaattccaagtggcatgtatcttccctctgagcttcatttcttcaagatgctctgggtggtgggatgggagaccatcctcagccctcctcagaccttatcaattcattgagagattgcaaagctgaaagcacctccggccactcctgggagacagaccctttggtgatgaaataaaccagtgacttcagagcctatggtctcaactgtgcttgaaaaacactgtctctgaaaacaactttgtgattctccctgctccctgtggacaaaagcacataattctgctgttacgggtactttgctcatacgagctttcatgttcagcatgcaatggaatcatgcttgtccatgtgaaataaatatggctctctcgtgtccttaatgctgggcttttctctgtaagctggttctgcagcacaattcattaattaaacttctcccagtgcaagaaggcagctggtgctgggggtggtctggggggtcagggaggagggcaaggactacatggggcagaggcaaggcggtggtggagatgaggaaagaagttcttcttggcagaagctggggcagaaagatcacatgagatctgtggggacaccctctatctgaaacataagtctgtgttcattctctgcttagaaattttagatctgaagtgctacactgaaggtccgaaggttgatggggcatcagatatctttttggttggccagcatgatattttgaaataactgtcaacagttagaaactgggagcattcatatgtaaaaaatatggattttcagcttcttctt

SEQ ID NO: 13456 - DNA, 2527 bp, Homo sapiens
  source 1..2527: mol_type = unassigned DNA
cagcggcggcccaggaggcagccggtgagcgcctgcgagcagagtggcgggggccgctgacaggtcccgcgcagcccagcccagcccagccacgcggctcacaggtggggtccaagagcagtttggagcaacccggcgctacggagaggggtggacggctctgcacgggcctcctgtctcccgctcgggcagagggactcggggggacctcgctccttggctgagagaacctgaactcgggcggagagaacgcgcccaggcgggcaaggggaccagagaaagccggggctggaagtcactgtcgctcgccactgtctggagcgcacggagcgcagaggcccggcagccgcgcgtgccctcacggggaccgagccagtgatgcaggatcgctgagcggagatccgcgccgagaagtctctcggggccggggctgagacgcacgccttcgacaccgctgccaagaccccgattccggcgactcttgcggggaaccgaggggccaaggctgccccaagctcaggacttgggcgagtctaagacgatggtttcttaagcacggacccgcgttccccttcccgctccctcgactggaggcagggatcctgcgcggggcccccgggattccgtttccccgcggagccccggccgctgcctcccgggacagttcgcacggccacaggggcgcacggcgatgtggcctccgtccagcgcgctggcccgccggggggatgctctggcacctgtcggggtccaggcctagcatggccggcgcgttgcccgacgtcgcctccggctaggatggcccctccgggcccggccagtgccctctccacctcggccgagccgctgtcccgcagcatcttccggaagttcttgctgatgctctgctccctgctcacgtccctttacgtcttctactgcctggccgagcgctgccagaccctgtccggccccgtcgtggggctgtccggcggcggcgaggaggcgggggcccctggtggcggcgtcctggccggaggcccgagggagctggcggtgtggccggcggcggcacagagaaagcgcctcctgcaactgccgcagtggcggaggcgccggccgcccgcgccccgcgacgacggcgaggaggcggcctgggaagaagagtcccctggcctgtcagggggtccgggcggctccggggccggaagcaccgtggccgaggccccgccggggaccctggcgctgctcctggacgaaggcagcaagcagctgccgcaggccatcatcatcggagtgaagaagggcggcacgcgggcgctgctggagttcctgcgcgtgcaccccgacgtgcgcgccgtgggcgccgagccccacttcttcgaccgcagctacgacaagggcctcgcctggtaccgggacctgatgcccagaaccctggacgggcagatcaccatggagaagacgcccagttacttcgtcacgcgggaggcccccgcgcgcatctcggccatgtccaaggacaccaagctcatcgtggtggtgcgggacccggtgaccagggccatctcggactacacgcagacgctgtccaagcggcccgacatccccaccttcgagagcttgacgttcaaaaacaggacagcgggcctcatcgacacgtcgtggagcgccatccagatcggcatctacgccaagcacctggagcactggctgcgccacttccccatccgccagatgctcttcgtgagcggcgagcggctcatcagcgacccggccggggagctgggccgcgtgcaagacttcctgggcctcaagaggatcatcacggacaagcacttctacttcaacaagaccaagggcttcccctgcctgaagaaggcggagggcagcagccggccccattgcctgggcaagaccaagggcaggacccatcctgagatcgaccgcgaggtggtgcgcaggctgcgcgagttctaccggcctttcaacctcaagttctaccagatgaccgggcacgactttggctgggatggataaccatataatttaaaaagaaaaaaaaaatcaaaatataatatatttttttaccaatcggtagagaagagacagtttaatatttgtgctgaaaatatgtttcagtatttttttcaatgaatgttaagagattgttctcactcccgccccatcttaatgtataaccaacaccaaacacgtggatcaacagaaaaggaaaatttcactcgtctaaacactttcaattttcagtttttattttatgttctatatacccagtcataaagtataagcatcagttgtcattaaaagttttcagaaaatcttgaggttaaacatctctctctctttttttaaaatacaaggccctgataaaattgatatctatccttatatttttctccctttttcccgtgccactttttcttaaattatttcccagttagtattatcatatgtttgtacccgtcacagttttcatagtgctttcaaatacacctttttgatcattaaaataaaaaaataaatcttg

SEQ ID NO: 13457 - DNA, 5367 bp, Homo sapiens
  source 1..5367: mol_type = unassigned DNA
agttcgcctctgcagcctctgcggggaagtgccggggctgctcgaggctcagttcttaggactgcaaggaggcagccccggcgtgcggcggtgcgcacagtctagagtggccagggcgcgagagtgcaacgtcctcctggccccgagcgcgtcgtcgcgccccgggagcagaccctcgcccagcagttaccgccgtcccgactttccgttccagttgcagctcctgccgggcaacatgtcaagagccgccgccgctacagctgccgccgccacctggggaagagcagcagcagcagcggcggccgcgggcacacgggggcaataaaccgagccacccgggcgtccagcgtgccggggaaccctctctgcgctcactgcccggcgggacccacgccatgtgctgagccatgtccctggccgcgcccgcgggcagcgcatggggcagcgcctgagtggcggcagatcttgcctcgatgtccccggccggctcctaccgcagccgccgccgcccccgccgccggtgaggaggaagctcgcgctgctcttcgccatgctctgcgtctggctctatatgttcctgtactcgtgcgccggctcctgcgccgccgcgccggggctgctgctcctgggctctgggtcccgcgccgcacacgacccgccagccctggccacagctccggacgggacgccccccaggctgccgttccgggcgccgccagccaccccactggcttcaggcaaggagatggccgagggcgctgcgagcccggaggagcagagtcccgaggtgccggactccccaagccccatctccagctttttcagtgggtctgggagcaagcagctgccgcaggccatcatcatcggcgtgaagaagggcggcacgcgggcgctgctggagtttctgcgcgtgcaccccgacgtgcgcgccgtgggcgccgagccccatttcttcgatcgcagctacgacaagggcctcgcttggtaccgggacctgatgcccagaaccctggacgggcagatcaccatggagaagacgcccagttacttcgtcacgcgggaggcccctgcgcgcatctcggccatgtccaaggacaccaagctcatcgtggtggtgcgggacccggtgaccagggccatctcggactacacgcagacgctgtccaagcggcccgacatccccaccttcgagagcttgacgttcaaaaacaggacagcgggcctcatcgacacgtcgtggagcgccatccagatcggcatctacgccaagcacctggagcactggctgcgccacttccccatccgccagatgctcttcgtgagcggcgagcggctcatcagcgacccggccggggagctgggccgcgtgcaagacttcctgggcctcaagaggatcatcacggacaagcacttctacttcaacaagaccaagggcttcccctgcctgaagaaggcggagggcagcagccggccccattgcctgggcaagaccaagggcaggacccatcctgagatcgaccgcgaggtggtgcgcaggctgcgcgagttctaccggcctttcaacctcaagttctaccagatgaccgggcacgactttggctgggattgagcagacccgggctatgtaccttacccacgtggcttatctattgacagagattatatgtatgtaaaatgtacagaaatctattttataataatttatttttaattcataagcaattaattcactaagctgcctagccacactctttagagagttagcttcataatctgttaacattccaaagtgtttaactctagtatttcgttctcttcttcacaattgatggtgcttctattttttcttctcccctacctgttatatttaaaacaaagaaaagcacaacttgagatttttgttgttacgggtattcagccttcagtcaccgtctgagttctccagttgctgcctccttgtcttgtcttgggtctcccattccagcttccctgtctcttcctgcctgtgtacctcgtaggaacgctgagctgcctcaacagggctgtattctgaagggcaggcctcatgcagcagcctccttgcagatgtggtgtcccgtccaatgatgtagcctgaaagccacagccctagggttctgtccctccctccattcagcacatggggaaatttctcactccctttacagggacatccacatcctttttttttcttttttttttttttttttttttgagatggagtcttgctcttgttgcccaggctggggcgtaatggtgtgatatatgcttaccacaacctctggctcccggttcaagcgattctcctgtctcagcctcccaagtatctgggattacaggcatgcaccaccatgcctggctaattttgtatttttagtagagacggggtttcttcatgttggtcaggctggtatcaaactcccgacctcaggtgatccgcctgccttggcctccaaagtgttgggattataggcgtgagccactgcgcccgctatccacatccttctagagtcagaatggtagggtctgttgacttcagcttttgattttgcaggatggccctgtgtcctcctctgccccattccctggttcattaaccagtttgaagtgtatgtagattgttgccccgtctttcccaggtcacatgtgtgagatgcctgggtgctgcttcagaaatcaagatgatctcctttaatttgcatgaaactacaccatgctgcgttccccaggcagacagttctgctttgacacaccaaagaatcccgtaggctagcagagccaccagcacaaaccaagggcgctgggtgtcgagactcagaggggtcagctgtgtccctcggcatcagcgtctaccaaggtgctgctaggtacagagccagccagtgttgggcagcaggctcacagcctcaatagggagaaaagacaaaggcctcaaaatgacaggcagcctgacagaggaaggagtctgacacctcagcttgatgcgtctttggaattcctagctcatctcagaattatatcttagagtgataatatgggtggtagccagtggccaaacagcaagaactaagagtggcccttgcaaaaaaaggttgggaaagctgggcccatattgcctgtaaacccttgagcctgatgctcatacagctgtcccttgttttagccaggtcttgacagaagggttaccagcactgtcactgctctacagaatgctctccccgtgcctctctgttgatttataacagttgggtaaccagatagcaatatagtggcaattgagtagccatatagtaatacaggggcagttggttaaacatatagcaatatcacataatgatatgtttaatttaacctcagttttttaaaccagaatgcttctaccataaaagaattgtgatttcagttatacttccatcaaggaatatgtgggaagatatacatattgtcaaaatggttgggatgggatagttacaaaggacacttttgtatgttgtatgggatcacttgcctgatagtataaggaacattgtatgaaaagatgaaaagatacttcatttttagaaactgatcagagatgtcactggtctttaagtgatgtcttgaaaatccagtatgtatttgcccaaaagttttagcctacatctagctagcttacacttagcagccaaaccatcattgtgtaggttctgttttggaggaagctcatgggggatctgtgtatttcttaggtttctccctgttctccaatgttttatccatttcgtagcttttttactgtctccagaaagtagtgtgggacctgcacttaggggaataccagaatcatagcgtggttctgccttcttgatgagtgattgtgaaaaacacctgcataagggtgctaattggttgtgtattttttcatttatttgaaatcaaactgagaacacctcttttcggtttacagcataacatggcttgaagtaaaaggcagtatccaagtccttcacctggtcttgccctgtctactttctgatcattctgatggtctgatgtggctgttgatgtggaactgcagaagagttcagagaagagtatgcaacaaagccataggaaaacacacaggagcttttccctccccttcaggtccccgccctctttccaagctggacaattttttattaagttgtttattccctgccttaaaactgaaacaggaaattttctggtagaaggagggtcatttagtcacgaacactgaagtgggtcaaaattctattctgggtcaaatccttgaattcaaacagatgtccataatcagtactgatggaatagagcaagtttttctatgtaagacaaataaatcaaacatcatgtgcatctcctcataagggtctgcaagggtctgatggtttaaagttcctaacagatctggttgcagcatctgccggagcttgcaccccatcatcggacggtcatcttcctgctgcagaagttaggtaacataagacttagatttcttcctgttctagcaatctgcaagaccaccaggcttaactttttagctgccagaagacaaacccccttttctgtttcggcaatttgtcctggcacgtgttttggacttcctccgatttacacgaaaagctctgatattcattggagtactttattttttttcctcagttttgtttcttttctcatgtaaaaacaaacaaaaaggtcaacaaaaaaaaattgaggtttttcttgtttctatctagttcatgctttctttgcggtgtttgaacagtagtctgttaacttagtaggtggtacctggaaaggtattttaagtatagtgactgtttaataaatacttaattggatgatggaggaggagaaattgttttcttcccaggattctctttgggggtcattttgtgtgacagatatattttagacatttggagaaacagtttcagatcctgccaggatatttttgtaaaaaaggaaaatggaagattccaataaactagaaacagtacgtatctaagatgctgacacagaagctaatgtgacttttcagcttatcaagaggatggccaataaaacttaaaggtgtggttagatgttttctcacttttgtgacattaatttatcactgagtctcattcaaccaagtaatctaaaatactgtgcaaattctagcagtatgtcttcgataacttggatgttaggatagccaatatgtacaaaaaattaaatcaagtattttgtcctatgtataacacaaattaattttacacagagaaagatgtttctaggcaagtgaaattctggtaattcatactatttctttgtatgaacaaataaaatatattttgccaa

SEQ ID NO: 13458 - DNA, 2808 bp, Homo sapiens
  source 1..2808: mol_type = unassigned DNA
agttcgcctctgcagcctctgcggggaagtgccggggctgctcgaggctcagttcttaggactgcaaggaggcagccccggcgtgcggcggtgcgcacagtctagagtggccagggcgcgagagtgcaacgtcctcctggccccgagcgcgtcgtcgcgccccgggagcagaccctcgcccagcagttaccgccgtcccgactttccgttccagttgcagctcctgccgggcaacatgtcaagagccgccgccgctacagctgccgccgccacctggggaagagcagcagcagcagcggcggccgcgggcacacgggggcaataaaccgagccacccgggcgtccagcgtgccggggaaccctctctgcgctcactgcccggcgggacccacgccatgtgctgagccatgtccctggccgcgcccgcgggcagcgcatggggcagcgcctgagtggcggcagatcttgcctcgatgtccccggccggctcctaccgcagccgccgccgcccccgccgccggtgaggaggaagctcgcgctgctcttcgccatgctctgcgtctggctctatatgttcctgtactcgtgcgccggctcctgcgccgccgcgccggggctgctgctcctgggctctgggtcccgcgccgcacacgacccgccagccctggccacagctccggacgggacgccccccaggctgccgttccgggcgccgccagccaccccactggcttcaggcaaggagatggccgagggcgctgcgagcccggaggagcagagtcccgaggtgccggactccccaagccccatctccagctttttcagtgggtctgggagcaagcagctgccgcaggccatcatcatcggcgtgaagaagggcggcacgcgggcgctgctggagtttctgcgcgtgcaccccgacgtgcgcgccgtgggcgccgagccccatttcttcgatcgcagctacgacaagggcctcgcttggtaccgggacctgatgcccagaaccctggacgggcagatcaccatggagaagacgcccagttacttcgtcacgcgggaggcccctgcgcgcatctcggccatgtccaaggacaccaagctcatcgtggtggtgcgggacccggtgaccagggccatctcggactacacgcagacgctgtccaagcggcccgacatccccaccttcgagagcttgacgttcaaaaacaggacagcgggcctcatcgacacgtcgtggagcgccatccagatcggcatctacgccaagcacctggagcactggctgcgccacttccccatccgccagatgctcttcgtgagcggcgagcggctcatcagcgacccggccggggagctgggccgcgtgcaagacttcctgggcctcaagaggatcatcacggacaagcacttctacttcaacaagaccaagggcttcccctgcctgaagaaggcggagggcagcagccggccccattgcctgggcaagaccaagggcaggacccatcctgagatcgaccgcgaggtggtgcgcaggctgcgcgagttctaccggcctttcaacctcaagttctaccagatgaccgggcacgactttggctgggattgagcagacccgggctatgtaccttacccacgtggcttatctattgacagagattatatcataacatggcttgaagtaaaaggcagtatccaagtccttcacctggtcttgccctgtctactttctgatcattctgatggtctgatgtggctgttgatgtggaactgcagaagagttcagagaagagtatgcaacaaagccataggaaaacacacaggagcttttccctccccttcaggtccccgccctctttccaagctggacaattttttattaagttgtttattccctgccttaaaactgaaacaggaaattttctggtagaaggagggtcatttagtcacgaacactgaagtgggtcaaaattctattctgggtcaaatccttgaattcaaacagatgtccataatcagtactgatggaatagagcaagtttttctatgtaagacaaataaatcaaacatcatgtgcatctcctcataagggtctgcaagggtctgatggtttaaagttcctaacagatctggttgcagcatctgccggagcttgcaccccatcatcggacggtcatcttcctgctgcagaagttaggtaacataagacttagatttcttcctgttctagcaatctgcaagaccaccaggcttaactttttagctgccagaagacaaacccccttttctgtttcggcaatttgtcctggcacgtgttttggacttcctccgatttacacgaaaagctctgatattcattggagtactttattttttttcctcagttttgtttcttttctcatgtaaaaacaaacaaaaaggtcaacaaaaaaaaattgaggtttttcttgtttctatctagttcatgctttctttgcggtgtttgaacagtagtctgttaacttagtaggtggtacctggaaaggtattttaagtatagtgactgtttaataaatacttaattggatgatggaggaggagaaattgttttcttcccaggattctctttgggggtcattttgtgtgacagatatattttagacatttggagaaacagtttcagatcctgccaggatatttttgtaaaaaaggaaaatggaagattccaataaactagaaacagtacgtatctaagatgctgacacagaagctaatgtgacttttcagcttatcaagaggatggccaataaaacttaaaggtgtggttag

SEQ ID NO: 13459 - DNA, 3203 bp, Homo sapiens
  source 1..3203: mol_type = unassigned DNA
cagcgcgcggcggcggcggcagaggctgaagcagaagccgcggcggagccggggaagcgggggcgctgcagacggagcaggtgccgccggcgggtccgcgcgcccccctcggtccccttgcctgaggctgaggggggggcggtggtgggggggccacccggactcggcgggcagcgtggggcggggggccatgcggccgggctcccccctggcgcagcgggacagcggccagggccgggggcgcagcggcgtcgcttcatgcagccggggcggctgggcagcggcggcggcggcggcggcggcggcggcggcgggggcggcggctgaaaccatgtccgggcagcgccgggggctgccgccgccgccgccgccgccgcgagccgggagccgcgatggcccggtggcccgcacctcctccgcctccgcctccgcctccacctctggccgcgccgccgccgcccggcgcctctgctaaggggccgccggcgcgcaagctgctttttatgtgcaccttgtccctgtctgtcacctacctgtgctacagcctcctgggcggctcgggctccctgcaattccctctggcgctgcaggagtcgccgggcgccgccgccgagcccccgccgagcccgccgccaccctctctgctgcctacccccgtgcgcctcggcgccccctcgcagccgcccgcgccgccgccgctggacaacgcgagccacggggagccgcccgagcccccagagcagccagccgcccccgggaccgacggctgggggctgccgagcggcggcggaggcgcccaggacgcctggctccggaccccgctggcccccagcgagatgatcacggctcagagcgcgctgccggagagggaagcgcaggagtccagcaccaccgacgaggatctcgcaggccggagagcggccaacgggagcagcgagaggggcggcgccgtcagcacccccgactatggggagaagaagctgccacaggcgctcatcatcggggtcaagaaaggagggacccgcgcgctgctggaggcgatccgcgtgcacccggacgtgcgggcggtgggcgtagagccgcacttcttcgacaggaactacgaaaaggggttggagtggtacagaaatgtgatgcccaagactttggatgggcaaataaccatggagaagactccaagttactttgtgacaaatgaggctcccaagcgcattcactccatggccaaggacatcaaactgattgtggtggtgagaaaccccgtgaccagggccatctctgactacacgcagacactgtcaaagaaacccgagatccccacctttgaggtgctggccttcaaaaaccggaccctcgggctgatcgatgcttcctggagtgccattcgaatagggatctatgcgctgcatctggaaaactggctccagtatttccccctctcccagatcctctttgtcagtggtgagcgactcattgtggaccccgccggggaaatggccaaagtacaggattttctaggcctcaaacgtgttgtgactgagaagcatttctatttcaacaaaaccaaggggttcccttgcctaaagaagccagaagacagcagtgccccgaggtgcttaggcaagagcaaaggtcggactcatcctcgcattgacccagatgtcatccacagactgaggaaattctacaaacccttcaacttgatgttttaccaaatgactggtcaagattttcagtgggaacaggaagagggtgataaatgaggctagagaggcagaggaaggctagtcaataagctaaggaggctccttgcctgagtccttgaataccccagcttctgcagcttcacttgctggagtgccaagtagatctcctcctccttcatgcagccaggattgcctccagtgctgttagcttaggcaaacaggtggatcccatggcatccccatggaggaaccaggcccatctgggcagcagcatctggttgaccagatggccaccagaacccactgttcattcttatcttctgctagttaatatagcctgaagacagaggataaatagttgtcaatgtcagagacagtgctattaatgtatatgtgagcgacaaaaaaggtctgctttataggggttctcactctagcttggggagccagggttctagccctgtatctgtcatgggcacctgctgtctaaacctctgcttgggcttctccccagaatgcactttgtggctgagtgctccaggactcctagggagcaaggtcctccctctaaggtgtttctagtcttctctttaaaggtctcatcccacaacccctgacttcctccctccccacatcatgaaggcagaggcatgcacattcctcactgaaaaagaaaacacacacccacccacacacacacacacagaagaaaatgaaagctgacacacctcgaagccttctttccaagagccctctaaatggggttgggtctcactcttcatgagtatcctgggttgtgcagaagcttagcatatgcccttgtgttcggatcaggcccacagggctgctcaaagagtagagtaattgtaaccgaggtcagagctctggggttggcagagatgagtggccatatctgggggtaaaagaagaaatcctgtcctcttggtgggaggttaccttacctgaagaccatctctcccaagcactgtagttctgagcatgtttttggggtggactctgtcccctagggtccctagaagggcaaagaccagagagttgacaagtctgttattaggaataatccttagccatgtaatggagaaaggagcagtcagcattcttccaatttgccccaccaccacctcctcgggcttcattttctctatttagagatggcagagagtgaggtagtggcgagaaagctgactccattcatcagatccagtttatgagggttgggggtgagcaagggctgtctgcagaaacccccatcaagagctgctgaatgaagtgtcccttcccatcagtttgattcaattaaaatgcatcatttgacataaagcacttgttcacagatctccaaaaccaggaattgttctagtaaaactggaaatttgtatgagtggggggagttaaatctgttcagctgttattaaactgtcatttctcccgctaaatgaaaaccgtgttgttataaagcttaatgcaacctgatta

SEQ ID NO: 13460 - DNA, 3901 bp, Homo sapiens
  source 1..3901: mol_type = unassigned DNA
gggagggtgtggactggcagccactctgcagctggtcgccagggacccggtccctcctgcgcgcccaagtgatggaggggaagagattcgcttagacacacacacgcgcacacagctgggcacgtctccgggaggcagctgccggctcgggcgctctgggggccgggcggcggccgtgacagcgccagccgcggggagcggggcgcccgcacagcttggcaccggaggctcgaggacgcaggaagggaagatcccagtcacactgagtgttgctcttttgggcggattgggagggagcgggctgcccgaggagctgtcaccgaggacgcccgaagtctcgccctctgcgcgcagggtccggggctgcgccggtgccctcgtggggcaaggaggatgcgcacctccccccgcagagcggctgcggtctccggcactgcgcggactccggctcctgcggccgcccgtgccgtgcccgcgccacgggagcgcgccctgccgcacctggttccagcctctcggggaagtgcaggaaacgcgccctaaactccactacttctcgcccgcctgcccccccgcccggctccccgcctcagacctcgccgccgccgccgccgccgccgccgcctgcgtgtggggcccgctcgcgtcttactcacacgcgccacgcacagccctgttggtttgctctcattcacgccgactcgctctccgccgagcctagcccgggcatccgaaactactggaccaactgccgtccggaccgcagcagcggccgggtgacccccacgcgacccgccgccgacccccgcgccctgaggctcccgcccgcgccgccaccgccggggaccacgagataatcagatactcactgtcttcagcattggtgtcttctattctcaacggcatttctggtggccaccccaggagtctccctgacctgttttaaaacccttggaaattaaggagagaatccactacatatattcctttgaaagtttccaccatatatgttcaaaaattgctgaatgagcacaaggatttgaaggtgctaaagcaagggataaaccaaaaggacagccagtaggtgaggagaggccatggaatacccgccaacaagataatcatcgctggaataatagggacctgtctgaatgtaggctgcagcagtcctgaaggttgatggagggccatgctattcaaacagcaggcgtggctgagacagaagctcctggtgctgggaagccttgccgttgggagtctcctgtatctagtcgccagagttgggagcttggataggctacaacccatttgccccattgaaggtcgactgggtggagcccgcactcaggctgaattcccacttcgcgccctgcagtttaagcgtggcctgctgcacgagttccggaagggcaacgcttccaaggagcaggttcgcctccatgacctggtccagcagctccccaaggccattatcattggggtgaggaaaggaggcacaagggccctgcttgaaatgctgaacctacatccggcagtagtcaaagcctctcaagaaatccacttttttgataatgatgagaattatggtaagggcattgagtggtataggaaaaagatgcctttttcctaccctcagcaaatcacaattgaaaagagcccagcatattttatcacagaggaggttccagaaaggatttacaaaatgaactcatccatcaagttgttgatcattgtcagggagccaaccacaagagctatttctgattatactcaggtgctagaggggaaggagaggaagaacaaaacttattacaagtttgagaagctggccatagaccctaatacatgcgaagtgaacacaaaatacaaagcagtaagaaccagcatctacaccaaacatctggaaaggtggttgaaatactttccaattgagcaatttcatgtcgtcgatggagatcgcctcatcacggaacctctgccagaacttcagctcgtggagaagttcctaaatctgcctccaaggataagtcaatacaatttatacttcaatgctaccagagggttttactgcttgcggtttaatattatctttaataagtgcctggcgggcagcaaggggcgcattcatccagaggtggacccctctgtcattactaaattgcgcaaattctttcatccttttaatcaaaaattttaccagatcactgggaggacattgaactggccctaaaataatatgtcatacaacactatgtgttgtgcctggagacacacaatgtctcctgtagattaaaatatgcacttttcctaggcagagctatccaagtcatttttccatgtatatttgtacatacgcagtgtgtgaccaaatataagatcagttctttttctactgaaaatttacgaaaaaaaaaaaattgctgtctgcatagtcgcatcttttaagctatttacaaaagagaagaggtggtggtattgggggaaagtgacttcagctattctcaaagagttagtcttcctttgattcagaatttgtcacccgccattttcatagatttaagccaaaagataaatgtgtgaaaatgtaccaatggctgcgaagcttcaggaagtagaggatccagtgatgcattttttttttcctaagggaaagctggctctttaattcagatgctgaattggtgccatgaaaacagaaaatgctattttcttattatttaaaagaacgtcttatctcataaaattgacattgttccaaagttcttgtggtgattttgcactattgttttctcgtatggaccatggtgtcacttgtagcatgtcaatcacacattggaaagtcaagtccttttacttccatgttgtatgtcaacagagagaaatgtcatgtacataatgtatattgttgtaaatactggtttcacactaagtaattctattttgtaaactgaatatggctatttaatttattgtgaaaattaaatttattgtggtatttaaaaatggaatggattaaaattactctatgtgcaattttttttttttttactcattttgttttacgtgccccctgctggcttccaaaatggaagctgtttacgtgcatatgagagcacttggaaagatgtgcttccctgctggatttctgtaccccagtgaaaatgtatttatgaagtgaggttgagtatattaaaaaagaaaaacctcaaccatctggaaatcaagtataatagccacctcaaagaaccctagtgctgctctgctacaactttgtaacaattaatttactcgcagttgctgctgctcaggaagagagacaaggaatattttaacagaatcaaggcatagaagaatcaccattttatttgaacctctaatcagagtcagaccagtagagaaattaaataagattagaaaactctgtactgaaagctgctgatgcttcaaaaatgaaaacaagatctcacaactctccctgttagttgaaaatatatcaatttgctctgaaaggattcagctgcctagtgttgccattactaacataaacatatggctcatatttccatccagagaaattaatgctaaattggtgcctcgctaacatcagatacactgtattatgcttaaatatattcagtaaaatgtggaaaggggtattaacaacgacaacaaaaagatggattttttttttctcacaatcacagttgctaatccagtgggagatgtttgagagagttttgttcaacatcacagtgagagtgcctagggaaatcagaaaattacaatggattcccctttgattgtaataagtgttgattttctccatgagttgtttatcctgtctagtgatttgatggtgaacttttctaaataaatagccctttcccctccggtgtcggta

SEQ ID NO: 13461 - DNA, 2744 bp, Homo sapiens
  source 1..2744: mol_type = unassigned DNA
gctgcagcagtcctgaaggttgatggagggccatgctattcaaacagcaggcgtggctgagacagaagctcctggtgctgggaagccttgccgttgggagtctcctgtatctagtcgccagagttgggagcttggataggctacaacccatttgccccattgaaggtcgactgggtggagcccgcactcaggctgaattcccacttcgcgccctgcagtttaagcgtggcctgctgcacgagttccggaagggcaacgcttccaaggagcaggttcgcctccatgacctggtccagcagctccccaaggccattatcattggggtgaggaaaggaggcacaagggccctgcttgaaatgctgaacctacatccggcagtagtcaaagcctctcaagaaatccacttttttgataatgatgagaattatggtaagggcattgagtggtataggaaaaagatgcctttttcctaccctcagcaaatcacaattgaaaagagcccagcatattttatcacagaggaggttccagaaaggatttacaaaatgaactcatccatcaagttgttgatcattgtcagggagccaaccacaagagctatttctgattatactcaggtgctagaggggaaggagaggaagaacaaaacttattacaagtttgagaagctggccatagaccctaatacatgcgaagtgaacacaaaatacaaagcagtaagaaccagcatctacaccaaacatctggaaaggtggttgaaatactttccaattgagcaatttcatgtcgtcgatggagatcgcctcatcacggaacctctgccagaacttcagctcgtggagaagttcctaaatctgcctccaaggataagtcaatacaatttatacttcaatgctaccagagggttttactgcttgcggtttaatattatctttaataagtgcctggcgggcagcaaggggcgcattcatccagaggtggacccctctgtcattactaaattgcgcaaattctttcatccttttaatcaaaaattttaccagatcactgggaggacattgaactggccctaaaataatatgtcatacaacactatgtgttgtgcctggagacacacaatgtctcctgtagattaaaatatgcacttttcctaggcagagctatccaagtcatttttccatgtatatttgtacatacgcagtgtgtgaccaaatataagatcagttctttttctactgaaaatttacgaaaaaaaaaaaattgctgtctgcatagtcgcatcttttaagctatttacaaaagagaagaggtggtggtattgggggaaagtgacttcagctattctcaaagagttagtcttcctttgattcagaatttgtcacccgccattttcatagatttaagccaaaagataaatgtgtgaaaatgtaccaatggctgcgaagcttcaggaagtagaggatccagtgatgcattttttttttcctaagggaaagctggctctttaattcagatgctgaattggtgccatgaaaacagaaaatgctattttcttattatttaaaagaacgtcttatctcataaaattgacattgttccaaagttcttgtggtgattttgcactattgttttctcgtatggaccatggtgtcacttgtagcatgtcaatcacacattggaaagtcaagtccttttacttccatgttgtatgtcaacagagagaaatgtcatgtacataatgtatattgttgtaaatactggtttcacactaagtaattctattttgtaaactgaatatggctatttaatttattgtgaaaattaaatttattgtggtatttaaaaatggaatggattaaaattactctatgtgcaattttttttttttttactcattttgttttacgtgccccctgctggcttccaaaatggaagctgtttacgtgcatatgagagcacttggaaagatgtgcttccctgctggatttctgtaccccagtgaaaatgtatttatgaagtgaggttgagtatattaaaaaagaaaaacctcaaccatctggaaatcaagtataatagccacctcaaagaaccctagtgctgctctgctacaactttgtaacaattaatttactcgcagttgctgctgctcaggaagagagacaaggaatattttaacagaatcaaggcatagaagaatcaccattttatttgaacctctaatcagagtcagaccagtagagaaattaaataagattagaaaactctgtactgaaagctgctgatgcttcaaaaatgaaaacaagatctcacaactctccctgttagttgaaaatatatcaatttgctctgaaaggattcagctgcctagtgttgccattactaacataaacatatggctcatatttccatccagagaaattaatgctaaattggtgcctcgctaacatcagatacactgtattatgcttaaatatattcagtaaaatgtggaaaggggtattaacaacgacaacaaaaagatggattttttttttctcacaatcacagttgctaatccagtgggagatgtttgagagagttttgttcaacatcacagtgagagtgcctagggaaatcagaaaattacaatggattcccctttgattgtaataagtgttgattttctccatgagttgtttatcctgtctagtgatttgatggtgaacttttctaaataaatagccctttcccctccggtgtcggta

SEQ ID NO: 13462 - DNA, 3558 bp, Homo sapiens
  source 1..3558: mol_type = unassigned DNA
atgctgtttatcaaattcattcatctcgaagtattcagtatgccagaaagggctattgcaagacacgaagtccgagaaattgagcagcgacatacaatggatggccctcggcaagatgccactttagatgaggaagaggacatggtgatcatttataacagagttcccaaaacggcaagcacttcatttaccaatatcgcctatgacctgtgtgcaaagaataaataccatgtccttcatatcaacactaccaaaaataatccagtgatgtcattgcaagatcaggtgcgctttgtaaagaatataacttcctggaaagagatgaaaccaggattttatcatggacacgtttcttacttggattttgcaaaatttggtgtgaagaagaaaccaatttacattaatgtcataagggatcctattgagaggctagtttcttattattactttctgagatttggagatgattatagaccagggttacggagacgaaaacaaggagacaaaaagacctttgatgaatgtgtagcagaaggtggctcagactgtgctccagagaagctctggcttcaaatcccgttcttctgtggccatagctccgaatgctggaatgtgggaagcaggtgggctatggatcaagccaagtataacctaattaatgaatattttctggtgggagttactgaagaacttgaagattttatcatgttattggaggcagcattgccccggtttttcaggggtgctactgaactctatcgcacagcaccagatactgctacaccatctcatcggcatggacctatatgtggcagcaagtccatctcatcgcttttggtgaaagtcagtccagtttgtaaagattctcattgtcactgtagacgaggaactgggacaccaaaaggagaaactctggccacgcttgcaccctgttcccaatcctggtccagtgtcacccacagatggtaaggagctctagagacctcaccagcccctgggattggtcacctcactcttctatggacagagattcctgctgggatcctttgagggcaagcagacccttcttccagctcggactgtgaactccactgcagccgtaaggactgtctgtgacagtgagcccgagatgactgggctctgtgctccctcccggccctccaatccttggcctgccacagagaactgagctcttttattagcaccatgaatgtgactgatacagctagccattcccttgtgcgaatgactcagtttattaatgctctgctaaagatggcttctttgcttgccagcagccttaaacagtatttcattaaaactggcttaattattttgagaagacggcccaattaaaagctatacactccctctatgtgagtgtttatacatagagctgtatatataatacatatttgtaagtgtgtatatatatatgtgtgtatgtatgtgtctataaatatataggcttagcaatttcattacatgggataaattgttggaaaaaatacccaggagctggtcccctttctgttgctagattcagagtagaggccacccctccactctgggagaggctggtgttggtgatctctcaatgactctgcaatggaagtcccaactgcacagagccctgccccagtttcaggagccagcagcctcggagaggcggatcctgacctctgctctgctcttgggatagcctttcccttcccagcagggttgagatacttgggccgggaaatgttgtggcaaagtgtttgccaaagctcaggagagacacagacttggggcttttgtttcttgagctggctgtctagctttcctaatgagcaaatatgttctctttaaggaaacaaacaaacaaagcaaaaacaccaattcatctggattttattcatttgttttaaatacaaacaaacaaaaggagagtggttatttctgcaccaactatttcaaatgcaagttactccatcgctcggggtggttggatggtgcttgtcaccataggacccacagggctagttccaactgttattcggtaaggcttttttctttccaaaattcccagtgttcctttaaggcccatttagctgcgggttttgtttattctcccggcaatcagcatttaaaataagacaaacaagcattttttcctgggctgtgaatccccccggccagcctccacctgcacacctgaagccagcatgtccaatcaaatttctctgtaacccatatcccctttagagacttgcccccgtcgtataccaggctggaaatagagaacttaagcagggcaaatgtaattttaagaattgctaatgatgctagaaatctgcaatgcaattagcgtcattggatttggcgctcctccgaaggcacaaaactccttgtcatagcgcagtggcagcagcggcaagtgcctccgcatgtgccgggctgtccgggtatgctggcagccgctttgcactgagatgtgagcagttggttaggcttcctctctttctttctcacagatactgacttctttgtctcttttctgggttgcagagggatgggtattttccattgattattactttagcatttgaccctccagtggagtcaccctgttttttttttagaaaactgagactctcactttgtgaattcactgtgctctctgggatttcagtgctgtagttcaaccaccaatccccctgtcctgaactccagtacttctgatgctattaattggttcctcaacaattgtggccttttccatcattgcccaccatagtatatactttttctttctctctcttttttctaatttccttgtcttcttcactctccatggagccagaggtagtatgaagagttaaaaataggaatataaagaaagccagagggacagagggagtgagaaagaaaaattttaaaaagggaggaaatgaattattggattaaaaataaacttttacttttttgcagaaaaattatttttgctctctgggaaaataacatgggccaggcataaaaagcatgtcagctggctaaaagattgcaaaatccagaagatgatctcgatgtgtctgttcaatttagcaagggtatctactaggggatcctcttttaaatatggaggcccaaatcagaagcttgtagaggggagctattcttccaagattccagatgtgtctgtgagacaacacgttatggggcaaattgatttcacccttgggaaaccagggagattttcaaagttatgtctgcaaagccagctaatgcaattccccattagtgcattaaagtgcgcccttattaattcaaacataaaggcaacaaaataagcttttaaatttaaaatataatacatatataatgagcatgtgtgaaagccttattcaaatgaaaatacaggagtgtttgaactactgaggtatcttttgtattgaattatgagcatatgtaatagatttaattattaatttccccattgttctatgcacacagacagggttcaaggcacagtcattctctggctttcatagatctaatttgtataattattgcctg

SEQ ID NO: 13463 - DNA, 2013 bp, Homo sapiens
  source 1..2013: mol_type = unassigned DNA
tgtggggagggtacctctcacagaagagtcttatgactggcatcaggggaaggtcaccaagtctttcctgtacatgctgtttatcaaattcattcatctcgaagtattcagtatgccagaaagggctattgcaagacacgaagtccgagaaattgagcagcgacatacaatggatggccctcggcaagatgccactttagatgaggaagaggacatggtgatcatttataacagagttcccaaaacggcaagcacttcatttaccaatatcgcctatgacctgtgtgcaaagaataaataccatgtccttcatatcaacactaccaaaaataatccagtgatgtcattgcaagatcaggtgcgctttgtaaagaatataacttcctggaaagagatgaaaccaggattttatcatggacacgtttcttacttggattttgcaaaatttggtgtgaagaagaaaccaatttacattaatgtcataagggatcctattgagaggctagtttcttattattactttctgagatttggagatgattatagaccagggttacggagacgaaaacaaggagacaaaaagacctttgatgaatgtgtagcagaaggtggctcagactgtgctccagagaagctctggcttcaaatcccgttcttctgtggccatagctccgaatgctggaatgtgggaagcaggtgggctatggatcaagccaagtataacctaattaatgaatattttctggtgggagttactgaagaacttgaagattttatcatgttattggaggcagcattgccccggtttttcaggggtgctactgaactctatcgcacagcaccagatactgctacaccatctcatcggcatggacctatatgtggcagcaagtccatctcatcgcttttggtgaaagtcagtccagtttgtaaagattctcattgccttggaaagtgttccaggaatggactttctgcagtatgatgacctgcaaaagcagcccttccatttacatttcaaactccaagtcagccgtgtcaaagtttgaaccagaactgtggaggataatgggtcagatgcaattagcagcccagagaaccacacgttgcagtctgatttatttttttgcccatcagattccaagaatcctagtgcttaaaagcaactaaacaatcgctctattgtactgaaataaagcccggttaattcagaaatcaattgcaccaccaggtggggcacactctggccccaaacagatggggttgaaaactcccctcaaaatgcagtcttgttaaattaaaaacttgatccaggagtggaacaaatagggagccatgaatggaatggagtcaggtccactcaggcggattctttcttctcccactccttttcctttaaaaaagaaaaattccccatttcactttcatcagtgttagcatctatgcagaaacgcagccatccaccctttgcagttgaatgtgttactttaattagtctgaaaattaaagggcaactccgggccaatgtgaatgattatgaaaatacatgtgcatcccatgcaatcttctcatttaattaatagtcttgtaaactatatggctcactttaagtcagtcaagaggtataacaactccattttaaatatccacttaatacttaacaggatgtgaggaacacactatagcatacggtcccttctcaagtttcactgtctgaaatttttcaaagctgacccaagtcaacctgaaaaatgtttaacaccctgggcttgaacacaagaaactctgtgatgaacagacattcaattacattttttaaaagtgagaagcatttttgtaaaatagcgactctggaaactaattggcagccgcaaaacttgtgagcaaaggccaaatcttgtggggaacttttactacagtaacacgactcaaagaaaatgtgaataaaaggcatctttgtttcccagtcaaattagctgattaagaaataaaacatcttaacatgtttttaaa

SEQ ID NO: 13464 - DNA, 6731 bp, Homo sapiens
  source 1..6731: mol_type = unassigned DNA
agggagggaaggaaggaagagagggaggcgggcaagcaggcgggcgcgggggtcggggactgaggcagtagagggaggcgagagcccggcagccgcttcgcgctgtttgctgcgcgggcttttggagggggcggccgtttagtcggctgaggagaagcggacaccagcggcgttggtgatagcgcctgggggagggggactggagaggcgagaaggggggtcgctgcggtggttctctcgctgtcgctctctctttgcctcgctcccggctcggcgggctcctcccggcgtctctctcgcctccggggtcccgctccccgccccccgcggtatgtcttgatcccgagcagcgggtttcatggggctcctcaggattatgatgccgcccaagttgcagctgctggcggtggtggccttcgcggtggcgatgctcttcttggaaaaccagatccagaaactggaggagtcccgctcgaagctagaaagggctattgcaagacacgaagtccgagaaattgagcagcgacatacaatggatggccctcggcaagatgccactttagatgaggaagaggacatggtgatcatttataacagagttcccaaaacggcaagcacttcatttaccaatatcgcctatgacctgtgtgcaaagaataaataccatgtccttcatatcaacactaccaaaaataatccagtgatgtcattgcaagatcaggtgcgctttgtaaagaatataacttcctggaaagagatgaaaccaggattttatcatggacacgtttcttacttggattttgcaaaatttggtgtgaagaagaaaccaatttacattaatgtcataagggatcctattgagaggctagtttcttattattactttctgagatttggagatgattatagaccagggttacggagacgaaaacaaggagacaaaaagacctttgatgaatgtgtagcagaaggtggctcagactgtgctccagagaagctctggcttcaaatcccgttcttctgtggccatagctccgaatgctggaatgtgggaagcaggtgggctatggatcaagccaagtataacctaattaatgaatattttctggtgggagttactgaagaacttgaagattttatcatgttattggaggcagcattgccccggtttttcaggggtgctactgaactctatcgcacaggaaagaaatctcatcttaggaaaaccacagagaagaaactccccactaaacaaaccattgcaaaactacagcaatctgatatttggaaaatggagaatgagttctatgaatttgcactagagcagttccaattcatcagagcccatgccgttcgagaaaaagatggagacctctacatcctcgcacaaaactttttctatgaaaagatttaccctaagtcgaactgagtataaggtgtgactattggattcttgaactaaaatttgaccctgtcttcacctttgttctcagctccacagtctggattgctgacagtaggtgtatatgacaatttgtattgagccaaattaggaaacagacagtaacgtcaaggaagtagatactggctggcattgtcagtgttctaagtttcaggcatttttatttttcctggctaaacgttggtgaaagttataacctcctgcctgggagaaaatatacatcacctaaaatgaacttatggcaggtctaatcaaaaggctaaatacaatttcagaaaaggttctgatactcttgtttttgataaagcattttttcaactaaccatgaattaagatgagtccatttgcctcttctgccttcactgagggtttgggttatacacctctactgaattgtgttaataactgtttggcagtgtgtactttgtttttgtgagtcatgtctcatgaaatttattggaatgtttaatcatatttgctaagaaatgtttctgctgtagttggatttgcccatatttatgtaggtggttttaattttttaaatggtgattagtgttaaaaatcaatttaaatcatgactaatatggtaaaaagataaagcatcaaagcagtatttctcattcctgcctcctcaatatctaatactgggaagatacttcaaagaatattgagattgtctgaagttttagttaagattttcacacattaatatcaaaaaagtaagtttagtatttgtttctccatgggttatttgtaaagctgtaaactgagatatcggtgactccgtattatgactccattagtgagctgtggtatgggtaggattttcctacttcttctgtacttttacctgtagactatttttactaaggtgctttataatgtgttttaaagcattgcatttacaaaacaaggaaaatgctgtaaatattgcatattttatgtatttggaccaaaaggttacaagtaattagacaaaagtggttttgcaccaattttatgtcaagtaaaaccatcagacctactgttcttgtatttctcatttaactttactgttaagacatcactgaaatgaacttcagtaagctttcaattttgatacacagttcattattcataacttgaggcagtaattacagtggaatgagtactggacaaggagtcaaaaaacttgatttcaggtcctagctctagcacttacagctgtgtgatcttgggcaagtcacttaacctctctttgcctcaatttcctcatcttgaaatgaggataataatacctgctgtacctacctcacagggctgttgtgaggattaaatgagatggcatgtgaaagcactttgaaaattgtaaagcgctatgtaaatgtaaggtattatagaaacatctttaacatatagtttcataccattcattttttaacaaagaaagggaaaagtctgcttgtaagctggttgaaaaagttaatcttgatataaatttgtgtttgataaatatcctctcagtgttttatcttccatgtttcaacaactattgaaatatgaaatgcctgtgaactcttaaagcttcatgagcagctgcttgagttcaggaagttcactgttagaaataggctttgttagctgactagggtcagggaaacttttctcttcaaatttgaaagctgtttctgttttcattttacattattattcagaaatggtagctattctatacctatggtttaagtaaatatttctgaataaggcttcaccatactgtaagcattttaggtagattgccttaaaggttatgggagggcatgagggaacacttcttatgagaaaacatttataaacaaaagaaacatttataaactaaagaaaaactaaaagaatgacagaacaatcatcttagcaccctttcctcacaataatataaaaatattaaaagaacataggcaggctttttttaaatttggcttttttctttccttttttcaaattgacttttataggtatttcctgaaagtgtatacaaattatttcctcgcccaaaataaagcaccacttcaaggtgtggtttgacattacatgctaatgaacaaacccagtatgcaagttattcttgcaccacatgctcaaatcttcttgaggtgcattaactcttttaggtaactagagcagtacttggtgaactagatcaggaggtcagtaaactttctgtggaagggccagagagtaaatattttaggctttgcagcccatacggtctctgtcacagctagtcaaccctgccattttaccacaaaagcagcaatagacattatgtaaacaaatgagcacagttatgttccaataaaactttatttacaaaaacagatgacatcccagatgcagaccatgggcaaccaaccattgcactggccaaatcattatttatggagaaatcctctttgtgtctctactctagatgcctaaaagagtttatatacttctaaaagctcctaacttatatccaaagaattgctttctgattcgtgtagtctctcccacagattcataaacttttatgacttatattgtttccaggtgggcatggtttatttcccagtttaacagttcagaataggggcatttattttatcatattttagggtgggttaggagtatcctttctggagactgagaaaggggtgtatttaattccatcaggtccagtacagtactaggagtcataatactttataatcaattaaataaatagaaccactgagacaataatgtatttttttaaagtggcaaatgtggttttcttttttcagcctttgcgctttttcagtattttgaccatagggagataatttttttataatacaaaagtaaccacttggaattttaaagataatgttatgtgtgtatgtgaaatatatatacatatatatatatatgtttatttcctaaaagaagaaaagatacctttctgttcaacttgtatcaactcctcttttctaattgctgtgaaatggcaactgttgataaattattgtgattgttttaaaatctaatgggaagtaaaatatattttgattttacccagcttaatctgtaaagtagcacttaaatatatctgatagcaacacttaagatattgcatggggattactttcctatcatccatatgcatttgtgcaacttcaaacatattgggtgcttctgaattcctgatgattggatttaagctattgaaaattggataatttaaacttaatgatttttataattttctgatcttaaaatttggttaatgcctataatctgttgctttttctcaatatgtgtcctattggaaattcctcaaatcgttggtgccatcagtgatttacaaacaatattttgatattgcagatgacttgcttactgtatttgcattgttagaaaacagtttgtagacaatgattcttttttaataaaatcaaataattctaaaagtgctagagaatttaactaaaagctggttcccaaatgcatagctggcattttaatttaaattcaaatctacatagagaacatctgtgtaaatcatctaactggatttttccattggtcattcccaaacacacctatggtcctagaatccttaagagaagcaccctgtaaccttttatgtggtttgcctttaagaggcccaggtgcttctcctttatgatttgagttggcctcttcataaattagtgctgtttactttcagaggaagcagagaagttgctgttatgtttttgcatccgtttaccctatgcaaagttgctgtatgatgccaactaaactactctttaggcagccttctgaggagaaaagcaaccctgtttcaaatccactgccaattcagctcctctggagtggagctttctgatttcttggagcaggaattttagagattgaaatgaatgatcatttagtcagatttatcctgtaatttcatgcagctttgtggcctttgcagtactatttataaaatggaccctgatggtgatgaactctttagaacgcattactgttaagcctgtgttgagacattgatgctgtctatctcattttttagacagtttttgtagctttctattgagagtcaggtatgtgagcatctctgaagcagtgttgaatgtaattttcggaaacatggattgtgtattttgacttttattttataaatacacagctcaacagtgccttttttttccctcatagtcctgttggaagatgctcactactttctctcttctctctccctgccctcccccactccattcagttgattcatttatgcaaattctgtttccaacttgaaaccattttgtcacatctgttggagagataatcactccttttccttaacattctgccagctttctgatgttgaagtgtttcagttgactacctgatgcaaaagctataaaataaacagtgggaaggggaaaaattggtgtcctgttttaatattttcttttgtagccttgacactgatggacattttccaagctgactcagtgttcagtgtcaacttaactctcagatagtgttgccatcaagaaagcatgcaacatcattggtttctaatgattttatggcttgtgacaatattttatctggactgacatgcctctgctgcttttgctttgtacttcattgctggtaataaaatttcagatggaaaacttacaaaatatatacttaattagaagaaaaaaatagagaaagggctattagaattaaaaaaatttgaaagtaacttaatctaacatttatggcacagtttggacatatccataattttttttgggaacacacatttctgattttttttttcccccttaaagaagaaagtctcaattccattgattttcaattcttagccactggctcattgctttgagcaatgcttgattgattctatttatattatatgatattgggttgataaaataccagttcaatgatgagttttcttaacagaatttggtttgtacttgcagtggctgaacaaagagcatggcttgagaatcaaagggatctgcatttagcaatgtgatgtcagtaaatggacataacaggattgttgtaaaggttgggcatgatgtatgcaaagtactggccagggtagactaataactgatggcatttatatgctgtgctggaatattgttaccaagctgatgtgccgttctcaccctgcagaatactggttttgtcatttcataaatgatatttttataaatatttttgaatgactgta

SEQ ID NO: 13465 - DNA, 1566 bp, Homo sapiens
  source 1..1566: mol_type = unassigned DNA
cggtggaggggcgcgcggccgcgagcaaaggagggagggaaggaaggaagagagggaggcgggcaagcaggcgggcgcgggggtcggggactgaggcagtagagggaggcgagagcccggcagccgcttcgcgctgtttgctgcgcgggcttttggagggggcggccgtttagtcggctgaggagaagcggacaccagcggcgttggtgatagcgcctgggggagggggactggagaggcgagaaggggggtcgctgcggtggttctctcgctgtcgctctctctttgcctcgctcccggctcggcgggctcctcccggcgtctctctcgcctccggggtcccgctccccgccccccgcggtatgtcttgatcccgagcagcgggtttcatggggctcctcaggattatgatgccgcccaagttgcagctgctggcggtggtggccttcgcggtggcgatgctcttcttggaaaaccagatccagaaactggaggagtcccgctcgaagctagaaagggctattgcaagacacgaagtccgagaaattgagcagcgacatacaatggatggccctcggcaagatgccactttagatgaggaagaggacatggtgatcatttataacagagttcccaaaacggcaagcacttcatttaccaatatcgcctatgacctgtgtgcaaagaataaataccatgtccttcatatcaacactaccaaaaataatccagtgatgtcattgcaagatcaggtgcgctttgtaaagaatataacttcctggaaagagatgaaaccaggattttatcatggacacgtttcttacttggattttgcaaaatttggtgtgaagaagaaaccaatttacattaatgtcataagggatcctattgagaggctagtttcttattattactttctgagatttggagatgattatagaccagggttacggagacgaaaacaaggagacaaaaagacctttgatgaatgtgtagcagaaggtggctcagactgtgctccagagaagctctggcttcaaatcccgttcttctgtggccatagctccgaatgctggtaggggagataaagttggctcagattgattatcatccttattatctctgtaatctgtgtttcatttcacaagggctagatatagggaaatcggtgaaagactagactaaaaataacatgtaattcagtaatatctagttttgcagttacttttaaatgcatttaaaagattcctcatgtagagtgatatcctaatatccttgcattgttttctgagatgccggtttttagtatttcttatttttggtgttatgttttgctgtattccagcagagctcttagagactgggggtgggggtgggtgtcataaatcttattttgtccaaagcttactgttttagctattcatgttaaattaagaaaaggcttagtgggttaaaattcacctggttttactgttaaactgattttgactttaagagaagccaaggttatggctgtggtttagtttgctagtaaatatcaagtggaaaataaagatactttaataa

SEQ ID NO: 13466 - DNA, 3932 bp, Homo sapiens
  source 1..3932: mol_type = unassigned DNA
ggcgatggtgacacatgcggcggcggcgcgccggcggcaggaccatggttgagcgcgccagcaagttcgtgctggtggtggcgggctcggtgtgcttcatgctcatcttgtaccagtacgcgggcccaggactgagcctgggcgcgcccggcggccgcgcgccgcccgacgacctggacctgttccccacacccgacccccactacgagaagaagtactacttcccggtccgcgagctggagcgctcgctgcgcttcgacatgaagggcgacgacgtgatcgtcttcctgcacatccagaagacgggcggcaccaccttcggccgccacctcgtgcagaacgtacgcctcgaggtgccgtgcgactgccggcccggccagaagaagtgcacctgctaccggcccaaccgccgcgagacttggctcttctcccgcttctccaccggctggagctgcgggctgcacgccgactggaccgagctcaccaactgcgtgcccggcgtgctggaccgccgcgactccgccgcgctgcgcacgcccaggaagttctactacatcaccctgctacgagaccccgtgtcccgctacctgagcgagtggcggcatgtgcagaggggtgccacgtggaagacgtcgttgcatatgtgtgatgggcgcacgcccacgcctgaggagctgccgccctgctacgagggcacggactggtcgggctgcacgctacaggagttcatggactgcccgtacaacctggccaacaaccgccaggtgcgcatgctggccgacctgagcctggtgggctgctacaacctgtccttcatccccgagggcaagcgggcccagctgctgctcgagagcgccaagaagaacctgcggggcatggccttcttcggcctgaccgagttccagcgcaagacgcagtacctgttcgagcggacgttcaacctcaagttcatccggcccttcatgcagtacaatagcacgcgggcgggcggcgtggaggtggatgaagacaccatccggcgcatcgaggagctcaacgacctggacatgcagctgtacgactacgccaaggacctcttccagcagcgctaccagtacaagcggcagctggagcgcagggagcagcgcctgaggagccgcgaggagcgtctgctgcaccgggccaaggaggcactgccgcgggaggatgccgacgagccgggccgcgtgcccaccgaggactacatgagccacatcattgagaagtggtagtggcggtggtggccacggggaggcctcttggggggtgtgggggataaaacaggacagacgacaggtccacccaagactgtcaagggatgagcatcccaaacctgctccacagaggtagctgcgtcctgaaaaaaaacagagcagggatgtagtggggctgggcagggatgggggcttgagaaatcaacaggtgcagcccagtgggtcagaggaaagcgtgctcgaaggatgccatggtcagggcagggcctccagagcaggtgttgtgcctggagctgctctcctggcctccttggatttatcgcaaaaactgaaggtttgcgcaagagacgaggacagcggaaagtggacctgccaggccgggagtgtgtccctcaccaactatgcacacagcactcgctcttagctcctctgtccgggctactaggagtgagaccagcttctggcaactgccccagctccaggccatcccatagcccctcctcttctggctgcccccaatgccccgaggcctggggagcccccagctcacccatctgtagctccctcaaagtcagggcccaccccatctgaggcagagaagactcgagtccagcccccaggaagcctgctcccctctctggcccatggtcctgcttcatgctttgggtcaggaggccaaagctgatgttcaggccccacccactccctacagtcctcagaccaaggaggggtttgggtagtaggcccgagctgcattgccggccttcctcgggccaactggcagcccaggagtggggaggctttggccagggatgctgccacttgtgcgtgagtccgcggctggcccttggaggtgaccatccaggcaggcctggctcagactggaagggctggggaccgagggctcccctgcctctgttctcctttctgacccactgggatttgctagcaggctgccccagccccatcaccgaaacacatactcaagagctcaaataccactgctcccaccagcgtacggattaagttcatcaggcttccatcggctggagcatgggaccatagcccctgcccaggagccgtaccctcggaccacagtggctctgtatggccaggaactgggactcgagctttcagattctcaactagccttggcaaaacagctgtaggtggcctccctgacaacagacactcagccctccccaccctggctctccttgcatttccccatgctccccaccccctggcaaaaggctggccatgctctgttcccagcagccgcgcaggtttccccactggctgcaatggccctaccaaaagccatgttgcatatccgttgtaagcacgtgccctgtgccctgtccccattccttatgccctaggaggccaagctggtgtctctaggagggcccacacaggcaccctggatcccccagagagtagattggtgtgctcaggccgcaggctgactcagaggtagggcagtgggctctgcaggccacctggctggggttggtgggggtcctctctcctgccccagcttccactcagccaccacagttgccacaccatggggtggagacgtgggtcaccacgggcttgggagcaagcgccttctgcagcacaggaagccgaagctggggtcaggtgaggtcgctacccctggaggtctggcataagggccccaccctcaggtctcctacactggccccattttactttggggtccaaggacaggatggtcaacagggcagggtggacagcgtgccagcgccgcgcagggccacctccctgggtggatgcatcacactaaggaagtgagtgccaaggggatttagtggtgtggttctttcaaagggaggtcagggtcaatgggaatctgctcggacactcaacatgggggtgggtgcactccttggaggaggaggaacacgttcaggggattgtgaggtcttgcacaagccacgtggggcaccttggcttcccggcaggaggtggacacccagccagaggcctggctcaaggtgacctcaccttcaccatgggcttcctgggtgcgcgggcctgagcgcaggttgttttgtacatattggaatatgtgttaacttatgccccgcatcccaactcacacggaagcacgggtcttgtctcagtctcttcgctgcatttggaaagcagtctcctctcgggccagcgccgggctgaggtgtccagaggcggcggcagctggcagtgccctcagcccccaagtgtccagcctggcacttcccattcaggccacctgctttgggtcaacagttcctttgccagcagcatctcctaaattgtaaggactctgtccaccggggccctcccagggctgtgaggacggaaacaggcagggagtggagctaacagcttagtcaccaggacccccagacctgcaaacgtcccctcctggaaggggaagccaggaacagcagaactgcccacaaaacaaggctgtgaacttttcgggaactggaactgtttaacttgaacccaggattgtttaaagctttatttatttatagcttcttcttaaaaaaaagtgttgaagaaattttttggttattcatacaaaaaaatgagttgatgatggaaaagcaagtcataatcatctaattgtttttgtctaggtcgagaatgaatgttagctgatgaaataaaccctgacaagga

SEQ ID NO: 13467 - DNA, 831 bp, Homo sapiens
  source 1..831: mol_type = unassigned DNA
atgctcttcctatttgccgtgatcgtcctccaatacgtgtgccccggcacagaatgccagctcctccgcctgcaggcgttcagctccccggtgccggacccgtaccgctcggaggatgagagctccgccaggttcgtgccccgctacaatttcacccgcggcgacctcctgcgcaaggtagacttcgacatcaagggcgatgacctgatcgtgttcctgcacatccagaagaccgggggcaccactttcggccgccacttggtgcgtaacatccagctggagcagccgtgcgagtgccgcgtgggtcagaagaaatgcacttgccaccggccgggtaagcgggaaacctggctcttctccaggttctccacgggctggagctgcgggttgcacgccgactggaccgagctcaccagctgtgtgccctccgtggtggacggcaagcgcgacgccaggctgagaccgtccaggtggaggatttttcagattctagatgcagcaagtaaggataaacggggttctccaaacactaacgcaggcgccaactctccgtcatccacaaagacccggaacacatctaagagtgggaagaacttccactacatcaccatcctccgagacccagtgtcccggtacttgagtgagtggaggcatgtccagagaggggcaacatggaaagcatccctgcatgtctgcgatggaaggcctccaacctccgaagagctgcccagctgctacactggcgatgactggtctggctgccccctcaaagagtttatggactgtccctacaatctagccaacaaccgctgcgcatgctctccgacctga

SEQ ID NO: 13468 - DNA, 1389 bp, Homo sapiens
  source 1..1389: mol_type = unassigned DNA
atggatgagaaatccaacaagctgctgctagctttggtgatgctcttcctatttgccgtgatcgtcctccaatacgtgtgccccggcacagaatgccagctcctccgcctgcaggcgttcagctccccggtgccggacccgtaccgctcggaggatgagagctccgccaggttcgtgccccgctacaatttcacccgcggcgacctcctgcgcaaggtagacttcgacatcaagggcgatgacctgatcgtgttcctgcacatccagaagaccgggggcaccactttcggccgccacttggtgcgtaacatccagctggagcagccgtgcgagtgccgcgtgggtcagaagaaatgcacttgccaccggccgggtaagcgggaaacctggctcttctccaggttctccacgggctggagctgcgggttgcacgccgactggaccgagctcaccagctgtgtgccctccgtggtggacggcaagcgcgacgccaggctgagaccgtccaggtggaggatttttcagattctagatgcagcaagtaaggataaacggggttctccaaacactaacgcaggcgccaactctccgtcatccacaaagacccggaacacatctaagagtgggaagaacttccactacatcaccatcctccgagacccagtgtcccggtacttgagtgagtggaggcatgtccagagaggggcaacatggaaagcatccctgcatgtctgcgatggaaggcctccaacctccgaagagctgcccagctgctacactggcgatgactggtctggctgccccctcaaagagtttatggactgtccctacaatctagccaacaaccgccaggtgcgcatgctctccgacctgaccctggtaggctgctacaacctctctgtcatgcctgaaaagcaaagaaacaaggtccttctggaaagtgccaagtcaaatctgaagcacatggcgttcttcggcctcactgagtttcagcggaagacccaatatctgtttgagaaaaccttcaacatgaactttatttcgccatttacccagtataataccactagggcctctagtgtagagatcaatgaggaaattcaaaagcgtattgagggactgaattttctggatatggagttgtacagctatgccaaagacctttttttgcagaggtatcagtttatgaggcagaaagagcatcaggaggccaggcgaaagcgtcaggaacaacgcaaatttctgaagggaaggctccttcagacccatttccagagccagggtcagggccagagccagaatccgaatcagaatcagagcaaggagcagaatgataacaccagcaatggcaccaacgactacataggcagtgtagagaaatggcgttaa

SEQ ID NO: 13469 - DNA, 4441 bp, Homo sapiens
  source 1..4441: mol_type = unassigned DNA
aagccaggctgacctttatgctcccagaatcatcagccttttcattggaaaccatggaaggacggttctgggaaaataatgaaaatcataccacaccatagagacaaccagaagccctgctcagatgacagagttctcctcgccttccagaaaatgcccccgcttccgctggagaatggaaattggcaaagagagacggaaaagctccaatttgcgcctttgctattttaggagaggttgaaattacgagccaaagtggagtgatgcgctaagcggagtgacctccgtactccaagaaaagagaaaacccaggttctctgcttgtgaagtggctcgagctcttaggcgtgaggcattattatataaattcaagctcgctcgtgatccttagtaccctgagttgcctgaaggggggaatggcactgcctgcgtgtgcagtccgggagttcgagccgccgcggcaaccggagcgaggagcgcccgtccgcaccacctgtccccgccggcattccagagtagaggccgaattggcagcgagccggcccgggtcggtcgccgcctcagttcgcgcgggccctcctaggggtgtgtctcacggattccacacccggccgctcctggacaagccccgaaaggcgtcttcttccctggcgggagccgcgtgcgccccgcttttcgcgctgctgtcccggggccgccgcaggcggatgcacgtcctcaggcgacgctgggacctgggctccctctgccgggccctgctcactcggggcctggccgccctgggccactcgctgaagcacgtgctcggtgcgatcttctccaagattttcggccccatggccagcgtcgggaacatggatgagaaatccaacaagctgctgctagctttggtgatgctcttcctatttgccgtgatcgtcctccaatacgtgtgccccggcacagaatgccagctcctccgcctgcaggcgttcagctccccggtgccggacccgtaccgctcggaggatgagagctccgccaggttcgtgccccgctacaatttcacccgcggcgacctcctgcgcaaggtagacttcgacatcaagggcgatgacctgatcgtgttcctgcacatccagaagaccgggggcaccactttcggccgccacttggtgcgtaacatccagctggagcagccgtgcgagtgccgcgtgggtcagaagaaatgcacttgccaccggccgggtaagcgggaaacctggctcttctccaggttctccacgggctggagctgcgggttgcacgccgactggaccgagctcaccagctgtgtgccctccgtggtggacggcaagcgcgacgccaggctgagaccgtccaggaacttccactacatcaccatcctccgagacccagtgtcccggtacttgagtgagtggaggcatgtccagagaggggcaacatggaaagcatccctgcatgtctgcgatggaaggcctccaacctccgaagagctgcccagctgctacactggcgatgactggtctggctgccccctcaaagagtttatggactgtccctacaatctagccaacaaccgccaggtgcgcatgctctccgacctgaccctggtaggctgctacaacctctctgtcatgcctgaaaagcaaagaaacaaggtccttctggaaagtgccaagtcaaatctgaagcacatggcgttcttcggcctcactgagtttcagcggaagacccaatatctgtttgagaaaaccttcaacatgaactttatttcgccatttacccagtataataccactagggcctctagtgtagagatcaatgaggaaattcaaaagcgtattgagggactgaattttctggatatggagttgtacagctatgccaaagacctttttttgcagaggtatcagtttatgaggcagaaagagcatcaggaggccaggcgaaagcgtcaggaacaacgcaaatttctgaagggaaggctccttcagacccatttccagagccagggtcagggccagagccagaatccgaatcagaatcagagtcagaacccaaatccgaatgccaatcagaacctgactcagaatctgatgcagaatctgactcagagtttgagccagaaggagaaccgggaaagcccgaagcagaactcaggcaaggagcagaatgataacaccagcaatggcaccaacgactacataggcagtgtagagaaatggcgttaaatggctcaaaaaggcctgtacatacttctcccaaagcgccactgaaaagatggcatagcttaaaagatgaaagtgtccaaacacatcctgcttccttcattggggaagttttaaaaaaaagtttagatgttgcctttacagttgcctttcaattcagtgttatactgtgtgtaggtaaaacaaatctcaatatggaattaaattgtctttttggggttggactaaatatgaaatccgaaagccaaaccagactcaccagaaattgctgtttagatattttaagaagttcttaaattagttatggagacaaagtgaaaacataaaatgtgaccatttaacttatggctaagaaatggactttaaattattcatgatacactgttaaaacccaatcttggaatcaaatattttttccaggggtgagaataagtataaacataaagcaactaaaatgaaacataaaaccttttattttcttctgattttaacaaggaatctatttaaatagaataacaactgatggtgaatcttaccgagctgtagaaaataaaaaattcctctccaaacatgggtagttttatgtcaaaatattggcttttcaagaacaggactcatatcttgatatttaagagatgtttaaaattttaaactttttctaccttctactgtttaaaggttttacacagggtgtatctcacattaaacaaaacacctttttttcaaaatgaaataccaatgtaaagatctaatttccaggcgctttcagggcactgtaatttcaacaatactggaatcattttggcgctgcttctcattcattttaaggcttctctgaattgtgctcattccaaattaacccatgtatagaatctttcttcatcatctaaatggtgtgttgctgaagttattgtggtatataatcctggattaaagtcaggactttctttctatagaattattttatcaatatttgtgtagtgaggtcctaatcaagaaacttgaacaggataatgtgtctaaaaatattgctgaagttattcttgatcagatagaatttaacctaaaatgtgaactcttacttactttttgtacatctctattgtaatgtttccagttgggccaactatttctagccctttagttctttttcatgttgacagatttgtagacaattacaaaagccaaaaaaggataaaataagcattaggaaggctagccagttattcaatagcaccttgataatgtgggcaaacccttctacaaagtttttgttttgaaaagagcaaaagtaaaaagtgttctgtagtgaggttacatatcaggaacatatgagttgagcagagtaatttggtagtgtaagtcgatgcaaaaatacttctatggtacctattacaagctgaccaagataaaaagaagtatgtaacccactgtgctgtcaagcatcatgattccgggcagttttcattttactgtggattttgctatacttatgcaaggacttacactaacctcctggctgtaaatcaaacaaggtgactgaaagtggcatttatgttttcacaagggacatgcttagaagtgtgaccataaagtcacatcttgtacaatctgctcatgtgtttcatctgtagtaatatagccacaaactggacaagaagctgggtatttgggtttaaaatagattttcttgactctgagcttgtatcagtatttctagcttttgttttgtctgacagtattgcagtcttgaaaatcctgagagctaaaaaactgaaaggaatttttccacaccttgaagtcacagtgttttagagtaaaactattttgtgtacaattgtgtttttaaaatagttagtagatcactatggtatttcaattttctttagttttaattgaaaatgtttgcttttaaaactgataggtattgttggaaagcaggatgaagcctgagccagtggaaaagcttgttacagaaaaaacattttgtgttattgctgtggtgtgcatgatttgcaaagattaagtgcattttctctgtctatactgattattgtatatagaggatgttataaatatacatatacatttttgccattatgtaaatcccatgatttcaactgtaaacatctgtccattggtgtagctttacaaaccattcactgattttgtgtaatttaacaatagatatgaaataaagtttaaattac

SEQ ID NO: 13470 - DNA, 3607 bp, Homo sapiens
  source 1..3607: mol_type = unassigned DNA
ccagcgtcgggaacatggatgagaaatccaacaagctgctgctagctttggtgatgctcttcctatttgccgtgatcgtcctccaatacgtgtgccccggcacagaatgccagctcctccgcctgcaggcgttcagctccccggtgccggacccgtaccgctcggaggatgagagctccgccaggttcgtgccccgctacaatttcacccgcggcgacctcctgcgcaaggtagacttcgacatcaagggcgatgacctgatcgtgttcctgcacatccagaagaccgggggcaccactttcggccgccacttggtgcgtaacatccagctggagcagccgtgcgagtgccgcgtgggtcagaagaaatgcacttgccaccggccgggtaagcgggaaacctggctcttctccaggttctccacgggctggagctgcgggttgcacgccgactggaccgagctcaccagctgtgtgccctccgtggtggacggcaagcgcgacgccaggctgagaccgtccaggaacttccactacatcaccatcctccgagacccagtgtcccggtacttgagtgagtggaggcatgtccagagaggggcaacatggaaagcatccctgcatgtctgcgatggaaggcctccaacctccgaagagctgcccagctgctacactggcgatgactggtctggctgccccctcaaagagtttatggactgtccctacaatctagccaacaaccgccaggtgcgcatgctctccgacctgaccctggtaggctgctacaacctctctgtcatgcctgaaaagcaaagaaacaaggtccttctggaaagtgccaagtcaaatctgaagcacatggcgttcttcggcctcactgagtttcagcggaagacccaatatctgtttgagaaaaccttcaacatgaactttatttcgccatttacccagtataataccactagggcctctagtgtagagatcaatgaggaaattcaaaagcgtattgagggactgaattttctggatatggagttgtacagctatgccaaagacctttttttgcagaggtatcagtttatgaggcagaaagagcatcaggaggccaggcgaaagcgtcaggaacaacgcaaatttctgaagggaaggctccttcagacccatttccagagccagggtcagggccagagccagaatccgaatcagaatcagagtcagaacccaaatccgaatgccaatcagaacctgactcagaatctgatgcagaatctgactcagagtttgagccagaaggagaaccgggaaagcccgaagcagaactcaggcaaggagcagaatgataacaccagcaatggcaccaacgactacataggcagtgtagagaaatggcgttaaatggctcaaaaaggcctgtacatacttctcccaaagcgccactgaaaagatggcatagcttaaaagatgaaagtgtccaaacacatcctgcttccttcattggggaagttttaaaaaaaagtttagatgttgcctttacagttgcctttcaattcagtgttatactgtgtgtaggtaaaacaaatctcaatatggaattaaattgtctttttggggttggactaaatatgaaatccgaaagccaaaccagactcaccagaaattgctgtttagatattttaagaagttcttaaattagttatggagacaaagtgaaaacataaaatgtgaccatttaacttatggctaagaaatggactttaaattattcatgatacactgttaaaacccaatcttggaatcaaatattttttccaggggtgagaataagtataaacataaagcaactaaaatgaaacataaaaccttttattttcttctgattttaacaaggaatctatttaaatagaataacaactgatggtgaatcttaccgagctgtagaaaataaaaaattcctctccaaacatgggtagttttatgtcaaaatattggcttttcaagaacaggactcatatcttgatatttaagagatgtttaaaattttaaactttttctaccttctactgtttaaaggttttacacagggtgtatctcacattaaacaaaacacctttttttcaaaatgaaataccaatgtaaagatctaatttccaggcgctttcagggcactgtaatttcaacaatactggaatcattttggcgctgcttctcattcattttaaggcttctctgaattgtgctcattccaaattaacccatgtatagaatctttcttcatcatctaaatggtgtgttgctgaagttattgtggtatataatcctggattaaagtcaggactttctttctatagaattattttatcaatatttgtgtagtgaggtcctaatcaagaaacttgaacaggataatgtgtctaaaaatattgctgaagttattcttgatcagatagaatttaacctaaaatgtgaactcttacttactttttgtacatctctattgtaatgtttccagttgggccaactatttctagccctttagttctttttcatgttgacagatttgtagacaattacaaaagccaaaaaaggataaaataagcattaggaaggctagccagttattcaatagcaccttgataatgtgggcaaacccttctacaaagtttttgttttgaaaagagcaaaagtaaaaagtgttctgtagtgaggttacatatcaggaacatatgagttgagcagagtaatttggtagtgtaagtcgatgcaaaaatacttctatggtacctattacaagctgaccaagataaaaagaagtatgtaacccactgtgctgtcaagcatcatgattccgggcagttttcattttactgtggattttgctatacttatgcaaggacttacactaacctcctggctgtaaatcaaacaaggtgactgaaagtggcatttatgttttcacaagggacatgcttagaagtgtgaccataaagtcacatcttgtacaatctgctcatgtgtttcatctgtagtaatatagccacaaactggacaagaagctgggtatttgggtttaaaatagattttcttgactctgagcttgtatcagtatttctagcttttgttttgtctgacagtattgcagtcttgaaaatcctgagagctaaaaaactgaaaggaatttttccacaccttgaagtcacagtgttttagagtaaaactattttgtgtacaattgtgtttttaaaatagttagtagatcactatggtatttcaattttctttagttttaattgaaaatgtttgcttttaaaactgataggtattgttggaaagcaggatgaagcctgagccagtggaaaagcttgttacagaaaaaacattttgtgttattgctgtggtgtgcatgatttgcaaagattaagtgcattttctctgtctatactgattattgtatatagaggatgttataaatatacatatacatttttgccattatgtaaatcccatgatttcaactgtaaacatctgtccattggtgtagctttacaaaccattcactgattttgtgtaatttaacaatagatatgaaataaagtttaaattacaggctc

SEQ ID NO: 13471 - DNA, 1246 bp, Homo sapiens
  source 1..1246: mol_type = unassigned DNA
atctatgagctgtttccctaaggtttgggaagctggagaaatatgctcttaaagcacaatggaaaacttttattattttatctcctctcctaccaagctcttgctagcgactggttttactgttcctttaacaggtggaggatttttcagattctagatgcagcaaggaacttccactacatcaccatcctccgagacccagtgtcccggtacttgagtgagtggaggcatgtccagagaggggcaacatggaaagcatccctgcatgtctgcgatggaaggcctccaacctccgaagagctgcccagctgctacactggcgatgactggtctggctgccccctcaaagagtttatggactgtccctacaatctagccaacaaccgccaggtgcgcatgctctccgacctgaccctggtaggctgctacaacctctctgtcatgcctgaaaagcaaagaaacaaggtccttctggaaagtgccaagtcaaatctgaagcacatggcgttcttcggcctcactgagtttcagcggaagacccaatatctgtttgagaaaaccttcaacatgaactttatttcgccatttacccagtataataccactagggcctctagtgtagagatcaatgaggaaattcaaaagcgtattgagggactgaattttctggatatggagttgtacagctatgccaaagacctttttttgcagaggtatcagtttatgaggcagaaagagcatcaggaggccaggcgaaagcgtcaggaacaacgcaaatttctgaagggaaggctccttcagacccatttccagagccagggtcagggccagagccagaatccgaatcagaatcagagtcagaacccaaatccgaatgccaatcagaacctgactcagaatctgatgcagaatctgactcagagtttgagccagaaggagaaccgggaaagcccgaagcagaactcaggcaaggagcagaatgataacaccagcaatggcaccaacgactacataggcagtgtagagaaatggcgttaaatggctcaaaaaggcctgtacatacttctcccaaagcgccactgaaaagatggcatagcttaaaagatgaaagtgtccaaacacatcctgcttccttcattggggaagttttaaaaaaaagtttagatgttgcctttacagttgcctttcaattcagtgttatactgtgtgtaggtaaaacaaatctcaatatggaattaaattgtct

SEQ ID NO: 13472 - DNA, 2607 bp, Homo sapiens
  source 1..2607: mol_type = unassigned DNA
aagccaggctgacctttatgctcccagaatcatcagccttttcattggaaaccatggaaggacggttctgggaaaataatgaaaatcataccacaccatagagacaaccagaagccctgctcagatgacagagttctcctcgccttccagaaaatgcccccgcttccgctggagaatggaaattggcaaagagagacggaaaagctccaatttgcgcctttgctattttaggagaggttgaaattacgagccaaagtggagtgatgcgctaagcggagtgacctccgtactccaagaaaagagaaaacccaggttctctgcttgtgaagtggctcgagctcttaggcgtgaggcattattatataaattcaagctcgctcgtgatccttagtaccctgagttgcctgaaggggggaatggcactgcctgcgtgtgcagtccgggagttcgagccgccgcggcaaccggagcgaggagcgcccgtccgcaccacctgtccccgccggcattccagagtagaggccgaattggcagcgagccggcccgggtcggtcgccgcctcagttcgcgcgggccctcctaggggtgtgtctcacggattccacacccggccgctcctggacaagccccgaaaggcgtcttcttccctggcgggagccgcgtgcgccccgcttttcgcgctgctgtcccggggccgccgcaggcggatgcacgtcctcaggcgacgctgggacctgggctccctctgccgggccctgctcactcggggcctggccgccctgggccactcgctgaagcacgtgctcggtgcgatcttctccaagattttcggccccatggccagcgtcgggaacatggatgagaaatccaacaagctgctgctagctttggtgatgctcttcctatttgccgtgatcgtcctccaatacgtgtgccccggcacagaatgccagctcctccgcctgcaggcgttcagctccccggtgccggacccgtaccgctcggaggatgagagctccgccaggttcgtgccccgctacaatttcacccgcggcgacctcctgcgcaaggtagacttcgacatcaagggcgatgacctgatcgtgttcctgcacatccagaagaccgggggcaccactttcggccgccacttggtgcgtaacatccagctggagcagccgtgcgagtgccgcgtgggtcagaagaaatgcacttgccaccggccgggtaagcgggaaacctggctcttctccaggttctccacgggctggagctgcgggttgcacgccgactggaccgagctcaccagctgtgtgccctccgtggtggacggcaagcgcgacgccaggctgagaccgtccaggtggaggatttttcagattctagatgcagcaagtaaggataaacggggttctccaaacactaacgcaggcgccaactctccgtcatccacaaagacccggaacacatctaagagtgggaagaacttccactacatcaccatcctccgagacccagtgtcccggtacttgagtgagtggaggcatgtccagagaggggcaacatggaaagcatccctgcatgtctgcgatggaaggcctccaacctccgaagagctgcccagctgctacactggcgatgactggtctggctgccccctcaaagagtttatggactgtccctacaatctagccaacaaccgccaggtgcgcatgctctccgacctgaccctggtaggctgctacaacctctctgtcatgcctgaaaagcaaagaaacaaggtccttctggaaagtgccaagtcaaatctgaagcacatggcgttcttcggcctcactgagtttcagcggaagacccaatatctgtttgagaaaaccttcaacatgaactttatttcgccatttacccagtataataccactagggcctctagtgtagagatcaatgaggaaattcaaaagcgtattgagggactgaattttctggatatggagttgtacagctatgccaaagacctttttttgcagaggtatcagtttatgaggcagaaagagcatcaggaggccaggcgaaagcgtcaggaacaacgcaaatttctgaagggaaggctccttcagacccatttccagagccagggtcagggccagagccagaatccgaatcagaatcagagtcagaacccaaatccgaatgccaatcagaacctgactcagaatctgatgcagaatctgactcagagtttgagccagaaggagaaccgggaaagcccgaagcagaactcaggcaaggagcagaatgataacaccagcaatggcaccaacgactacataggcagtgtagagaaatggcgttaaatggctcaaaaaggcctgtacatacttctcccaaagcgccactgaaaagatggcatagcttaaaagatgaaagtgtccaaacacatcctgcttccttcattggggaagttttaaaaaaaagtttagatgttgcctttacagttgcctttcaattcagtgttatactgtgtgtaggtaaaacaaatctcaatatggaattaaattgtctttttggggttggactaaatatgaaatccgaaagccaaaccagact

SEQ ID NO: 13473 - DNA, 1659 bp, Homo sapiens
  source 1..1659: mol_type = unassigned DNA
gcctgccggcctgagagcgggaccatggatgaaaggttcaacaagtggctgctgacgccggtgctcactctcctcttcgtggtcatcatgtaccagtacgtgtccccctcctgcaccagctcctgcaccaacttcggggagcagccccgcgcgggggaggccggcccgcccgccgtcccgggtcccgcccgccgggctcaggcgccgccggaggagtgggagcggcggccccagttgcccccgccgccccgggggccccccgagggacctcggggggccgcggcgccggaggaggaggacgaggagcccggagacccccgggagggggaggaagaggaggaggaagacgagccggaccccgaggccccggaaaacggctccctgccccgattcgtgccgcgcttcaacttcagcctgaaggacctgacccgcttcgtggatttcaacatcaaagggcgcgacgtgatcgtgttcctccacatccagaagacggggggcaccactttcggccggcacctggtgaagaacatccggctggagcagccttgtagctgcaaagcgggtcagaagaagtgcacctgccaccggcctggcaagaaggagacgtggctcttctcccgcttctccaccggctggagctgcgggctgcacgccgactggacggagctcaccaactgcgtgccggccatcatggagaagaaggactgtccccgcaaccacagccacaccaggaatttctattacatcacaatgttacgggatccagtgtcacgttacctgagcgagtggaaacatgtccagagaggggccacttggaaaacctctcttcatatgtgtgatggaagaagccccaccccagatgagctgcctacctgctaccctggggatgactggtctggggtcagcttgcgggagtttatggattgcacctacaacctggctaacaatcgccaggtgcgcatgctggctgacctcagcctggtgggctgctataacttgactttcatgaacgagagtgaaagaaacaccatcctgttgcagagtgcaaagaacaacctgaagaacatggccttctttgggctcactgagttccagaggaagacacagtttctctttgagagaacattcaacctcaagttcatctcccccttcacacagttcaacatcacgcgggcttctaacgtggagatcaacgagggtgcccgccaacgcattgaggatctaaacttcctggacatgcagctttacgagtatgcaaaagatctcttccagcagcgctaccaccacaccaagcagctagagcaccagagggaccgccagaagcggcgggaggagcggaggctgcagcgagagcacagggaccaccagtggcccaaagaagatggggctgcagaagggactgtcaccgaggactacaacagccaggtggtgagatggtgacctcctgccctctcctctctcaggagggggagggtgagcaggcacattgactttctgttgaggtaccttggagaagctgagccattctgaggacatctggctgtgtgtgcttgatttggacatcttcttccttctttgtcttcatttttatccagctggagattatccgtcttgttcttttttttcttgacattttgcaattggtgatattaagtaggg

SEQ ID NO: 13474 - DNA, 538 bp, Homo sapiens
  source 1..538: mol_type = unassigned DNA
cagcacagacccccccacccccgccggccgctgtggcggtcgcagtgacaccagtgccccagttcccaagagcctgcacggaggccgagtttgcctgccacagctacaatgagtgtgtggccctggagtatcgctgtgaccggcggcccgactgcagggacatgtctgatgagctcaattgtgaggagccagtcctgggtatcagccccacattctctctccttgtggagacgacatctttaccgccccggccagagacaaccatcatgcgacagccaccagtcacccacgctcctcagcccctgcttcccggttccgtcaggcccctgccctgtgggccccaggaggccgcatgccgcaatgggcactgcatccccagagactacctctgcgacggacaggaggactgcgaggacggcagcgatgagctagactgtggccccccgccaccctgtgagcccaacgagttcccctgcgggaatggacattgtgccctcaagctgtggcgctgcgatggtgactttgactgtgaggaccg

SEQ ID NO: 13475 - DNA, 411 bp, Homo sapiens
  source 1..411: mol_type = unassigned DNA
cgggacacccccactcaccttccagtggagccgcgtgggcagcagccttcctgggagggcgaccgccaggaacgagctgctgcactttgagcgtgcagcccctgaggactcaggccgctaccgctgccgggtcaccaacaaggtgggctcagccgaggcctttgcccagctgctcgtccaagaatccagaacttggaccagagctgccaagggacgtatatatgccaggcccatggaccttgggggaaggcccaggccagtgcccagctggttatccaaggtaggagggtggcttcaggcctctgctaagagcagggaacagagatgagaaaggcagagaggcacaaggcccagaccctgttccctaggaatccccctaaatgtgtcagaataaagagaattattccattt

SEQ ID NO: 13476 - DNA, 14327 bp, Homo sapiens
  source 1..14327: mol_type = unassigned DNA
ggccggcgagcgggcggctgcgggcggcgcggagcgggcggcgcggagcgagcgagcgagagagcggcgcgggccgggccatggggtggcgggcggcgggcgcgctgctgctggcgctgctgctgcacgggcggctgctggcggtgacccatgggctgagggcatacgatggcttgtctctgcctgaggacatagagaccgtcacagcaagccaaatgcgctggacacattcgtacctttctgatgatgaggacatgctggctgacagcatctcaggagacgacctgggcagtggggacctgggcagcggggacttccagatggtttatttccgagccctggtgaatttcactcgctccatcgagtacagccctcagctggaggatgcaggctccagagagttccgagaggtgtccgaggctgtggtagacacgctggagtcggagtacttgaaaattcccggagaccaggttgtcagtgtggtgttcatcaaggagctggatggctgggtttttgtggagctggatgtgggctcggaagggaatgcggatggggctcagattcaggagatgctgctcagggtcatctccagcggctctgtggcctcctacgtcacctctccccagggattccagttccgacgcctgggcacagtgccccagttcccaagagcctgcacggaggccgagtttgcctgccacagctacaatgagtgtgtggccctggagtatcgctgtgaccggcggcccgactgcagggacatgtctgatgagctcaattgtgaggagccagtcctgggtatcagccccacattctctctccttgtggagacgacatctttaccgccccggccagagacaaccatcatgcgacagccaccagtcacccacgctcctcagcccctgcttcccggttccgtcaggcccctgccctgtgggccccaggaggccgcatgccgcaatgggcactgcatccccagagactacctctgcgacggacaggaggactgcgaggacggcagcgatgagctagactgtggccccccgccaccctgtgagcccaacgagttcccctgcgggaatggacattgtgccctcaagctgtggcgctgcgatggtgactttgactgtgaggaccgaactgatgaagccaactgccccaccaagcgtcctgaggaagtgtgcgggcccacacagttccgatgcgtctctaccaacatgtgcatcccagccagcttccactgtgacgaggagagcgactgtcctgaccggagcgacgagtttggctgcatgcccccccaggtggtgacacctccccgggagtccatccaggcttcccggggccagacagtgaccttcacctgcgtggccattggcgtccccacccccatcatcaattggaggctcaactggggccacatcccctctcatcccagggtgacagtgaccagcgagggtggccgtggcacactgatcatccgtgatgtgaaggagtcagaccagggtgcctacacctgtgaggccatgaacgcccggggcatggtgtttggcattcctgacggtgtccttgagctcgtcccacaacgaggcccctgccctgacggccacttctacctggagcacagcgccgcctgcctgccctgcttctgctttggcatcaccagcgtgtgccagagcacccgccgcttccgggaccagatcaggctgcgctttgaccaacccgatgacttcaagggtgtgaatgtgacaatgcctgcgcagcccggcacgccacccctctcctccacgcagctgcagatcgacccatccctgcacgagttccagctagtcgacctgtcccgccgcttcctcgtccacgactccttctgggctctgcctgaacagttcctgggcaacaaggtggactcctatggcggctccctgcgttacaacgtgcgctacgagttggcccgtggcatgctggagccagtgcagcggccggacgtggtcctcatgggtgccgggtaccgcctcctctcccgaggccacacacccacccaacctggtgctctgaaccagcgccaggtccagttctctgaggagcactgggtccatgagtctggccggccggtgcagcgcgcggagctgctgcaggtgctgcagagcctggaggccgtgctcatccagaccgtgtacaacaccaagatggccagcgtgggacttagcgacatcgccatggataccaccgtcacccatgccaccagccatggccgtgcccacagtgtggaggagtgcagatgccccattggctattctggcttgtcctgcgagagctgtgatgcccacttcactcgggtgcctggtgggccctacctgggcacctgctctggttgcaattgcaatggccatgccagctcctgtgaccctgtgtatggccactgcctgaattgccagcacaacacggaggggccacagtgcaacaagtgcaaggctggcttctttggggacgccatgaaggccacggccacttcctgccggccctgcccttgcccatacatcgatgcctcccgcagattctcagacacttgcttcctggacacggatggccaagccacatgtgacgcctgtgccccaggctacactggccgccgctgtgagagctgtgcccccggatacgagggcaaccccatccagcccggcgggaagtgcaggcccgtcaaccaggagattgtgcgctgtgacgagcgtggcagcatggggacctccggggaggcctgccgctgtaagaacaatgtggtggggcgcttgtgcaatgaatgtgctgacggctctttccacctgagtacccgaaaccccgatggctgcctcaagtgcttctgcatgggtgtcagtcgccactgcaccagctcttcatggagccgtgcccagttgcatggggcctctgaggagcctggtcacttcagcctgaccaacgccgcaagcacccacaccaccaacgagggcatcttctcccccacgcccggggaactgggattctcctccttccacagactcttatctggaccctacttctggagcctcccttcacgcttcctgggggacaaggtgacctcctatggaggagagctgcgcttcacagtgacccagaggtcccagccgggctccacacccctgcacgggcagccgttggtggtgctgcaaggtaacaacatcatcctagagcaccatgtggcccaggagcccagccccggccagcccagcaccttcattgtgcctttccgggagcaagcatggcagcggcccgatgggcagccagccacacgggagcacctgctgatggcactggcaggcatcgacaccctcctgatccgagcatcctacgcccagcagcccgctgagagcagggtctctggcatcagcatggacgtggctgtgcccgaggaaaccggccaggaccccgcgctggaagtggaacagtgctcctgcccacccgggtaccgtgggccgtcctgccaggactgtgacacaggctacacacgcacgcccagtggcctctacctgggtacctgtgaacgctgcagctgccatggccactcagaggcctgcgagccagaaacaggtgcctgccagggctgccagcatcacacggagggccctcggtgtgagcagtgccagccaggatactacggggacgcccagcgggggacaccacaggactgccagctgtgcccctgctacggagaccctgctgccggccaggctgcccacacttgttttctggacacagacggccaccccacctgtgatgcgtgctccccaggccacagtgggcgtcactgtgagaggtgcgcccctggctactatggcaaccccagccagggccagccatgccagagagacagccaggtgccagggcccataggctgcaactgtgacccccaaggcagcgtcagcagccagtgtgatgctgctggtcagtgccagtgcaaggcccaggtggaaggcctcacttgcagccactgccggccccaccacttccacctgagtgccagcaacccagacggctgcctgccctgcttctgtatgggcatcacccagcagtgcgccagctctgcctacacacgccacctgatctccacccactttgcccctggggacttccaaggctttgccctggtgaacccacagcgaaacagccgcctgacaggagaattcactgtggaacccgtgcccgagggtgcccagctctcttttggcaactttgcccaactcggccatgagtccttctactggcagctgccggagacataccagggagacaaggtggcggcctacggtgggaagttgcgatacaccctctcctacacagcaggcccacagggcagcccactctctgaccccgatgtgcagatcacgggcaacaacatcatgctagtggcctcccagccagcgctgcagggccctgagaggaggagctacgagatcatgttccgagaggaattctggcgccggcccgatgggcagccggccacacgcgagcacctcctgatggcactggccgacctggatgagctcctgatccgggccacgttctcctccgtgccgctggcggccagcatcagcgcagtcagcctggaggtcgcccagccggggccctcaaacagaccccgcgccctcgaggtggaggagtgccgctgcccgccaggctacatcggtctgtcctgccaggactgtgcccccggctacacgcgcaccgggagtgggctctacctcggccactgcgagctatgtgaatgcaatggccactcagacctgtgccacccagagactggggcctgctcgcaatgccagcacaacgccgcaggggagttctgcgagctttgtgcccctggctactacggagatgccacagccgggacgcctgaggactgccagccctgtgcctgcccactgaccaacccagagaacatgttttcccgcacctgtgagagcctgggagccggcgggtaccgctgcacggcctgcgaacccggctacactggccagtactgtgagcagtgtggcccaggttacgtgggtaaccccagtgtgcaagggggccagtgcctgccagagacaaaccaagccccactggtggtcgaggtccatcctgctcgaagcatagtgccccaaggtggctcccactccctgcggtgtcaggtcagtgggagcccaccccactacttctattggtcccgtgaggatgggcggcctgtgcccagcggcacccagcagcgacatcaaggctccgagctccacttccccagcgtccagccctcggatgctggggtctacatttgcacctgccgtaatctccaccaatccaataccagccgggcagagctgctggtcactgaggctccaagcaagcccatcacagtgactgtggaggagcagcggagccagagcgtgcgccccggagctgacgtcaccttcatctgcacagccaaaagcaagtccccagcctataccctggtgtggacccgcctgcacaacgggaaactgcccacccgagccatggatttcaatggcatcctgaccattcgcaacgtccagctgagtgatgcaggcacctacgtgtgcaccggctccaacatgtttgccatggaccagggcacagccactctacatgtgcaggcctcgggcaccttgtccgcccccgtggtctccatccatccgccacagctcacagtgcagcccgggcaactggcggagttccgctgcagcgccacagggagccccacgcccaccctcgagtggacagggggccccggcggccagctccctgcgaaggcacaaatccacggcggcatcctgcgcctgccagctgtcgagcccacggatcaggcccagtacttgtgccgagcccacagcagcgctgggcagcaggtggccagggctgtgctccacgtgcatgggggcggtgggcccagagtccaagtgagcccagagaggacccaggtccacgcaggccgcaccgtcaggctgtactgcagggctgcaggcgtgcctagcgccaccatcacctggaggaaggaagggggcagcctcccaccacaggcccggtcagagcgcacagacatcgcgacactgctcatcccagccatcacgactgctgacgccggcttctacctctgcgtggccaccagccctgcaggcactgcccaggcccggatccaagtggttgtcctttcagcctcagatgccagcccaccgccggtcaagattgagtcctcatcgccttctgtgacagaagggcaaacactcgacctcaactgtgtggtggcagggtcagcccatgcccaggtcacctggtacaggcgagggggtagcctgcctccccacacccaggtgcacggctcccgtctgcggctcccccaggtctcaccagctgattctggagaatatgtgtgccgtgtggagaatggatcgggccccaaggaggcctccattactgtgtctgtgctccacggcacccattctggccccagctacaccccagtgcccggcagcacccggcccatccgcatcgagccctcctcctcacacgtggcggaagggcagaccctggatctgaactgcgtggtgcccgggcaggcccacgcccaggtcacgtggcacaagcgtgggggcagcctccctgcccggcaccagacccacggctcgctgctgcggctgcaccaggtgaccccggccgactcaggcgagtatgtgtgccatgtggtgggcacctccggccccctagaggcctcagtcctggtcaccatcgaagcctctgtcatccctggacccatcccacctgtcaggatcgagtcttcatcctccacagtggccgagggccagaccctggatctgagctgcgtggtggcagggcaggcccacgcccaggtcacatggtacaagcgtgggggcagcctccctgcccggcaccaggttcgtggctcccgcctgtacatcttccaggcctcacctgccgatgcgggacagtacgtctgccgggccagcaacggcatggaggcctccatcacggtcacagtaactgggacccagggggccaacttagcctaccctgccggcagcacccagcccatccgcatcgagccctcctcctcgcaagtggcggaagggcagaccctggatctgaactgcgtggtgcccgggcagtcccatgcccaggtcacgtggcacaagcgtgggggcagcctccctgtccggcaccagacccacggctccctgctgagactctaccaagcgtcccccgccgactcgggcgagtacgtgtgccgagtgttgggcagctccgtgcctctagaggcctctgtcctggtcaccattgagcctgcgggctcagtgcctgcacttggggtcacccccacggtccggatcgagtcatcgtcttcgcaagtggccgaggggcagaccctggacctgaactgcctcgttgctggtcaggcccatgcccaggtcacgtggcacaagcgcgggggcagcctcccggcccggcaccaggtgcatggctcgaggctacgcctgctccaggtgaccccagctgattcaggggagtacgtgtgccgtgtggtcggcagctcaggtacccaggaagcctcagtccttgtcaccatccagcagcgccttagtggctcccactcccagggtgtggcgtaccccgtccgcatcgagtcctcctcagcctccctggccaatggacacaccctggacctcaactgcctggttgccagccaggctccccacaccatcacctggtataagcgtggaggcagcttacccagccggcaccagatcgtgggctcccggctgcggatccctcaggtgactccggcagactcgggcgagtacgtgtgtcacgtcagtaacggtgcaggctcccgggagacctcgctcatcgtcaccatccagggcagcggttcctcccacgtgcccagcgtctccccaccgatcaggatcgagtcgtcttcccccacggtggtggaagggcagaccttggatctgaactgcgtggtcgccaggcagccccaggctatcatcacatggtacaagcgtgggggcagccttccctcccgacaccagacccatggctcccacctgcggttgcaccaaatgtctgtggctgactcgggcgagtatgtgtgccgggccaacaacaacatcgatgccctggaggcctccatcgtcatctccgtctcccctagcgccggcagcccctccgcccctggcagctccatgcccatcagaattgagtcatcctcctcacacgtggccgaaggggagaccctggatctgaactgcgtggtccccgggcaggcccatgcccaggtcacttggcacaagcgtgggggcagcctccccagtcaccatcagacccgcggctcacggctgcggctgcaccatgtgtccccggccgactcgggtgaatacgtgtgccgggtgatgggcagctctggccccctggaggcctcagtcctggtcaccatcgaagcctctggctcaagtgctgtccacgtccccgccccaggtggagccccacccatccgcatcgagccctcctcctcccgagtggcagaagggcagaccctggatctgaagtgcgtggtgcccgggcaggcccacgcccaggtcacgtggcacaagcgtggaggaaacctccctgcccggcaccaggtccacggcccactgctgaggctgaaccaggtgtccccggctgactctggcgagtactcgtgccaagtgaccggaagctcaggcaccctggaggcatctgtcctggtcacaattgagccctccagcccaggacccattcctgctccaggactggcccagcccatctacatcgaggcctcctcttcacacgtgactgaagggcagactctggatctgaactgtgtggtgcccgggcaggcccatgcccaggtcacgtggtacaagcgcgggggcagcctccccgcccggcaccagacccatggctcccagctgcggctccacctcgtctcccctgccgactcaggcgagtatgtgtgtcgtgcagccagcggcccaggccctgagcaagaagcctccttcacagtcaccgtcccgcccagtgaggggtcttcctaccgccttaggagcccggtcatctccatcgacccgcccagcagcaccgtgcagcagggccaggatgccagcttcaagtgcctcatccatgacggggcagcccccatcagcctcgagtggaagacccggaaccaggagctggaggacaacgtccacatcagtcccaatggctccatcatcaccatcgtgggcacccggcccagcaaccacggtacctaccgctgcgtggcctccaatgcctacggtgtggcccagagtgtggtgaacctcagtgtgcacgggccccctacagtgtccgtgctccccgagggccccgtgtgggtgaaagtgggaaaggctgtcaccctggagtgtgtcagtgccggggagccccgctcctctgctcgttggacccggatcagcagcacccctgccaagttggagcagcggacatatgggctcatggacagccacgcggtgctgcagatttcatcagctaaaccatcagatgcgggcacttatgtgtgccttgctcagaatgcactaggcacagcacagaagcaggtggaggtgatcgtggacacgggcgccatggccccaggggcccctcaggtccaagctgaagaagctgagctgactgtggaggctggacacacggccaccttgcgctgctcagccacaggcagccccgcgcccaccatccactggtccaagctgcgttccccactgccctggcagcaccggctggaaggtgacacactcatcataccccgggtagcccagcaggactcgggccagtacatctgcaatgccactagccctgctgggcacgctgaggccaccatcatcctgcacgtggagagcccaccatatgccaccacggtcccagagcacgcttcggtgcaggcaggggagacggtgcagctccagtgcctggctcacgggacacccccactcaccttccagtggagccgcgtgggcagcagccttcctgggagggcgaccgccaggaacgagctgctgcactttgagcgtgcagcccctgaggactcaggccgctaccgctgccgggtcaccaacaaggtgggctcagccgaggcctttgcccagctgctcgtccaaggccctcccggctctctccctgccacctccatcccagcagggtccacgcccaccgtgcaggtcacgcctcagctagagaccaagagcattggggccagcgttgagttccactgtgctgtgcccagcgaccggggtacccagctccgttggttcaaggaagggggtcagctgcctccgggtcacagcgtgcaggatggggtgctccgaatccagaacttggaccagagctgccaagggacgtatatatgccaggcccatggaccttgggggaaggcccaggccagtgcccagctggttatccaagccctgccctcggtgctcatcaacatccggacctctgtgcagaccgtggtggttggccacgccgtggagttcgaatgcctggcactgggtgaccccaagcctcaggtgacatggagcaaagttggagggcacctgcggccaggcattgtgcagagcggaggtgtcgtcaggatcgcccacgtagagctggctgatgcgggacagtatcgctgcactgccaccaacgcagctggcaccacacaatcccacgtcctgctgcttgtgcaagccttgccccagatctcaatgccccaagaagtccgtgtgcctgctggttctgcagctgtcttcccctgcatagcctcaggctaccccactcctgacatcagctggagcaagctggatggcagcctgccacctgacagccgcctggagaacaacatgctgatgctgccctcagtccgaccccaggacgcaggtacctacgtctgcaccgccactaaccgccagggcaaggtcaaagcctttgcccacctgcaggtgccagagcgggtggtgccctacttcacgcagaccccctactccttcctaccgctgcccaccatcaaggatgcctacaggaagttcgagatcaagatcaccttccggcccgactcagccgatgggatgctgctgtacaatgggcagaagcgagtcccagggagccccaccaacctggccaaccggcagcccgacttcatctccttcggcctcgtggggggaaggcccgagttccggttcgatgcaggctcaggcatggccaccatccgccatcccacaccactggccctgggccatttccacaccgtgaccctgctgcgcagcctcacccagggctccctgattgtgggtgacctggccccggtcaatgggacctcccagggcaagttccagggcctggatctgaacgaggaactctacctgggtggctatcctgactatggtgccatccccaaggcggggctgagcagcggcttcataggctgtgtccgggagctgcgcatccagggcgaggagatcgtcttccatgacctcaacctcacggcgcacggcatctcccactgccccacctgtcgggaccggccctgccagaatggcggtcagtgccatgactctgagagcagcagctacgtgtgcgtctgcccagctggcttcaccgggagccgctgtgagcactcgcaggccctgcactgccatccagaggcctgtgggcccgacgccacctgtgtgaaccggcctgacggtcgaggctacacctgccgctgccacctgggccgctcggggttgcggtgtgaggaaggtgtgacagtgaccaccccctcgctgtcgggtgctggctcctacctggcactgcccgccctcaccaacacacaccacgagctacgcctggacgtggagttcaagccactcgcccctgacggggtcctgctgttcagcggggggaagagcgggcctgtggaggacttcgtgtccctggcgatggtgggcggccacctggagttccgctatgagttggggtcagggctggccgttctgcggagcgccgagccgctggccctgggccgctggcaccgtgtgtctgcagagcgtctcaacaaggacggcagcctgcgggtgaatggtggacgccctgtgctgcgctcctcgcccggcaagagccagggcctcaacctgcacaccctgctctacctggggggtgtggagccttccgtgccactgtccccggccaccaacatgagcgctcacttccgcggctgtgtgggcgaggtgtcagtgaatggcaaacggctggacctcacctacagtttcctaggcagccagggcatcgggcaatgctatgatagctccccatgtgagcgccagccttgccaacatggtgccacgtgcatgcccgctggcgagtatgagttccagtgcctgtgtcgagatggattcaaaggagacctgtgtgagcacgaggagaacccctgccagctccgtgaaccctgtctgcatgggggcacctgccagggcacccgctgcctctgcctccctggcttctctggcccacgctgccaacaaggctctggacatggcatagcagagtccgactggcatcttgaaggcagcgggggcaatgatgcccctgggcagtacggagcctatttccacgatgatggcttcctcgccttccctggccatgtcttctccaggagcctgcccgaggtgcccgagaccatcgagctggaggttcggaccagcacagccagtggcctcctgctctggcagggtgtggaggtgggagaggccggccaaggcaaggacttcatcagcctcgggcttcaagacgggcaccttgtcttcaggtaccagctgggtagtggggaggcccgcctggtctctgaggaccccatcaatgacggcgagtggcaccgggtgacagcactgcgggagggccgcagaggttccatccaagtcgacggtgaggagctggtcagcggccggtccccaggtcccaacgtggcagtcaacgccaagggcagcgtctacatcggcggagcccctgacgtggccacgctgaccgggggcagattctcctcaggcatcacaggctgtgtcaagaacctggtgctgcactcggcccgacccggcgccccgcccccacagcccctggacctgcagcaccgcgcccaggccggggccaacacacgcccctgcccctcgtaggcacctgcctgccccacacggactcccgggccacgccccagcccgacaatgtcgagtatattattattaatattattatgaatttttgtaagaaaccgaggcgatgccacgctttgctgctaccgccctgggctggactggaggtgggcatgccaccctcacacacacagctgggcaaagccacaaggctggccagcaaggcaggttggatgggagtgggcacctcagaaagtcaccaggacttggggtcaggaacagtggctgggtgggcccagaactgcccccactgtccccctacccaccgatggagcccccagatagagctgggtggcctgtttctgcagcccttgggcagttctcactcctaggagagccaacctcggcttgtgggctggtgccccacagctacctgagacgggcatcgcaggagtctctgccacccactcaggattgggaattgtctttagtgccggctgtggagcaaaaggcagctcacccctgggcaggcggtccccatccccaccagctcgtttttcagcacccccacccacctccacccagcccctggcacctcctctggcagactccccctcctaccacgtcctcctggcctgcattcccaccccctcctgccagcacacagcctggggtccctccctcaggggctgtaagggaaggcccaccccaactcttaccaggagctgctacaggcagagcccagcactgatagggccccgcccaccgggccccgcccaccccaggccacatccccacccatctggaagtgaaggcccagggactcctccaacagacaacggacggacggatgccgctggtgctcaggaagagctagtgccttaggtgggggaaggcaggactcacgactgagagagagaggagggggatatgaccaccctgccccatctgcaggagcctgaagatccagctcaagtgccatcctgccagtggcccccagactgtggggttgggacgcctggcctctgtgtcctagaagggaccctcctgtggtctttgtcttgatttttcttaataaacggtgctatccccgcc

SEQ ID NO: 13477 - DNA, 828 bp, Homo sapiens
  source 1..828: mol_type = unassigned DNA
gtgacccatgggctgagggcatacgatggcttgtctctgcctgaggacatagagaccgtcacagcaagccaaatgcgctggacacattcgtacctttctgatgatgaggacatgctggctgacagcatctcaggagacgacctgggcagtggggacctgggcagcggggacttccagatggggagctggatggctgggtttttgtggagctggatgtgggctcggaagggaatgcggatggggctcagattcaggagatgctgctcagggtcatctccagcggctctgtggcctcctacgtcacctctccccagggattccagttccgacgcctgggcacagtgccccagttcccaagagcctgcacggaggccgagtttgcctgccacagctacaatgagtgtgtggccctggagtatcgctgtgaccggcggcccgactgcagggacatgtctgatgagctcaattgtgaggagccagtcctgggtatcagccccacattctctctccttgtggagacgacatctttaccgccccggccagagacaaccatcatgcgacagccaccagtcacccacgctcctcagcccctgcttcccggttccgtcaggcccctgccctgtgggccccaggaggccgcatgccgcaatgggcactgcatccccagagactacctctgcgacggacaggaggactgcgaggacggcagcgatgagctagactgtggccccccgccaccctgtgagcccaacgagttcccctgcgggaatggacattgtgccctcaagctgtggcgctgcgatggtgactttgactgtgaggaccgaa

SEQ ID NO: 13478 - DNA, 856 bp, Homo sapiens
  source 1..856: mol_type = unassigned DNA
aaggatatggatggagtgtgtgagtgctcagatgaaccgatgaagattgaatcagtgtgaaccgggcatggtggaacgcacctgtagtcccacctactcaggaggctaagctgggagcattgcttgagcgcatgaattctaggctgtggtgagccgtgatcacacctgtgaatacaaccaagaccctttgtctaaaaaaaaaaaagaagtggacacgtgagtgagtaaatgcataagacctgacaagtgagtgtgtttgtgagtgaatgcatgaaaaagtgaatgaggagtgaatgaatgctggagcttcagtgctcacctttccttgggcagtctatggcctccctcgggccaggcctgcagtgactgatctcactggacctctgcctccctcctccccagccctgccctcggtgctcatcaacatccggacctctgtgcagaccgtggtggttggccacgccgtggagttcgaatgcctggcactgggtgaccccaagcctcaggtgacatggagcaaagttggagggcacctgcggccaggcattgtgcagagcggaggtgtcgtcaggatcgcccacgtagagctggctgatgcgggacagtatcgctgcactgccaccaacgcagctggcaccacacaatcccacgtcctgctgcttgtgcaagccttgccccagatctcaatgccccaagaagtccgtgtgcctgctggttctgcagctgtcttcccctgcatagcctcaggctaccccactcctgacatcagctggagcaagctggatggcagcctgccacctgacagccgcctggagaacaacatgctgatgctgccctcagtccgaccccaggacgc

SEQ ID NO: 13479 - DNA, 589 bp, Homo sapiens
  source 1..589: mol_type = unassigned DNA
cacgcccagtggcctctacctgggtacctgtgaacgctgcagctgccatggccactcagaggcctgcgagccagaaacaggtgcctgccagggctgccagcatcacacggagggccctcggtgtgagcagtgccagccaggatactacggggacgcccagcgggggacaccacaggactgccagctgtgcccctgctacggagaccctgctgccggccaggctgcccacacttgttttctggacacagacggccaccccacctgtgatgcgtgctccccaggccacagtgggcgtcactgtgagaggtgcgcccctggctactatggcaaccccagccagggccagccatgccagagagacagccaggtgccagggcccataggctgcaactgtgacccccaaggcagcgtcagcagccagtgtgatgctgctggtcagtgccagtgcaaggtcagtccgaatccctgtccctgcggggcctgctctgccccgctgcccagaccctgcggggaaatcaggcagcatctggtggaagccgagacctgggcatggggggcagggcatgggggacagggcaggggctgcccg

SEQ ID NO: 13480 - DNA, 2433 bp, Homo sapiens
  source 1..2433: mol_type = unassigned DNA
gcaggccgcaccgtcaggctgtactgcagggctgcaggcgtgcctagcgccaccatcacctggaggaaggaagggggcagcctcccaccacaggcccggtcagagcgcacagacatcgcgacactgctcatcccagccatcacgactgctgacgccggcttctacctctgcgtggccaccagccctgcaggcactgcccaggcccggatccaagtggttgtcctttcagcctcagatgccagcccaccgccggtcaagattgagtcctcatcgccttctgtgacagaagggcaaacactcgacctcaactgtgtggtggcagggtcagcccatgcccaggtcacctggtacaggcgagggggtagcctgcctccccacacccaggtgcacggctcccgtctgcggctcccccaggtctcaccagctgattctggagaatatgtgtgccgtgtggagaatggatcgggccccaaggaggcctccattactgtgtcttactgcccacctgcttggtcatggtgtgtgcccggcagcacccggcccatccgcatcgagccctcctcctcacacgtggcggaagggcagaccctggatctgaactgcgtggtgcccgggcaggcccacgcccaggtcacgtggcacaagcgtgggggcagcctccctgcccggcaccagacccacggctcgctgctgcggctgcaccaggtgaccccggccgactcaggcgagtatgtgtgccatgtggtgggcacctccggccccctagaggcctcagtcctggtcaccatcgaagcctctgtcatccctggacccatcccacctgtcaggatcgagtcttcatcctccacagtggccgagggccagaccctggatctgagctgcgtggtggcagggcaggcccacgcccaggtcacatggtacaagcgtgggggcagcctccctgcccggcaccaggttcgtggctcccgcctgtacatcttccaggcctcacctgccgatgcgggacagtacgtctgccgggccagcaacggcatggaggcctccatcacggtcacagtaactgggacccagggggccaacttagcctaccctgccggcagcacccagcccatccgcatcgagccctcctcctcgcaagtggcggaagggcagaccctggatctgaactgcgtggtgcccgggcagtcccatgcccaggtcacgtggcacaagcgtgggggcagcctccctgtccggcaccagacccacggctccctgctgagactctaccaagcgtcccccgccgactcgggcgagtacgtgtgccgagtgttgggcagctccgtgcctctagaggcctctgtcctggtcaccattgagcctgcgggctcagtgcctgcacttggggtcacccccacggtccggatcgagtcatcgtcttcgcaagtggccgaggggcagaccctggacctgaactgcctcgttgctggtcaggcccatgcccaggtcacgtggcacaagcgcgggggcagcctcccggcccggcaccaggtgcatggctcgaggctacgcctgctccaggtgaccccagctgattcaggggagtacgtgtgccgtgtggtcggcagctcaggtacccaggaagcctcagtccttgtcaccatccagcagcgccttagtggctcccactcccagggtgtggcgtaccccgtccgcatcgagtcctcctcagcctccctggccaatggacacaccctggacctcaactgcctggttgccagccaggctccccacaccatcacctggtataagcgtggaggcagcttacccagccggcaccagatcgtgggctcccggctgcggatccctcaggtgactccggcagactcgggcgagtacgtgtgtcacgtcagtaacggtgcaggctcccgggagacctcgctcatcgtcaccatccagggcagcggttcctcccacgtgcccagcgtctccccaccgatcaggatcgagtcgtcttcccccacggtggtggaagggcagaccttggatctgaactgcgtggtcgccaggcagccccaggctatcatcacatggtacaagcgtgggggcagccttccctcccgacaccagacccatggctcccacctgcggttgcaccaaatgtctgtggctgactcgggcgagtatgtgtgccgggccaacaacaacatcgatgccctggaggcctccatcgtcatctccgtctcccctagcgccggcagcccctccgcccctggcagctccatgcccatcagaattgagtcatcctcctcacacgtggccgaaggggagaccctggatctgaactgcgtggtccccgggcaggcccatgcccaggtcacttggcacaagcgtgggggcagcctccccagtcaccatcagacccgcggctcacggctgcggctgcaccatgtg

SEQ ID NO: 13481 - DNA, 637 bp, Homo sapiens
  source 1..637: mol_type = unassigned DNA
cctgaggacatagagaccgtcacagcaagccaaatgcgctggacacattcgtacctttctgatgatgaggacatgctggctgacagcatctcaggagacgacctgggcagtggggacctgggcagcggggacttccagatggtttatttccgagccctggtgaatttcactcgctccatcgagtacagccctcagctggaggatgcaggctccagagagttccgagaggtgtccgaggctgtggtagacacgctggagtcggagtacttgaaaattcccggagaccaggttgtcagtgtggtgttcatcaaggagctggatggctgggtttttgtggagctggatgtgggctcggaagggaatgcggatggggctcagattcaggagatgctgctcagggtcatctccagcggctctgtggcctcctacgtcacctctccccagggattccagttccgacgcctgggcacaggtgagcctatcctggtgtctgggatcgcctcctccagactcgtggggtcccctttcagtgtctctgccataggctcccaacttgggcttgcacaccactagaaacagggagctcactactcctgagtctgccccatcgatctttacacaatcttggcttggtaga

SEQ ID NO: 13482 - DNA, 621 bp, Homo sapiens
  source 1..621: mol_type = unassigned DNA
ggtgagagcagagagggcagggggtacagacaagtggcgcagagggtggcagagaggtccccggtgccatcactgttatctcactctggctgcgtggtccacacccgtctgtccccagtgcccagcgtctccccaccgatcaggatcgagtcgtcttcccccacggtggtggaagggcagaccttggatctgaactgcgtggtcgccaggcagccccaggctatcatcacatggtacaagcgtgggggcagccttccctcccgacaccagacccatggctcccacctgcggttgcaccaaatgtctgtggctgactcgggcgagtatgtgtgccgggccaacaacaacatcgatgccctggaggcctccatcgtcatctccgtctcccctagcgccggcagcccctccgcccctggcagctccatgcccatcagaattgagtcatcctcctcacacgtggccgaaggggagaccctggatctgaactgcgtggtccccgggcaggcccatgcccaggtcacttggcacaagcgtgggggcagcctccccagtcaccatcagacccgcggctcacggctgcggctgcaccatgtgtccccggccgactcgggtgaatacgtg

SEQ ID NO: 13483 - DNA, 2324 bp, Homo sapiens
  source 1..2324: mol_type = unassigned DNA
atttcccagacggggtggttgccggacggaggggctcctcacttctcagacggggcggttgccaggcagagggtttcctcacttctcagacggagcggccgggcagagacgctccccacctcccagacagggctgcggcccagcagaggcactcctcacatcccagacagggcggcggggcagaggtgctccccacatctcagacgatgggcggccgggcagagacgctcctcacttcctagatgggatggcggcggggaagaggcgctcctcgcttcccagatgggatggcggccgggcagagacgctcctcactttccagactgggcagccaggcagaggggctcctcacatcccagacgatgggtggccaagcagagacgctcctcacttcccagacggggtggctgctgggcagaggctgcaatctcggctctccgggaggccaagtgtcttgggacaaggtgcgcattcctggtgtgctgcagcgattgggagtgacatactttgtggttgctgtgttggagctcctctttgctaaacctgtgcctgaacattgtgcctcggagaggagctgcctttctcttcgagacatcacgtccagctggccccagtggctgctcatcctggtgctggaaggcctgtggctgggcttgacattcctcctgccagtccctgggtgccctactggttatcttggtcctgggggcattggagattttggcaagtatccaaattgcactggaggagctgcaggctacatcgaccgcctgctgctgggagacgatcacctttaccagcacccatcttctgctgtactttaccacaccgaggtggcctatgaccccgagggcatcctgggcaccatcaactccatcgtgatggcctttttaggagttcaggcaggaaaaatactattgtattacaaggctcggaccaaagacatcctgattcgattcactgcttggtgttgtattcttgggctcatttctgttgctctgacgaaggtttctgaaaatgaaggctttattccagtaaacaaaaatctctggtccctttcgtatgtcactacgctcagttcttttgccttcttcatcctgctggtcctgtacccagttgtggatgtgaaggggctgtggacaggaaccccattcttttatccaggaatgaattccattctggtatatgtcggccacgaggtgtttgagaactacttcccctttcagtggaagctgaaggacaaccagtcccacaaggagcacctgactcagaacatcgtcgccactgccctctgggtgctcattgcctacatcctctatagaaagaagattttttggaaaatctgatggctcccactgagatgtgctgctggaagactctagtaggcctgcagggaggactgaagcagcctttgttaaagggaagcattcattaggaaattgactggctgcgtgtttacagactctgggggaagacactgatgtcctcaaactggttaactgtgacacggctcgccagaactctgcctgtctatttgtgacttacagatttgaaatgtaattgtcttttttcctccatcttctgtggaaatggatgtctttggaacttcattccgaggagataagctttaactttccaaaagggaattgccatgggtgtttttcttctgtggtgagtgaaacaatctgaggtctggttcttgctgaccttgttgccctgcaaacttcctttccacgtgtacgcgcacaccaacacgaaatgccatcactcctactgcggctgctatgaagcttactggttgtgatgtgttataatttagtctgtttttttgattgaatgcagtttaatgtttccagaaagccaaagtaattttcttttcagatatgcaaggctttggtgggtccaaaaaatgtctatcacaagccattttttccttttcctctctcgaaaagttaaaatatctatgtgttattcccaaaccctcttacctatgtatctgcctgtctgtccatcatcttccttcctccctatctctgtgtatctggatggcagccgctgcccaggggagtggctgtggggagggcaggtactgtctttgcctgtgggtccagctgagccatccctgctgggtgatgctgggcaagacccttggcccgtctgggccttggcttcctcacttgtgaaatgagcgggaagatgactctcagttccttccacctcttagacatggtgaggtaacagacatcaaaagcttttctgaaatcttcagaagaaatagttccattacagaaaactcttcaaaataaatagtagtgaaaactttt

SEQ ID NO: 13484 - DNA, 717 bp, Homo sapiens
  source 1..717: mol_type = unassigned DNA
agggcggggcgcagcgggcaggcaagggcggccgagcgggcggcgggcatgagcggggcgggcagggcgctggccgcgctgctgctggccgcgtccgtgctgagcgccgcgctgctggcccccggcggctcttcggggcgcgatgcccaggccgcgccgccacgagacttagacaaaaaaagacatgcagagctgaagatggatcaggctttgctactcatccataatgaacttctctggaccaacttgaccgtctactggaaatctgaatgctgttatcactgcttgtttcaggttctggtaaacgttcctcagagtccaaaagcagggaagcctagtgctgcagctgcctctgtcagcacccagcacggatctatcctgcagctgaacgacaccttggaagagaaagaagtttgtaggttggaatacagatttggagaatttggaaactattctctcttggtaaagaacatccataatggagttagtgaaattgcctgtgacctggctgtgaacgaggatccagttgatagtaaccttcctgtgagcattgcattccttattggtcttgctgtcatcattgtgatatcctttctgaggctcttgttgagagtcttgctatgtcacccaggctggagtgcggtggcaccatctcggctcactccaagctctgcctcccgggttcacaccattctcctacctcagcctcctgagtag

SEQ ID NO: 13485 - DNA, 5236 bp, Homo sapiens
  source 1..5236: mol_type = unassigned DNA
gggcgcagcgggcaggcaagggcggccgagcgggcggcgggcatgagcggggcgggcagggcgctggccgcgctgctgctggccgcgtccgtgctgagcgccgcgctgctggcccccggcggctcttcggggcgcgatgcccaggccgcgccgccacgagacttagacaaaaaaagacatgcagagctgaagatggatcaggctttgctactcatccataatgaacttctctggaccaacttgaccgtctactggaaatctgaatgctgttatcactgcttgtttcaggttctggtaaacgttcctcagagtccaaaagcagggaagcctagtgctgcagctgcctctgtcagcacccagcacggatctatcctgcagctgaacgacaccttggaagagaaagaagtttgtaggttggaatacagatttggagaatttggaaactattctctcttggtaaagaacatccataatggagttagtgaaattgcctgtgacctggctgtgaacgaggatccagttgatagtaaccttcctgtgagcattgcattccttattggtcttgctgtcatcattgtgatatcctttctgaggctcttgttgagtttggatgactttaacaattggatttctaaagccataagttctcgagaaactgatcgcctcatcaattctgagctgggatctcccagcaggacagaccctctcgatggtgatgttcagccagcaacgtggcgtctatctgccctgccgccccgcctccgcagcgtggacaccttcagggggattgctcttatactcatggtctttgtcaattatggaggaggaaaatattggtacttcaaacatgcaagttggaatgggctgacagtggctgacctcgtgttcccgtggtttgtatttattatgggatcttccatttttctatcgatgacttctatactgcaacgggggtgttcaaaattcagattgctggggaagattgcatggaggagtttcctgttaatctgcataggaattatcattgtgaatcccaattattgccttggtccattgtcttgggacaaggtgcgcattcctggtgtgctgcagcgattgggagtgacatactttgtggttgctgtgttggagctcctctttgctaaacctgtgcctgaacattgtgcctcggagaggagctgcctttctcttcgagacatcacgtccagctggccccagtggctgctcatcctggtgctggaaggcctgtggctgggcttgacattcctcctgccagtccctgggtgccctactggttatcttggtcctgggggcattggagattttggcaagtatccaaattgcactggaggagctgcaggctacatcgaccgcctgctgctgggagacgatcacctttaccagcacccatcttctgctgtactttaccacaccgaggtggcctatgaccccgagggcatcctgggcaccatcaactccatcgtgatggcctttttaggagttcaggcaggaaaaatactattgtattacaaggctcggaccaaagacatcctgattcgattcactgcttggtgttgtattcttgggctcatttctgttgctctgacgaaggtttctgaaaatgaaggctttattccagtaaacaaaaatctctggtccctttcgtatgtcactacgctcagttcttttgccttcttcatcctgctggtcctgtacccagttgtggatgtgaaggggctgtggacaggaaccccattcttttatccaggaatgaattccattctggtatatgtcggccacgaggtgtttgagaactacttcccctttcagtggaagctgaaggacaaccagtcccacaaggagcacctgactcagaacatcgtcgccactgccctctgggtgctcattgcctacatcctctatagaaagaagattttttggaaaatctgatggctcccactgagatgtgctgctggaagactctagtaggcctgcagggaggactgaagcagcctttgttaaagggaagcattcattaggaaattgactggctgcgtgtttacagactctgggggaagacactgatgtcctcaaactggttaactgtgacacggctcgccagaactctgcctgtctatttgtgacttacagatttgaaatgtaattgtcttttttcctccatcttctgtggaaatggatgtctttggaacttcattccgaggagataagctttaactttccaaaagggaattgccatgggtgtttttcttctgtggtgagtgaaacaatctgaggtctggttcttgctgaccttgttgccctgcaaacttcctttccacgtgtacgcgcacaccaacacgaaatgccatcactcctactgcggctgctatgaagcttactggttgtgatgtgttataatttagtctgtttttttgattgaatgcagtttaatgtttccagaaagccaaagtaattttcttttcagatatgcaaggctttggtgggtccaaaaaatgtctatcacaagccattttttccttttcctctctcgaaaagttaaaatatctatgtgttattcccaaaccctcttacctatgtatctgcctgtctgtccatcatcttccttcctccctatctctgtgtatctggatggcagccgctgcccaggggagtggctgtggggagggcaggtactgtctttgcctgtgggtccagctgagccatccctgctgggtgatgctgggcaagacccttggcccgtctgggccttggcttcctcacttgtgaaatgagcgggaagatgactctcagttccttccacctcttagacatggtgaggtaacagacatcaaaagcttttctgaaatcttcagaagaaatagttccattacagaaaactcttcaaaataaatagtagtgaaaacttttaaaaactctcattggagtaagtcttttcaagatgatcctccacaatggaggcagcgttcctacttgtcatcacacagctgaagacattgtttcttaggtgtgaaatcggggacaaaggacaaacagagacacacggcattgttcatgggaggcatcgtcaccctcctgggtgttctgtgggaatttcctgtgtgaggaaaacgtggccacagggttgtgctgtacccacccttccccggcgagatggccctcggcctgtgccgctgcttccaccctcgccactccatggcagcttttggtctgtttccggctctgccctctgccctgaactctcatccggcttgtacctgcctgctggacccctccacctggaggccagcccatgtctcaggcccagccctagcctcttctcctcaaattctaagtgttttctctttaggtttccctggctttgtgaatggatcatgtgtctctaggtataaacctgacatcatctttccacccggcttacctccaccagatctccccagttctgtctccatcttctacctgcagctgctctgttctcatggtcactgctgcatcactgagtctggacccttgttatcattttcaaactggcctccttccctcgttccccacttcttaaagtcacctgtccattgccaccagattaagctttctccagccagatcacctctctctgagaaacctccattgacatggaaacaccattgtctggcacacatactcacatactcaccttcccgtcttgatccccacacatctttccagcctcccctcccactccactccctgctctctcctccacctccccatcctcttgtctcccctcccctctgaatccagcccagcggggcttctcctgcctccatcacatcacagaagtacctcctgcttctggttttaattagagccttccccgattacattttcctctgaattttttcctatctacatttgatctgtcatgtttaaaccccctacttctaagggaacttctctaatctcttatcctcatccccaaatagtgttttcttcctctgggttcttataatgttggtatcaatctcacagcatttagtgcttcctgcctggtgtgacagttacctgtgtgcatgtgcaatttctaatttcccacgctagactgtgagcttcctaaggcaagaatcatgccttgttggtttctgtattcctcatggtgccaaacacagtgccttctacattgcaggcgctgaataaacatttttaaagcaaaatgatgtggatttttaaaataaatatttaagtgctggtaagatgagcatgtatccggggtgcccatgaaatgttcttggggccgtgtggggacagtcgtcattcctcctcctgccacccttttctttcagtgagtcactgtggatggtcccagctgtgtcatcccaaagttcagcagggaaagctgagctgggcctctccaggtgagttttctagaagcatttctcaaactgtgggttacatcaacttgggtgtcttgagctgtaaggaaggaactccggagtcagctgggctacaggggagcttctctaagtcctgcgggaggccagacccagcctgagcttgctgttagctagcggaggcagctgctggtggcccaggtgctcgacaccaggcatcccctctcctcccacgaagggtgtgccataatccccttcaacaggaaatgcttcccagaagcctctcagcagcctcccctcctgtcctatcagctagaagcgcctcgcttgtcccaagaccagcagggacagggaactgtccgagcccgtggctgtgtggaggaaggcgacccccagcacaagattggtttcctttgggaagggaagagggagtgtgttggggtaaggggtagagcagaggaatggtcagggggcaacaaccgctgacagctgcaacaggtgcatggcatctcacagggaggcagggaggtgcgagctcctaagtaatggagcaaaaaaattctattctgtagaatggggagagaaaatgtgacattttaatttttttttgcatttatattcctaattcctacttaaagtgaatatactgccgctgtagatcataaaatgtatcttttccatggccaacaaggggcatcttttataaatgcataataacccagtttgtatcaaagggtatcgacttaagtgaaatttcaacatgctgttactttttccttttaatgtaattctgttttccaaataaatgggggagacaaatggactttgagtaaatttcttagcatatcaaa

SEQ ID NO: 13486 - DNA, 5249 bp, Homo sapiens
  source 1..5249: mol_type = unassigned DNA
atgacgggcgcgcgggcgtccgcggcggagcagcgcagggcggggcgcagcgggcaggcaagggcggccgagcgggcggcgggcatgagcggggcgggcagggcgctggccgcgctgctgctggccgcgtccgtgctgagcgccgcgctgctggcccccggcggctcttcggggcgcgatgcccaggccgcgccgccacgagacttagacaaaaaaagacatgcagagctgaagatggatcaggctttgctactcatccataatgaacttctctggaccaacttgaccgtctactggaaatctgaatgctgttatcactgcttgtttcaggttctggtaaacgttcctcagagtccaaaagcagggaagcctagtgctgcagctgcctctgtcagcacccagcacggatctatcctgcagctgaacgacaccttggaagagaaagaagtttgtaggttggaatacagatttggagaatttggaaactattctctcttggtaaagaacatccataatggagttagtgaaattgcctgtgacctggctgtgaacgaggatccagttgatagtaaccttcctgtgagcattgcattccttattggtcttgctgtcatcattgtgatatcctttctgaggctcttgttgagtttggatgactttaacaattggatttctaaagccataagttctcgagaaactgatcgcctcatcaattctgagctgggatctcccagcaggacagaccctctcgatggtgatgttcagccagcaacgtggcgtctatctgccctgccgccccgcctccgcagcgtggacaccttcagggggattgctcttatactcatggtctttgtcaattatggaggaggaaaatattggtacttcaaacatgcaagttggaatgggctgacagtggctgacctcgtgttcccgtggtttgtatttattatgggatcttccatttttctatcgatgacttctatactgcaacgggggtgttcaaaattcagattgctggggaagattgcatggaggagtttcctgttaatctgcataggaattatcattgtgaatcccaattattgccttggtccattgtcttgggacaaggtgcgcattcctggtgtgctgcagcgattgggagtgacatactttgtggttgctgtgttggagctcctctttgctaaacctgtgcctgaacattgtgcctcggagaggagctgcctttctcttcgagacatcacgtccagctggccccagtggctgctcatcctggtgctggaaggcctgtggctgggcttgacattcctcctgccagtccctgggtgccctactggttatcttggtcctgggggcattggagattttggcaagtatccaaattgcactggaggagctgcaggctacatcgaccgcctgctgctgggagacgatcacctttaccagcacccatcttctgctgtactttaccacaccgaggtggcctatgaccccgagggcatcctgggcaccatcaactccatcgtgatggcctttttaggagttcaggcaggaaaaatactattgtattacaaggctcggaccaaagacatcctgattcgattcactgcttggtgttgtattcttgggctcatttctgttgctctgacgaaggtttctgaaaatgaaggctttattccagtaaacaaaaatctctggtccctttcgtatgtcactacgctcagttcttttgccttcttcatcctgctggtcctgtacccagttgtggatgtgaaggggctgtggacaggaaccccattcttttatccaggaatgaattccattctggtatatgtcggccacgaggtgtttgagaactacttcccctttcagtggaagctgaaggacaaccagtcccacaaggagcacctgactcagaacatcgtcgccactgccctctgggtgctcattgcctacatcctctatagaaagaagattttttggaaaatctgatggctcccactgagatgtgctgctggaagactctagtaggcctgcagggaggactgaagcagcctttgttaaagggaagcattcattaggaaattgactggctgcgtgtttacagactctgggggaagacactgatgtcctcaaactggttaactgtgacacggctcgccagaactctgcctgtctatttgtgacttacagatttgaaatgtaattgtcttttttcctccatcttctgtggaaatggatgtctttggaacttcattccgaggagataagctttaactttccaaaagggaattgccatgggtgtttttcttctgtggtgagtgaaacaatctgaggtctggttcttgctgaccttgttgccctgcaaacttcctttccacgtgtacgcgcacaccaacacgaaatgccatcactcctactgcggctgctatgaagcttactggttgtgatgtgttataatttagtctgtttttttgattgaatgcagtttaatgtttccagaaagccaaagtaattttcttttcagatatgcaaggctttggtgggtccaaaaaatgtctatcacaagccattttttccttttcctctctcgaaaagttaaaatatctatgtgttattcccaaaccctcttacctatgtatctgcctgtctgtccatcatcttccttcctccctatctctgtgtatctggatggcagccgctgcccaggggagtggctgtggggagggcaggtactgtctttgcctgtgggtccagctgagccatccctgctgggtgatgctgggcaagacccttggcccgtctgggccttggcttcctcacttgtgaaatgagcgggaagatgactctcagttccttccacctcttagacatggtgaggtaacagacatcaaaagcttttctgaaatcttcagaagaaatagttccattacagaaaactcttcaaaataaatagtagtgaaaacttttaaaaactctcattggagtaagtcttttcaagatgatcctccacaatggaggcagcgttcctacttgtcatcacacagctgaagacattgtttcttaggtgtgaaatcggggacaaaggacaaacagagacacacggcattgttcatgggaggcatcgtcaccctcctgggtgttctgtgggaatttcctgtgtgaggaaaacgtggccacagggttgtgctgtacccacccttccccggcgagatggccctcggcctgtgccgctgcttccaccctcgccactccatggcagcttttggtctgtttccggctctgccctctgccctgaactctcatccggcttgtacctgcctgctggacccctccacctggaggccagcccatgtctcaggcccagccctagcctcttctcctcaaattctaagtgttttctctttaggtttccctggctttgtgaatggatcatgtgtctctaggtataaacctgacatcatctttccacccggcttacctccaccagatctccccagttctgtctccatcttctacctgcagctgctctgttctcatggtcactgctgcatcactgagtctggacccttgttatcattttcaaactggcctccttccctcgttccccacttcttaaagtcacctgtccattgccaccagattaagctttctccagccagatcacctctctctgagaaacctccattgacatggaaacaccattgtctggcacacatactcacatactcaccttcccgtcttgatccccacacatctttccagcctcccctcccactccactccctgctctctcctccacctccccatcctcttgtctcccctcccctctgaatccagcccagcggggcttctcctgcctccatcacatcacagaagtacctcctgcttctggttttaattagagccttccccgattacattttcctctgaattttttcctatctacatttgatctgtcatgtttaaaccccctacttctaagggaacttctctaatctcttatcctcatccccaaatagtgttttcttcctctgggttcttataatgttggtatcaatctcacagcatttagtgcttcctgcctggtgtgacagttacctgtgtgcatgtgcaatttctaatttcccacgctagactgtgagcttcctaaggcaagaatcatgccttgttggtttctgtattcctcatggtgccaaacacagtgccttctacattgcaggcgctgaataaacatttttaaagcaaaatgatgtggatttttaaaataaatatttaagtgctggtaagatgagcatgtatccggggtgcccatgaaatgttcttggggccgtgtggggacagtcgtcattcctcctcctgccacccttttctttcagtgagtcactgtggatggtcccagctgtgtcatcccaaagttcagcagggaaagctgagctgggcctctccaggtgagttttctagaagcatttctcaaactgtgggttacatcaacttgggtgtcttgagctgtaaggaaggaactccggagtcagctgggctacaggggagcttctctaagtcctgcgggaggccagacccagcctgagcttgctgttagctagcggaggcagctgctggtggcccaggtgctcgacaccaggcatcccctctcctcccacgaagggtgtgccataatccccttcaacaggaaatgcttcccagaagcctctcagcagcctcccctcctgtcctatcagctagaagcgcctcgcttgtcccaagaccagcagggacagggaactgtccgagcccgtggctgtgtggaggaaggcgacccccagcacaagattggtttcctttgggaagggaagagggagtgtgttggggtaaggggtagagcagaggaatggtcagggggcaacaaccgctgacagctgcaacaggtgcatggcatctcacagggaggcagggaggtgcgagctcctaagtaatggagcaaaaaaattctattctgtagaatggggagagaaaatgtgacattttaatttttttttgcatttatattcctaattcctacttaaagtgaatatactgccgctgtagatcataaaatgtatcttttccatggccaacaaggggcatcttttataaatgcataataacccagtttgtatcaaagggtatcgacttaagtgaaatttcaacatgctgttactttttccttttaatgtaattctgttttccaaataaatgggggagacaaatgg

SEQ ID NO: 13487 - DNA, 1849 bp, Homo sapiens
  source 1..1849: mol_type = unassigned DNA
atgagggtgctttgtgccttccctgaagccatgccctccagcaactcccgcccccccgcgtgcctagccccgggggctctctacttggctctgttgctccatctctccctttcctcccaggctggagacaggagacccttgcctgtagacagagctgcaggtttgaaggaaaagaccctgattctacttgatgtgagcaccaagaacccagtcaggacagtcaatgagaacttcctctctctgcagctggatccgtccatcattcatgatggctggctcgatttcctaagctccaagcgcttggtgaccctggcccggggactttcgcccgcctttctgcgcttcgggggcaaaaggaccgacttcctgcagttccagaacctgaggaacccggcgaaaagccgcgggggcccgggcccggattactatctcaaaaactatgaggatgacattgttcgaagtgatgttgccttagataaacagaaaggctgcaagattgcccagcaccctgatgttatgctggagctccaaagggagaaggcagctcagatgcatctggttcttctaaaggagcaattctccaatacttacagtaatctcatattaacagccaggtctctagacaaactttataactttgctgattgctctggactccacctgatatttgctctaaatgcactgcgtcgtaatcccaataactcctggaacagttctagtgccctgagtctgttgaagtacagcgccagcaaaaagtacaacatttcttgggaactgggtaatgagccaaataactatcggaccatgcatggccgggcagtaaatggcagccagttgggaaaggattacatccagctgaagagcctgttgcagcccatccggatttattccagagccagcttatatggccctaatattgggcggccgaggaagaatgtcatcgccctcctagatggattcatgaaggtggcaggaagtacagtagatgcagttacctggcaacattgctacattgatggccgggtggtcaaggtgatggacttcctgaaaactcgcctgttagacacactctctgaccagattaggaaaattcagaaagtggttaatacatacactccaggaaagaagatttggcttgaaggtgtggtgaccacctcagctggaggcacaaacaatctatccgattcctatgctgcaggattcttatggttgaacactttaggaatgctggccaatcagggcattgatgtcgtgatacggcactcattttttgaccatggatacaatcacctcgtggaccagaattttaacccattaccagactactggctctctctcctctacaagcgcctgatcggccccaaagtcttggctgtgcatgtggctgggctccagcggaagccacggcctggccgagtgatccgggacaaactaaggatttatgctcactgcacaaaccaccacaaccacaactacgttcgtgggtccattacactttttatcatcaacttgcatcgatcaagaaagaaaatcaagctggctgggactctcagagacaagctggttcaccagtacctgctgcagccctatgggcaggagggcctaaagtccaaaacccaaagatgtcaatactgtgggatcatctgaatctaaaagggcattacctaattcttcagaagaaaggtcagtgcaactgaatggccagcccttagtgatggtggacgacgggaccctcccagaattgaagccccgcccccttcgggccggccggacattggtcatccctccagtcaccatgggcttttatgtggtcaagaatgtcaatgctttggcctgccgctaccgataa

SEQ ID NO: 13488 - DNA, 2121 bp, Homo sapiens
  source 1..2121: mol_type = unassigned DNA
aaggacaattagtcactagcgagacccagtaggaagagaggtttaaatcagagggattgaatgagggtgctttgtgccttccctgaagccatgccctccagcaactcccgcccccccgcgtgcctagccccgggggctctctacttggctctgttgctccatctctccctttcctcccaggctggagacaggagacccttgcctgtagacagagctgcaggtttgaaggaaaagaccctgattctacttgatgtgagcaccaagaacccagtcaggacagtcaatgagaacttcctctctctgcagctggatccgtccatcattcatgatggctggctcgatttcctaagctccaagcgcttggtgaccctggcccggggactttcgcccgcctttctgcgcttcgggggcaaaaggaccgacttcctgcagttccagaacctgaggaacccggcgaaaagccgcgggggcccgggcccggattactatctcaaaaactatgaggatgacattgttcgaagtgatgttgccttagataaacagaaaggctgcaagattgcccagcaccctgatgttatgctggagctccaaagggagaaggcagctcagatgcatctggttcttctaaaggagcaattctccaatacttacagtaatctcatattaacagagccaaataactatcggaccatgcatggccgggcagtaaatggcagccagttgggaaaggattacatccagctgaagagcctgttgcagcccatccggatttattccagagccagcttatatggccctaatattgggcggccgaggaagaatgtcatcgccctcctagatggattcatgaaggtggcaggaagtacagtagatgcagttacctggcaacattgctacattgatggccgggtggtcaaggtgatggacttcctgaaaactcgcctgttagacacactctctgaccagattaggaaaattcagaaagtggttaatacatacactccaggaaagaagatttggcttgaaggtgtggtgaccacctcagctggaggcacaaacaatctatccgattcctatgctgcaggattcttatggttgaacactttaggaatgctggccaatcagggcattgatgtcgtgatacggcactcattttttgaccatggatacaatcacctcgtggaccagaattttaacccattaccagactactggctctctctcctctacaagcgcctgatcggccccaaagtcttggctgtgcatgtggctgggctccagcggaagccacggcctggccgagtgatccgggacaaactaaggatttatgctcactgcacaaaccaccacaaccacaactacgttcgtgggtccattacactttttatcatcaacttgcatcgatcaagaaagaaaatcaagctggctgggactctcagagacaagctggttcaccagtacctgctgcagccctatgggcaggagggcctaaagtccaagtcagtgcaactgaatggccagcccttagtgatggtggacgacgggaccctcccagaattgaagccccgcccccttcgggccggccggacattggtcatccctccagtcaccatgggcttttatgtggtcaagaatgtcaatgctttggcctgccgctaccgataagctatcctcacactcacggctaccagtgggcctgctgggctgcttccactcctccactccagtagtatcctctgttttcagacatcctagcaaccagcccctgctgccccatcctgctggaatcaacacagacttgctctccaaagagactaaatgtcatagcgtgatcttagcctaggtaggccacatccatcccaaaggaaaatgtagacatcacctgtacctatataaggataaaggcatgtgtatagagcagaatgtttcccttcatgtgcactatgaaaacgagctgacagcacactcccaggagaaatgtttccagacaactccccatgatcctgtcacacagcattataaccacaaatccaaaccttagcctgctgctgctgctgccctcagaggaagatgaggaaggaaaaaaactgggtggacctacaaaaacccatcctctcccaa

SEQ ID NO: 13489 - DNA, 2295 bp, Homo sapiens
  source 1..2295: mol_type = unassigned DNA
aaggacaattagtcactagcgagacccagtaggaagagaggtttaaatcagagggattgaatgagggtgctttgtgccttccctgaagccatgccctccagcaactcccgcccccccgcgtgcctagccccgggggctctctacttggctctgttgctccatctctccctttcctcccaggctggagacaggagacccttgcctgtagacagagctgcaggtttgaaggaaaagaccctgattctacttgatgtgagcaccaagaacccagtcaggacagtcaatgagaacttcctctctctgcagctggatccgtccatcattcatgatggctggctcgatttcctaagctccaagcgcttggtgaccctggcccggggactttcgcccgcctttctgcgcttcgggggcaaaaggaccgacttcctgcagttccagaacctgaggaacccggcgaaaagccgcgggggcccgggcccggattactatctcaaaaactatgaggatgacattgttcgaagtgatgttgccttagataaacagaaaggctgcaagattgcccagcaccctgatgttatgctggagctccaaagggagaaggcagctcagatgcatctggttcttctaaaggagcaattctccaatacttacagtaatctcatattaacagccaggtctctagacaaactttataactttgctgattgctctggactccacctgatatttgctctaaatgcactgcgtcgtaatcccaataactcctggaacagttctagtgccctgagtctgttgaagtacagcgccagcaaaaagtacaacatttcttgggaactgggtaatgagccaaataactatcggaccatgcatggccgggcagtaaatggcagccagttgggaaaggattacatccagctgaagagcctgttgcagcccatccggatttattccagagccagcttatatggccctaatattgggcggccgaggaagaatgtcatcgccctcctagatggattcatgaaggtggcaggaagtacagtagatgcagttacctggcaacattgctacattgatggccgggtggtcaaggtgatggacttcctgaaaactcgcctgttagacacactctctgaccagattaggaaaattcagaaagtggttaatacatacactccaggaaagaagatttggcttgaaggtgtggtgaccacctcagctggaggcacaaacaatctatccgattcctatgctgcaggattcttatggttgaacactttaggaatgctggccaatcagggcattgatgtcgtgatacggcactcattttttgaccatggatacaatcacctcgtggaccagaattttaacccattaccagactactggctctctctcctctacaagcgcctgatcggccccaaagtcttggctgtgcatgtggctgggctccagcggaagccacggcctggccgagtgatccgggacaaactaaggatttatgctcactgcacaaaccaccacaaccacaactacgttcgtgggtccattacactttttatcatcaacttgcatcgatcaagaaagaaaatcaagctggctgggactctcagagacaagctggttcaccagtacctgctgcagccctatgggcaggagggcctaaagtccaagtcagtgcaactgaatggccagcccttagtgatggtggacgacgggaccctcccagaattgaagccccgcccccttcgggccggccggacattggtcatccctccagtcaccatgggcttttatgtggtcaagaatgtcaatgctttggcctgccgctaccgataagctatcctcacactcacggctaccagtgggcctgctgggctgcttccactcctccactccagtagtatcctctgttttcagacatcctagcaaccagcccctgctgccccatcctgctggaatcaacacagacttgctctccaaagagactaaatgtcatagcgtgatcttagcctaggtaggccacatccatcccaaaggaaaatgtagacatcacctgtacctatataaggataaaggcatgtgtatagagcagaatgtttcccttcatgtgcactatgaaaacgagctgacagcacactcccaggagaaatgtttccagacaactccccatgatcctgtcacacagcattataaccacaaatccaaaccttagcctgctgctgctgctgccctcagaggaagatgaggaaggaaaaaaactgggtggacctacaaaaacccatcctctcccaa

SEQ ID NO: 13490 - DNA, 1443 bp, Homo sapiens
  source 1..1443: mol_type = unassigned DNA
atgagggtgctttgtgccttccctgaagccatgccctccagcaactcccgcccccccgcgtgcctagccccgggggctctctacttggctctgttgctccatctctccctttcctcccaggctggagacaggagacccttgcctgtagacagagctgcaggtttgaaggaaaagaccctgattctacttgatgtgagcaccaagaacccagtcaggacagtcaatgagaacttcctctctctgcagctggatccgtccatcattcatgatggctggctcgatttcctaagctccaagcgcttggtgaccctggcccggggactttcgcccgcctttctgcgcttcgggggcaaaaggaccgacttcctgcagttccagaacctgaggaacccggcgaaaagccgcgggggcccgggcccggattactatctcaaaaactatgaggatgagccaaataactatcggaccatgcatggccgggcagtaaatggcagccagttgggaaaggattacatccagctgaagagcctgttgcagcccatccggatttattccagagccagcttatatggccctaatattgggcggccgaggaagaatgtcatcgccctcctagatggattcatgaaggtggcaggaagtacagtagatgcagttacctggcaacattgctacattgatggccgggtggtcaaggtgatggacttcctgaaaactcgcctgttagacacactctctgaccagattaggaaaattcagaaagtggttaatacatacactccaggaaagaagatttggcttgaaggtgtggtgaccacctcagctggaggcacaaacaatctatccgattcctatgctgcaggattcttatggttgaacactttaggaatgctggccaatcagggcattgatgtcgtgatacggcactcattttttgaccatggatacaatcacctcgtggaccagaattttaacccattaccagactactggctctctctcctctacaagcgcctgatcggccccaaagtcttggctgtgcatgtggctgggctccagcggaagccacggcctggccgagtgatccgggacaaactaaggatttatgctcactgcacaaaccaccacaaccacaactacgttcgtgggtccattacactttttatcatcaacttgcatcgatcaagaaagaaaatcaagctggctgggactctcagagacaagctggttcaccagtacctgctgcagccctatgggcaggagggcctaaagtccaagtcagtgcaactgaatggccagcccttagtgatggtggacgacgggaccctcccagaattgaagccccgcccccttcgggccggccggacattggtcatccctccagtcaccatgggcttttatgtggtcaagaatgtcaatgctttggcctgccgctaccgataa

SEQ ID NO: 13491 - DNA, 3602 bp, Homo sapiens
  source 1..3602: mol_type = unassigned DNA
gttaggtggagacagggtaggttgggacacaaagtccagttaagtgtgtgtcccagctcagtgctctgagcccagatcctcatctccctgggtagtgaggctcagcacagacaagcaaccaactgctgggctgccggtgccccccatgttggaacctgagttggagattatctcctaagcagatacctgcttccaaactggggatgtagggcttggaaactagaaaatgccaggtctgagggagaggaaagaacaagtccagcaatacacagagctctgtgtattcagagggaagttggcagggttgtgttcgggcagagaaactccgagtggtacaaaggggacgtgcccagagtggagaaatcatgctaattgtctgcactagagctggagaacgccacccaaaatgaagagagaaaggggagccctgtccagagcctccagggccctgcgccttgctccttttgtctaccttcttctgatccagacagaccccctggagggggtgaacatcaccagccccgtgcgcctgatccatggcaccgtggggaagtcggctctgctttctgtgcagtacagcagtaccagcagcgacaggcctgtagtgaagtggcagctgaagcgggacaagccagtgaccgtggtgcagtccattggcacagaggtcatcggcaccctgcggcctgactatcgagaccgtatccgactctttgaaaatggctccctgcttctcagcgacctgcagctggccgatgagggcacctatgaggtcgagatctccatcaccgacgacaccttcactggggagaagaccatcaaccttactgtagatgtgcccatttcgaggccacaggtgttggtggcttcaaccactgtgctggagctcagcgaggccttcaccttgaactgctcacatgagaatggcaccaagcccagctacacctggctgaaggatggcaagcccctcctcaatgactcgagaatgctcctgtcccccgaccaaaaggtgctcaccatcacccgcgtgctcatggaggatgacgacctgtacagctgcatggtggagaaccccatcagccagggccgcagcctgcctgtcaagatcaccgtatacagaagaagctccctttacatcatcttgtctacaggaggcatcttcctccttgtgaccttggtgacagtctgtgcctgctggaaaccctccaaaaggaaacagaagaagctagaaaagcaaaactccctggaatacatggatcagaatgatgaccgcctgaaaccagaagcagacaccctccctcgaagtggtgagcaggaacggaagaaccccatggcactctatatcctgaaggacaaggactccccggagaccgaggagaacccggccccggagcctcgaagcgcgacggagcccggcccgcccggctactccgtgtctcccgccgtgcccggccgctcgccggggctgcccatccgctctgcccgccgctacccgcgctccccagcgcgctccccagccaccggccggacacactcgtcgccgcccagggccccgagctcgcccggccgctcgcgcagcgcctcgcgcacactgcggactgcgggcgtgcacataatccgcgagcaagacgaggccggcccggtggagatcagcgcctgagccgcctcgggatcccctgagaggcgcccgcggtctgcggccagtggcccgggggaaagctggggctgggaagcccgggcgcggcgcgctggggacgaggggaggtcccgggggggcgctggtgtctcgggtgtgaacgtgtatgagcatgcgcagacggaggcgggtgcgcggaggcggcagtgttgatatggtgaaaccgggtcgcatttgcttccggtttactggctgtgtcctcacttggtataggttgtgccctcttaggaccacatagattattacatttctggcccaatacccaaaagggttttatggaaactaacatcagtaacctaacccccgtgactatcctgtgctcttcctagggagctgtgttgtttcccacccaccacccttccctctgaacaaatgcctgagtgctggggcactttttttttttttttttttttttttttttttgcaagttcagattagagaggccactttcccagaatccacagctgcactaagctaaggagaagccagatgccggttactgggtgtgcaggggctgttctgagctggggggatcattgtgaaggccttcttccctgggcacctggtacctggggacctacaaggtggtgagggaagggtacgagtacattccttttccctctgacctgggcgctagcaagggcaaagaacccgagcctgccagcttggcctcctcccacagcctccctcggaggcatgccatgccaagcactctttctgtctctgttcatgaataaaagagatggatgggcttattcttatagagaagtgaatttcacttactcccctggcccgaaaactagaccaaatgaggaactgttttagctcatcaaactcatatattcctcctggcttccttacaaaacaagcctttcaaacaatcattgtcctcaggaaagttgttgagcttcctccagctgtgagaataagtcctaatctccagagaaatggtggggggaggaggaggcttattgcttcccagcatttggggggaacatgatccaacccctggcctcctgccacccatctgccctgctcccacatgctcaggtcccagggcacagaaaaagggcagactccctaatcacactaacatcaaaataaagaggctgggccgctgtgtagccaggacatgcccatgccaccgcctattgaacagttcataggagtggcagtaatctactgtgtgaggagagagggcaattaaaaagctgaaagagaaggaggccctctgtgtattccattccctcctccttaatgcctccaagggtccttgcatccctagtctcctaaactccagctctgattcgccatcaacccatggagcaattccaaggccccagttacccatcacctccacaccaggtcaagttttgtctcagccccaaaggcactgacatttctagtttgccccctctgccctgaaccccacagcatgcctgtctcagctccctgtccctcggcacttccccaggctcatttgagcaggtgtgccttcgcagctcccctaaacttcccaggtgcctcatccataatgagataatgcatgtaggggaaaagtttctcaagaaggtggaagaggcagcaggacttggataaggagtacctgctggtcagccttgagatgcacaggtgaaggttagggtgagatgagaacatgccataccctggtgctgaatccctgaggggccagcttgccaggcttaagccaaatctgccttaaattgggggtggggaggggtaagtaaggaagtggggtttgtttttgtgttgttttcatcttcatctttgtattactagcatccagcagagtgcctagcacatactggatgctcaataaacttttgatgaaatgaaatgacaactttattccacataaacaagggtaacaaaacaagctgcttaaata

SEQ ID NO: 13492 - DNA, 1510 bp, Homo sapiens
  source 1..1510: mol_type = unassigned DNA
gttaggtggagacagggtaggttgggacacaaagtccagttaagtgtgtgtcccagctcagtgctctgagcccagatcctcatctccctgggtagtgaggctcagcacagacaagcaaccaactgctgggctgccggtgccccccatgttggaacctgagttggagattatctcctaagcagatacctgcttccaaactggggatgtagggcttggaaactagaaaatgccaggtctgagggagaggaaagaacaagtccagcaatacacagagctctgtgtattcagagggaagttggcagggttgtgttcgggcagagaaactccgagtggtacaaaggggacgtgcccagagtggagaaatcatgctaattgtctgcactagagctggagaacgccacccaaaatgaagagagaaaggggagccctgtccagagcctccagggccctgcgccttgctccttttgtctaccttcttctgatccagacagaccccctggagggggtgaacatcaccagccccgtgcgcctgatccatggcaccgtggggaagtcggctctgctttctgtgcagtacagcagtaccagcagcgacaggcctgtagtgaagtggcagctgaagcgggacaagccagtgaccgtggtgcagtccattggcacagaggtcatcggcaccctgcggcctgactatcgagaccgtatccgactctttgaaaatggctccctgcttctcagcgacctgcagctggccgatgagggcacctatgaggtcgagatctccatcaccgacgacaccttcactggggagaagaccatcaaccttactgtagatgtgcccatttcgaggccacaggtgttggtggcttcaaccactgtgctggagctcagcgaggccttcaccttgaactgctcacatgagaatggcaccaagcccagctacacctggctgaaggatggcaagcccctcctcaatgactcgagaatgctcctgtcccccgaccaaaaggtgctcaccatcacccgcgtgctcatggaggatgacgacctgtacagctgcatggtggagaaccccatcagccagggccgcagcctgcctgtcaagatcaccgtatacagaagaagctccctttacatcatcttgtctacaggaggcatcttcctccttgtgaccttggtgacagtctgtgcctgctggaaaccctccaaaaggaaacagaagaagctagaaaagcaaaactccctggaatacatggatcagaatgatgaccgcctgaaaccagaaggtgagctcccagccacccaatcacccatcccatcaacaatcagatcagtgggctgctgggaaaaggcagaactgggcgacaaggaaaacagctctgcagggacccttccctctgacctgggcgctagcaagggcaaagaacccgagcctgccagcttggcctcctcccacagcctccctcggaggcatgccatgccaagcactctttctgtctctgttcatgaataa

SEQ ID NO: 13493 - DNA, 5599 bp, Homo sapiens
  source 1..5599: mol_type = unassigned DNA
actcttgtcagggccgcggcacatgggcggccggatgcgctgagcccggcgctgcggggccgcggagcgctggggagcagcggccgccggcgcggggaggggggtggggtgggacggcgcaccgcctccggtgctggcactaggggctggggtcggcgcggtgtcttctgcccttctgcagccgtcgacatttttttttctttctttttttcaattttgaacattttgcaaaacgaggggttcgaggcaggtgagagcatcctgcacgtcgccggggagcccgcgggcacttggcgcgctctcctgggaccgtctgcactggaaacccgaaagtttttttttaatatatatttttatgcagatgtatttataaagatataagtaatttttttcttcccttttctccaccgccttgagagcgagtacttttggcaaaggacggaggaaaagctcagcaacattttagggggcggttgtttctttcttatttctttttttaaggggaaaaaatttgagtgcatcgcgatggagaaaatgtcccgaccgctccccctgaatcccacctttatcccgcctccctacggcgtgctcaggtccctgctggagaacccgctgaagctcccccttcaccacgaagacgcatttagtaaagataaagacaaggaaaagaagctggatgatgagagtaacagcccgacggtcccccagtcggcattcctggggcctaccttatgggacaaaacccttccctatgacggagatactttccagttggaatacatggacctggaggagtttttgtcagaaaatggcattccccccagcccatctcagcatgaccacagccctcaccctcctgggctgcagccagcttcctcggctgccccctcggtcatggacctcagcagccgggcctctgcaccccttcaccctggcatcccatctccgaactgtatgcagagccccatcagaccaggtcagctgttgccagcaaaccgcaatacaccaagtcccattgatcctgacaccatccaggtcccagtgggttatgagccagacccagcagatcttgccctttccagcatccctggccaggaaatgtttgaccctcgcaaacgcaagttctctgaggaagaactgaagccacagcccatgatcaagaaagctcgcaaagtcttcatccctgatgacctgaaggatgacaagtactgggcaaggcgcagaaagaacaacatggcagccaagcgctcccgcgacgcccggaggctgaaagagaaccagatcgccatccgggcctcgttcctggagaaggagaactcggccctccgccaggaggtggctgacttgaggaaggagctgggcaaatgcaagaacatacttgccaagtatgaggccaggcacgggcccctgtaggatggcatttttgcaggctggctttggaatagatggacagtttgtttcctgtctgatagcaccacacgcaaaccaacctttctgacatcagcactttaccagaggcataaacacaactgactcccattttggtgtgcatctgtgtgtgtgtgcgtgtatatgtgcttgtgctcatgtgtgtggtcagcggtatgtgcgtgtgcgtgttcctttgctcttgccattttaaggtagccctctcatcgtcttttagttccaacaaagaaaggtgccatgtctttactagactgaggagccctctcgcgggtctcccatcccctccctccttcactcctgcctcctcagctttgcttcatgttcgagcttacctactcttccaggactctctgcttggattcactaaaaagggccctggtaaaatagtggatctcagtttttaagagtacaagctcttgtttctgtttagtccgtaagttaccatgctaatgaggtgcacacaataacttagcactactccgcagctctagtcctttataagttgctttcctcttactttcagttttggtgataatcgtcttcaaattaaagtgctgtttagatttattagatcccatatttacttactgctatctactaagtttccttttaattctaccaaccccagataagtaagagtactattaatagaacacagagtgtgtttttgcactgtctgtacctaaagcaataatcctattgtacgctagagcatgctgcctgagtattactagtggacgtaggatattttccctacctaagaatttcactgtcttttaaaaaacaaaaagtaaagtaatgcatttgagcatggccagactattccctaggacaaggaagcagagggaaatgggaggtctaaggatgaggggttaatttatcagtacatgagccaaaaactgcgtcttggattagcctttgacattgatgtgttcggttttgttgttccccttccctcacaccctgcctcgcccccacttttctagttaactttttccatatccctcttgacattcaaaacagttacttaagattcagttttcccactttttggtaatatatatatttttgtgaattatactttgttgtttttaaaaagaaaatcagttgattaagttaataagttgatgttttctaaggccctttttcctagtggtgtcatttttgaatgcctcataaattaatgattctgaagcttatgtttcttattctctgtttgcttttgaacgtatgtgctcttataaagtggacttctgaaaaatgaatgtaaaagacactggtgtatctcagaaggggatggtgttgtcacaaactgtggttaatccaatcaatttaaatgtttactatagaccaaaaggagagattattaaatcgtttaatgtttatacagagtaattataggaagttcttttttgtacagtatttttcagatataaatactgacaatgtattttggaagacatatattatatatagaaaagaggagaggaaaactattccatgttttaaaattatatagcaaagatatatattcaccaatgttgtacagagaagaagtgcttgggggtttttgaagtctttaatattttaagccctatcactgacacatcagcatgttttctgctttaaattaaaattttatgacagtatcgaggcttgtgatgacgaatcctgctctaaaatacacaaggagctttcttgtttcttattaggcctcagaaagaagtcagttaacgtcacccaaaagcacaaaatggattttagtcaaatatttattggatgatacagtgttttttaggaaaagcatctgccacaaaaatgttcacttcgaaattctgagttcctggaatggcacgttgctgccagtgccccagacagttcttttctaccctgcgggcccgcacgttttatgaggttgatatcggtgctatgtgtttggtttataatttgatagatgtttgactttaaagatgattgttcttttgtttcattaagttgtaaaatgtcaagaaattctgctgttacgacaaagaaacattttacgctagattaaaatatcctttcatcaatgggattttctagtttcctgccttcagagtatctaatcctttaatgatctggtggtctcctcgtcaatccatcagcaatgcttctctcatagtgtcatagacttgggaaacccaaccagtaggatatttctacaaggtgttcattttgtcacaagctgtagataacagcaagagatgggggtgtattggaattgcaatacattgttcaggtgaataataaaatcaaaaacttttgcaatcttaagcagagataaataaaagatagcaatatgagacacaggtggacgtagagttggcctttttacaggcaaagaggcgaattgtagaattgttagatggcaatagtcattaaaaacatagaaaaatgatgtctttaagtggagaattgtggaaggattgtaacatggaccatccaaatttatggccgtatcaaatggtagctgaaaaaactatatttgagcactggtctctcttggaattagatgtttatatcaaatgagcatctcaaatgttttctgcagaaaaaaataaaaagattctaataaaatgtattctcttgtgtgccaggagaggtttcagaaacctacctcgtcttacaaatttaaacactttggagtctgtacaggtgccttatatgtaggtcattgtcacgatacacacacacgaacactccctctggactggctgcctctccatccagggcagttaactagcaaacaaggcagatctgcttcatggagcgggaggccatggcttgactctgagtgatttgggtcaaccggagtcagacgcatgtctgcacgctgcagctattatgagagtccctttgtcatttttcaccttttcatcctaagcatctttcagagattaattatttggccattaacaatgaatccaaatcatatcatactgacatcatctagacatgatttggaaggaacagcttaggacctcctgatgaggtcacattgttgtttcttttaactagacttggcaaagaaaggcaaaaattgaccagcctatctttctgctggtgctgccttaaggaggtagtttgttgaggggagggctgtagatcattacttctttctcttcaggaagtggccactttgaaccattcaaataccacattaggcaagactgtgataggccttttgtcttcaaatacaacaggcctccactgacccatccctcaaagcagaaggaccctttgaggagagtacagatgggattccacagtggggtgggtggaatggaaacctgtactagaccacccagaggttccttctaacccactggtttggtggggaactcacagtaattccaaatgtacaatcagatgtctagggtctgttttcggaagaagcaagaattatcagtggcaccctccccactgcccccagtgtaaaacaatagacattctgtgaaatgcaaagctattctttggtttttctagtagtttatctcattttaccctattcttcctttaaggaaaactcaatctttatcacagtcaattagagcgatcccaaggcatgggaccaggcctgcttgcctatgtgtgatggcaattggagatctggatttagcactggggtctcagcaccctgcaggtgtctgagactaagtgatctgccctccaggtggcgatcaccttctgctcctaggtacccccactggcaaggccaaggtctcctccacgttttttctgcaattaataatgtcatttaaaaaatgagcaaagccttatccgaatcggatatagcaactaaagtcaatacattttgcaggaggctaagtgtaagagtgtgtgtgtgtgtgtgtgcgtgcatgtgtgtgtgtgtgtatgtgtgtgaataagtcgacataaagtctttaattttgagcaccttaccaaacataacaataatccattatccttttggcaacaccacaaagatcgcatctgttaaacaggtacaagttgacatgaggttagtttaattgtacaccatgatattggtggtatttatgctgttaagtccaaacctttatctgtctgttattcttaatgttgaataaactttgaattttttcctttc

SEQ ID NO: 13494 - DNA, 1385 bp, Homo sapiens
  source 1..1385: mol_type = unassigned DNA
acatttaaaagagcttcgggcacccggcctccctgggtcccgctcctgcggcgcgggtgggaggtgtaacttgacagcatttagtaaagataaagacaaggaaaagaagctggatgatgagagtaacagcccgacggtcccccagtcggcattcctggggcctaccttatgggacaaaacccttccctatgacggagatactttccagttggaatacatggacctggaggagtttttgtcagaaaatggcattccccccagcccatctcagcatgaccacagccctcaccctcctgggctgcagccagcttcctcggctgccccctcggtcatggacctcagcagccgggcctctgcaccccttcaccctggcatcccatctccgaactgtatgcagagccccatcagaccaggtcagctgttgccagcaaaccgcaatacaccaagtcccattgatcctgacaccatccaggtcccagtgggttatgagccagacccagcagatcttgccctttccagcatccctggccaggaaatgtttgaccctcgcaaacgcaagttctctgaggaagaactgaagccacagcccatgatcaagaaagctcgcaaagtcttcatccctgatgacctgaaggatgacaagtactgggcaaggcgcagaaagaacaacatggcagccaagcgctcccgcgacgcccggaggctgaaagagaaccagatcgccatccgggcctcgttcctggagaaggagaactcggccctccgccaggaggtggctgacttgaggaaggagctgggcaaatgcaagaacatacttgccaagtatgaggccaggcacgggcccctgtaggatggcatttttgcaggctggctttggaatagatggacagtttgtttcctgtctgatagcaccacacgcaaaccaacctttctgacatcagcactttaccagaggcataaacacaactgactcccattttggtgtgcatctgtgtgtgtgtgcgtgtatatgtgcttgtgctcatgtgtgtggtcagcggtatgtgcgtgtgcgtgttcctttgctcttgccattttaaggtagccctctcatcgtcttttagttccaacaaagaaaggtgccatgtctttactagactgaggagccctctcgcgggtctcccatcccctccctccttcactcctgcctcctcagctttgcttcatgttcgagcttacctactcttccaggactctctgcttggattcactaaaaagggccctggtaaaatagtggatctcagtttttaagagtacaagctcttgtttctgtttagtccgtaagttaccatgctaatgaggtgcacacaataacttagcactactccgcagctctagtcctttat

SEQ ID NO: 13495 - DNA, 1845 bp, Homo sapiens
  source 1..1845: mol_type = unassigned DNA
attctcctgcctcagcctcccgagtagctgggactacaggcgccagtgaccacgcccggctaattttttgtatttttagtagagacggggtttcacccttttagccaggatggtctcgatctcctgacttcgtgatctgcccgccttggcctcccaaagtgctaggattacaggtttgagccaccgcgcccggccctgtttcctttttgtttgttcccctgataccctgtatcaggaccaggagtcagtttggcggttatgtgtggggaagaagctgggaagtcaggggctgtttctgtggacagctttccctgtcctttggaaggcacagagctctcagctgcagggaactaacagagctctgaagccgttatatgtggtcttctctcatttccagcagagcaggctcatatgaatcaaccaactgggtgaaaagataagttgcaatctgagatttaagacttgatcagataccatctggtggagggtaccaaccagcctgtctgctcattttccttcaggctgatcccataatgcatcctcaagtggtcatcttaagcctcatcctacatctggcagattctgtagctggttctgtaaaggttggtggagaggcaggtccatctgtcacactaccctgccactacagtggagctgtcacatccatgtgctggaatagaggctcatgttctctattcacatgccaaaatggcattgtctggaccaatggaacccacgtcacctatcggaaggacacacgctataagctattgggggacctttcaagaagggatgtctctttgaccatagaaaatacagctgtgtctgacagtggcgtatattgttgccgtgttgagcaccgtgggtggttcaatgacatgaaaatcaccgtatcattggagattgtgccacccaaggtcacgactactccaattgtcacaactgttccaaccgtcacgactgttcgaacgagcaccactgttccaacgacaacgactgttccaatgacgactgttccaacgacaactgttccaacaacaatgagcattccaacgacaacgactgttctgacgacaatgactgtttcaacgacaacgagcgttccaacgacaacgagcattccaacaacaacaagtgttccagtgacaacaactgtctctacctttgttcctccaatgcctttgcccaggcagaaccatgaaccagtagccacttcaccatcttcacctcagccagcagaaacccaccctacgacactgcagggagcaataaggagagaacccaccagctcaccattgtactcttacacaacagatgggaatgacaccgtgacagagtcttcagatggcctttggaataacaatcaaactcaactgttcctagaacatagtctactgacggccaataccactaaaggaatctatgctggagtctgtatttctgtcttggtgcttcttgctcttttgggtgtcatcattgccaaaaagtatttcttcaaaaaggaggttcaacaactaagtgtttcatttagcagccttcaaattaaagctttgcaaaatgcagttgaaaaggaagtccaagcagaagacaatatctacattgagaatagtctttatgccacggactaagacccagtggtgctctttgagagtttacgcccatgagtgcagaagactgaacagacatcagcacatcagacgtcttttagaccccaagacaatttttctgtttcagtttcatctggcattccaacatgtcagtgatactgggtagagtaactctctcactccaaactgtgtatagtcaacctcatcattaatgtagtcctaattttttatgctaaaa

SEQ ID NO: 13496 - DNA, 1807 bp, Homo sapiens
  source 1..1807: mol_type = unassigned DNA
attctcctgcctcagcctcccgagtagctgggactacaggcgccagtgaccacgcccggctaattttttgtatttttagtagagacggggtttcacccttttagccaggatggtctcgatctcctgacttcgtgatctgcccgccttggcctcccaaagtgctaggattacaggtttgagccaccgcgcccggccctgtttcctttttgtttgttcccctgataccctgtatcaggaccaggagtcagtttggcggttatgtgtggggaagaagctgggaagtcaggggctgtttctgtggacagctttccctgtcctttggaaggcacagagctctcagctgcagggaactaacagagctctgaagccgttatatgtggtcttctctcatttccagcagagcaggctcatatgaatcaaccaactgggtgaaaagataagttgcaatctgagatttaagacttgatcagataccatctggtggagggtaccaaccagcctgtctgctcattttccttcaggctgatcccataatgcatcctcaagtggtcatcttaagcctcatcctacatctggcagattctgtagctggttctgtaaaggttggtggagaggcaggtccatctgtcacactaccctgccactacagtggagctgtcacatccatgtgctggaatagaggctcatgttctctattcacatgccaaaatggcattgtctggaccaatggaacccacgtcacctatcggaaggacacacgctataagctattgggggacctttcaagaagggatgtctctttgaccatagaaaatacagctgtgtctgacagtggcgtatattgttgccgtgttgagcaccgtgggtggttcaatgacatgaaaatcaccgtatcattggagattgtgccacccaaggtcacgactactccaattgtcacaactgttccaaccgtcacgactgttcgaacgagcaccactgttccaacgacaacgactgttccaatgacgactgttccaacgacaactgttccaacaacaatgagcattccaacgacaacgactgttctgacgacaatgactgtttcaacgacaacgagcgttccaacgacaacgagcattccaacaacaacaagtgttccagtgacaacaactgtctctacctttgttcctccaatgcctttgcccaggcagaaccatgaaccagtagccacttcaccatcttcacctcagccagcagaaacccaccctacgacactgcagggagcaataaggagagaacccaccagctcaccattgtactcttacacaacagatgggaatgacaccgtgacagagtcttcagatggcctttggaataacaatcaaactcaactgttcctagaacatagtctactgacggccaataccactaaaggaatctatgctggagtctgtatttctgtcttggtgcttcttgctcttttgggtgtcatcattgccaaaatgtttcatttagcagccttcaaattaaagctttgcaaaatgcagttgaaaaggaagtccaagcagaagacaatatctacattgagaatagtctttatgccacggactaagacccagtggtgctctttgagagtttacgcccatgagtgcagaagactgaacagacatcagcacatcagacgtcttttagaccccaagacaatttttctgtttcagtttcatctggcattccaacatgtcagtgatactgggtagagtaactctctcactccaaactgtgtatagtcaacctcatcattaatgtagtcctaattttttatgct

SEQ ID NO: 13497 - DNA, 774 bp, Homo sapiens
  source 1..774: mol_type = unassigned DNA
agagacggggtttcacccttttagccaggatggtctcgatctcctgacttcgtgatctgcccgccttggcctcccaaagtgctaggattacaggctgatcccataatgcatcctcaagtggtcatcttaagcctcatcctacatctggcagattctgtagctggttctgtaaaggttggtggagaggcaggtccatctgtcacactaccctgccactacagtggagctgtcacatccatgtgctggaatagaggctcatgttctctattcacatgccaaaatggcattgtctggaccaatggaacccacgtcacctatcggaaggacacacgctataagctattgggggacctttcaagaagggatgtctctttgaccatagaaaatacagctgtgtctgacagtggcgtatattgttgccgtgttgagcaccgtgggtggttcaatgacatgaaaatcaccgtatcattggagattgtgccacccaaggtcacgactactccaattgtcacaactgttccaaccgtcacgactgttcgaacgagcaccactgttccaacgacaacgactgttccaatgacgactgttccaacgacaactgttccaacaacaatgagcattccaacgacaacgactgttctgacgacaatgactgtttcaacgacaacgagcgttccaacgacaacgagcattccaacaacaacaagtgttccagtgacaacaactgtctctacctttgttcctccaatgcctttgcccaggcagaaccatgaa

SEQ ID NO: 13498 - DNA, 1449 bp, Homo sapiens
  source 1..1449: mol_type = unassigned DNA
cccagcattgtgagtgacagagcctggatctgaacgctgatcccataatgcatcctcaagtggtcatcttaagcctcatcctacatctggcagattctgtagctggttctgtaaaggttggtggagaggcaggtccatctgtcacactaccctgccactacagtggagctgtcacatccatgtgctggaatagaggctcatgttctctattcacatgccaaaatggcattgtctggaccaatggaacccacgtcacctatcggaaggacacacgctataagctattgggggacctttcaagaagggatgtctctttgaccatagaaaatacagctgtgtctgacagtggcgtatattgttgccgtgttgagcaccgtgggtggttcaatgacatgaaaatcaccgtatcattggagattgtgccacccaaggtcacgactactccaattgtcacaactgttccaaccgtcacgactgttcgaacgagcaccactgttccaacgacaacgactgttccaatgacgactgttccaacgacaactgttccaacaacaatgagcattccaacgacaacgactgttctgacgacaatgactgtttcaacgacaacgagcgttccaacgacaacgagcattccaacaacaacaagtgttccagtgacaacaactgtctctacctttgttcctccaatgcctttgcccaggcagaaccatgaaccagtagccacttcaccatcttcacctcagccagcagaaacccaccctacgacactgcagggagcaataaggagagaacccaccagctcaccattgtactcttacacaacagatgggaatgacaccgtgacagagtcttcagatggcctttggaataacaatcaaactcaactgttcctagaacatagtctactgacggccaataccactaaaggaatctatgctggagtctgtatttctgtcttggtgcttcttgctcttttgggtgtcatcattgccaaaaagtatttcttcaaaaaggaggttcaacaactaagtgtttcatttagcagccttcaaattaaagctttgcaaaatgcagttgaaaaggaagtccaagcagaagacaatatctacattgagaatagtctttatgccacggactaagacccagtggtgctctttgagagtttacgcccatgagtgcagaagactgaacagacatcagcacatcagacgtcttttagaccccaagacaatttttctgtttcagtttcatctggcattccaacatgtcagtgatactgggtagagtaactctctcactccaaactgtgtatagtcaacctcatcattaatgtagtcctaattttttatgctaaaactggctcaatccttctgatcattgcagttttctctcaaatatgaacactttataattgtatgttctttttagaccccataaatcctgtat

SEQ ID NO: 13499 - DNA, 1493 bp, Homo sapiens
  source 1..1493: mol_type = unassigned DNA
attctcctgcctcagcctcccgagtagctgggactacaggcgccagtgaccacgcccggctaattttttgtatttttagtagagacggggtttcacccttttagccaggatggtctcgatctcctgacttcgtgatctgcccgccttggcctcccaaagtgctaggattacaggctgatcccataatgcatcctcaagtggtcatcttaagcctcatcctacatctggcagattctgtagctggttctgtaaaggttggtggagaggcaggtccatctgtcacactaccctgccactacagtggagctgtcacatccatgtgctggaatagaggctcatgttctctattcacatgccaaaatggcattgtctggaccaatggaacccacgtcacctatcggaaggacacacgctataagctattgggggacctttcaagaagggatgtctctttgaccatagaaaatacagctgtgtctgacagtggcgtatattgttgccgtgttgagcaccgtgggtggttcaatgacatgaaaatcaccgtatcattggagattgtgccacccaaggtcacgactactccaattgtcacaactgttccaaccgtcacgactgttcgaacgagcaccactgttccaacgacaacgactgttccaatgacgactgttccaacgacaactgttccaacaacaatgagcattccaacgacaacgactgttctgacgacaatgactgtttcaacgacaacgagcgttccaacgacaacgagcattccaacaacaacaagtgttccagtgacaacaactgtctctacctttgttcctccaatgcctttgcccaggcagaaccatgaaccagtagccacttcaccatcttcacctcagccagcagaaacccaccctacgacactgcagggagcaataaggagagaacccaccagctcaccattgtactcttacacaacagatgggaatgacaccgtgacagagtcttcagatggcctttggaataacaatcaaactcaactgttcctagaacatagtctactgacggccaataccactaaaggaatctatgctggagtctgtatttctgtcttggtgcttcttgctcttttgggtgtcatcattgccaaaaagtatttcttcaaaaaggaggttcaacaactaagtgtttcatttagcagccttcaaattaaagctttgcaaaatgcagttgaaaaggaagtccaagcagaagacaatatctacattgagaatagtctttatgccacggactaagacccagtggtgctctttgagagtttacgcccatgagtgcagaagactgaacagacatcagcacatcagacgtcttttagaccccaagacaatttttctgtttcagtttcatctggcattccaacatgtcagtgatactgggtagagtaactctctcactccaaactgtgtatagtcaacctcatcattaatgtagtcctaattttttatgct

SEQ ID NO: 13500 - DNA, 868 bp, Homo sapiens
  source 1..868: mol_type = unassigned DNA
gccacgaactgaagcactgaggcccggctgcagacctctcccgagaggggaataatccgtgccggccggttccgccatggagccaggtgcaggtcacctcgacggtcaccgcgcggggagcccaagccttcgtcaggctctgtgcgacggaagcgcagtgatgttttccagtaaagaacgcggacgttgcaccgtgatcaattttgtccctttggaggcgccgttacggtccacgccccgctcgcgtcaagtgactgaggcctgtggtggagaaggacgtgccgtgccgctgggttctgagccggagtggtcggtgggtgggatggaggcgaccttggagcagcacttggaagacacaatgaagaatccctccattgttggagtcctgtgcacagattcacaaggacttaatctgggttgccgcgggaccctgtcagatgagcatgctggagtgatatctgttctagcccagcaagcagctaagctaacctctgaccccactgatattcctgtggtgtgtctagaatcagataatgggaacattatgatccagaaacacgatggcatcacggtggcagtgcacaaaatggcctcttgatgctcatatctgttcttcagcagcctgtcataggaactggatcctacctatgttaattaccttatagaactactaaagttccagtagttaggccattcatttaatgtgcattaggcacttttctgtttatttaagagtcaattgctttctaatgctctatggaccgactatcaagatattagtaagaaaggatcatgttttgaagcagcaggtccaggtcactttgtatatagaattttgctgtattcaataaatctgtttggaggaaaa

SEQ ID NO: 13501 - DNA, 1434 bp, Homo sapiens
  source 1..1434: mol_type = unassigned DNA
tttcatttcatcaaaagtttattgagcatccagtatgtgctaggcactctgctggatgctagtaatacaaagatgaagatgaaaacaacacaaaaacaaaccccacttccttacttacccctccccacccccaatttaaggcagatttggcttaagcctggcaagctggcccctcagggattcagcaccagggtatggcatgttctcatctcaccctaaccttcacctgtgcatctcaaggctgaccagcaggtactccttatccaagtcctgctgcctcttccaccttcttgagaaacttttcccctacatgcattatctcattatggatgaggcacctgggaagtttaggggagctgcgaaggcacacctgctcaaatgagcctggggaagtgccgagggacagggagctgagacaggcatgctgtggggttcagggcagagggggcaaactagaaatgtcagtgcctttggggctgagacaaaacttgacctggtgtggaggtgatgggtaactggggccttggaattgctccatgggttgatggcgaatcagagctggagtttaggagactagggatgcaaggacccttggaggcattaaggaggagggaatggaatacacagagggcctccttctctttcagctttttaattgccctctctcctcacacagtagattactgccactcctatgaactgttcaataggcggtggcatgggcatgtcctggctacacagcggcccagcctctttattttgatgttagtgtgattagggagtctgccctttttctgtgccctgggacctgagcatgtgggagcagggcagatgggtggcaggaggccaggggttggatcatgttccccccaaatgctgggaagcaataagcctcctcctccccccaccatttctctggagattaggacttattctcacagctggaggaagctcaacaactttcctgaggacaatgattgtttgaaaggcttgttttgtaaggaagccaggaggaatatatgagtttgatgagctaaaacagttcctcatttggtctagttttcgggccaggggagtaagtgaaattcacttctctataagaataagcccatccatctcttttattcatgaacagagacagaaagagtgcttggcatggcatgcctccgagggaggctgtgggaggaggccaagctggcaggctcgggttctttgcccttgctagcgcccaggtcagagggaaaaggaatgtactcgtacccttccctcaccaccttgtaggtccccaggtaccaggtgcccagggaagaaggccttcacaatgatccccccagctcagaacagcccctgcacacccagtaaccggcatctggcttctccttagcttagtgcagctgtggattctgggaaagtggcctctctaatctgaacttg

SEQ ID NO: 13502 - DNA, 2906 bp, Homo sapiens
  source 1..2906: mol_type = unassigned DNA
cggaagcggaagtcggggggcgcgccagctcgtagcaggggagcgcccgcggcgtcgggtttgggctggaggtcgccatggggcgaggcagcggcaccttcgagcgtctcctagacaaggcgaccagccagctcctgttggagacagattgggagtccattttgcagatctgcgacctgatccgccaaggggacacacaagcaaaatatgctgtgaattccatcaagaagaaagtcaacgacaagaacccacacgtcgccttgtatgccctggaggtcatggaatctgtggtaaagaactgtggccagacagttcatgatgaggtggccaacaagcagaccatggaggagctgaaggacctgctgaagagacaagtggaggtaaacgtccgtaacaagatcctgtacctgatccaggcctgggcgcatgccttccggaacgagcccaagtacaaggtggtccaggacacctaccagatcatgaaggtggaggggcacgtctttccagaattcaaagagagcgatgccatgtttgctgccgagagagccccagactgggtggacgctgaggaatgccaccgctgcagggtgcagttcggggtgatgacccgtaagcaccactgccgggcgtgtgggcagatattctgtggaaagtgttcttccaagtactccaccatccccaagtttggcatcgagaaggaggtgcgcgtgtgtgagccctgctacgagcagctgaacaggaaagcggagggaaaggccacttccaccactgagctgccccccgagtacctgaccagccccctgtctcagcagtcccagctgccccccaagagggacgagacggccctgcaggaggaggaggagctgcagctggccctggcgctgtcacagtcagaggcggaggagaaggagaggctgagacagaagtccacgtacacttcgtaccccaaggcggagcccatgccctcggcctcctcagcgccccccgccagcagcctgtactcttcacctgtgaactcgtcggcgcctctggctgaggacatcgaccctgagctcgcacggtatctcaaccggaactactgggagaagaagcaggaggaggctcgcaagagccccacgccatctgcgcccgtgcccctgacggagccggctgcacagcctggggaagggcacgcagcccccaccaacgtggtggagaaccccctcccggagacagactctcagcccattcctccctctggtggcccctttagtgagccacagttccacaatggcgagtctgaggagagccacgagcagttcctgaaggcgctgcagaacgccgtcaccaccttcgtgaaccgcatgaagagtaaccacatgcggggccgcagcatcaccaatgactcggccgtgctctcactcttccagtccatcaacggcatgcacccgcagctgctggagctgctcaaccagctggacgagcgcaggctgtactatgaggggctgcaggacaagctggcacagatccgcgatgcccggggggcgctgagtgccctgcgcgaagagcaccgggagaagcttcgccgggcagccgaggaggcagagcgccagcgccagatccagctggcccagaagctggagataatgcggcagaagaagcaggagtacctggaggtgcagaggcagctggccatccagcgcctgcaggagcaggagaaggagcggcagatgcggctggagcagcagaagcagacggtccagatgcgcgcgcagatgcccgccttccccctgccctacgcccagctccaggccatgcccgcagccggaggtgtgctctaccagccctcgggaccagccagcttccccagcaccttcagccctgccggctcggtggagggctccccaatgcacggcgtgtacatgagccagccggcccctgccgctggcccctaccccagcatgcccagcactgcggctgatcccagcatggtgagtgcctacatgtacccagcaggggccactggggcgcaggcggccccccaggcccaggccggacccaccgccagccccgcttactcatcctaccagcctactcccacagcgggctaccagaacgtggcctcccaggccccacagagcctcccggccatctctcagcctccgcagtccagcaccatgggctacatggggagccagtcagtctccatgggctaccagccttacaacatgcagaatctcatgaccaccctcccaagccaggatgcgtctctgccaccccagcagccctacatcgcggggcagcagcccatgtaccagcagatggcaccctctggcggtcccccccagcagcagccccccgtggcccagcaaccgcaggcacaggggccgccggcacagggcagcgaggcccagctcatttcattcgactgacccaggccatgctcacgtccggagtaacactacatacagttcacctgaaacgcctcgtctctaactgccgtcgtcctgcctccctgtcctctactgccggtagtgtcccttctctgcgagtgagggggggccttcaccccaagcccacctcccttgtcctcagcctactgcagtccctgagttagtctctgctttctttccccagggctgggccatggggagggaaggactttctcccaggggaagcccccagccctgtgggtcatggtctgtgagaggtggcaggaatggggaccctcaccccccaagcagcctgtgccctctggccgcactgtgagctggctgtggtgtctgggtgtggcctggggctccctctgcaggggcctctctcggcagccacagccaagggtggaggcttcaggtctccagcttctctgcttctcagctgccatctccagtgccccagaatggtacagcgataataaaatgtatttc

SEQ ID NO: 13503 - DNA, 2648 bp, Homo sapiens
  source 1..2648: mol_type = unassigned DNA
gaagcggaagtcggggggcgcgccagctcgtagcaggggagcgcccgcggcgtcgggtttgggctggaggtcgccatggggcgaggcagcggcaccttcgagcgtctcctagacaaggcgaccagccagctcctgttggagacagattgggagtccattttgcagatctgcgacctgatccgccaaggggacacacaagcaaaatatgctgtgaattccatcaagaagaaagtcaacgacaagaacccacacgtcgccttgtatgccctggaggtcatggaatctgtggtaaagaactgtggccagacagttcatgatgaggtggccaacaagcagaccatggaggagctgaaggacctgctgaagagacaagtggaggtaaacgtccgtaacaagatcctgtacctgatccaggcctgggcgcatgccttccggaacgagcccaagtacaaggtggtccaggacacctaccagatcatgaaggtggaggggcacgtctttccagaattcaaagagagcgatgccatgtttgctgccgagagagccccagactgggtggacgctgaggaatgccaccgctgcagggtgcagttcggggtgatgacccgtaagcaccactgccgggcgtgtgggcagatattctgtggaaagtgttcttccaagtactccaccatccccaagtttggcatcgagaaggaggtgcgcgtgtgtgagccctgctacgagcagctgaacaggaaagcggagggaaaggccacttccaccactgagctgccccccgagtacctgaccagccccctgtctcagcagtcccagctgccccccaagagggacgagacggccctgcaggaggaggaggagctgcagctggccctggcgctgtcacagtcagaggcggaggagaaggagaggctgagacagaagtccacgtacacttcgtaccccaaggcggagcccatgccctcggcctcctcagcgccccccgccagcagcctgtactcttcacctgtgaactcgtcggcgcctctggctgaggacatcgaccctgagctcgcacggtatctcaaccggaactactgggagaagaagcaggaggaggctcgcaagagccccacgccatctgcgcccgtgcccctgacggagccggctgcacagcctggggaagggcacgcagcccccaccaacgtggtggagaaccccctcccggagacagactctcagcccattcctccctctggtggcccctttagtgagccacagttccacaatggcgagtctgaggagagccacgagcagttcctgaaggcgctgcagaacgccgtcaccaccttcgtgaaccgcatgaagagtaaccacatgcggggccgcagcatcaccaatgactcggccgtgctctcactcttccagtccatcaacggcatgcacccgcagctgctggagctgctcaaccagctggacgagcgcaggctgtactatgaggggctgcaggacaagctggcacagatccgcgatgcccggggggcgctgagtgccctgcgcgaagagcaccgggagaagcttcgccgggcagccgaggaggcagagcgccagcgccagatccagctggcccagaagctggagataatgatgcacggcgtgtacatgagccagccggcccctgccgctggcccctaccccagcatgcccagcactgcggctgatcccagcatggtgagtgcctacatgtacccagcaggggccactggggcgcaggcggccccccaggcccaggccggacccaccgccagccccgcttactcatcctaccagcctactcccacagcgggctaccagaacgtggcctcccaggccccacagagcctcccggccatctctcagcctccgcagtccagcaccatgggctacatggggagccagtcagtctccatgggctaccagccttacaacatgcagaatctcatgaccaccctcccaagccaggatgcgtctctgccaccccagcagccctacatcgcggggcagcagcccatgtaccagcagatggcaccctctggcggtcccccccagcagcagccccccgtggcccagcaaccgcaggcacaggggccgccggcacagggcagcgaggcccagctcatttcattcgactgacccaggccatgctcacgtccggagtaacactacatacagttcacctgaaacgcctcgtctctaactgccgtcgtcctgcctccctgtcctctactgccggtagtgtcccttctctgcgagtgagggggggccttcaccccaagcccacctcccttgtcctcagcctactgcagtccctgagttagtctctgctttctttccccagggctgggccatggggagggaaggactttctcccaggggaagcccccagccctgtgggtcatggtctgtgagaggtggcaggaatggggaccctcaccccccaagcagcctgtgccctctggccgcactgtgagctggctgtggtgtctgggtgtggcctggggctccctctgcaggggcctctctcggcagccacagccaagggtggaggcttcaggtctccagcttctctgcttctcagctgccatctccagtgccccagaatggtacagcgataataaaatgtatttcag

SEQ ID NO: 13504 - DNA, 3340 bp, Homo sapiens
  source 1..3340: mol_type = unassigned DNA
gcagagagggcactgggaggaggcagtgggagggcggagggcgggggccttcggggtgggcgcccagggtagggcaggtggccgcggcgtggaggcagggagaatgcgactctccaaaaccctcgtcgacatggacatggccgactacagtgctgcactggacccagcctacaccaccctggaatttgagaatgtgcaggtgttgacgatgggcaatgattttgttgccgctgcgtctcgccagattgaggcatcccctccgacatcactggagcatatctggaggggtggacagttctccacagggagacacgtccccatcagaaggcaccaacctcaacgcgcccaacagcctgggtgtcagcgccctgtgtgccatctgcggggaccgggccacgggcaaacactacggtgcctcgagctgtgacggctgcaagggcttcttccggaggagcgtgcggaagaaccacatgtactcctgcagatttagccggcagtgcgtggtggacaaagacaagaggaaccagtgccgctactgcaggctcaagaaatgcttccgggctggcatgaagaaggaagccgtccagaatgagcgggaccggatcagcactcgaaggtcaagctatgaggacagcagcctgccctccatcaatgcgctcctgcaggcggaggtcctgtcccgacagatcacctcccccgtctccgggatcaacggcgacattcgggcgaagaagattgccagcatcgcagatgtgtgtgagtccatgaaggagcagctgctggttctcgttgagtgggccaagtacatcccagctttctgcgagctccccctggacgaccaggtggccctgctcagagcccatgctggcgagcacctgctgctcggagccaccaagagatccatggtgttcaaggacgtgctgctcctaggcaatgactacattgtccctcggcactgcccggagctggcggagatgagccgggtgtccatacgcatccttgacgagctggtgctgcccttccaggagctgcagatcgatgacaatgagtatgcctacctcaaagccatcatcttctttgacccagatgccaaggggctgagcgatccagggaagatcaagcggctgcgttcccaggtgcaggtgagcttggaggactacatcaacgaccgccagtatgactcgcgtggccgctttggagagctgctgctgctgctgcccaccttgcagagcatcacctggcagatgatcgagcagatccagttcatcaagctcttcggcatggccaagattgacaacctgttgcaggagatgctgctgggagggtcccccagcgatgcaccccatgcccaccaccccctgcaccctcacctgatgcaggaacatatgggaaccaacgtcatcgttgccaacacaatgcccactcacctcagcaacggacagatgtgtgagtggccccgacccaggggacaggcagccacccctgagaccccacagccctcaccgccaggtggctcagggtctgagccctataagctcctgccgggagccgtcgccacaatcgtcaagcccctctctgccatcccccagccgaccatcaccaagcaggaagttatctagcaagccgctggggcttgggggctccactggctccccccagccccctaagagagcacctggtgatcacgtggtcacggcaaaggaagacgtgatgccaggaccagtcccagagcaggaatgggaaggatgaagggcccgagaacatggcctaagggccacatcccactgccacccttgacgccctgctctggataacaagactttgacttggggagacctctactgccttggacaacttttctcatgttgaagccactgccttcaccttcaccttcatccatgtccaacccccgacttcatcccaaaggacagccgcctggagatgacttgaggccttacttaaacccagctcccttcttccctagcctggtgcttctcctctcctagcccctgtcatggtgtccagacagagccctgtgaggctgggtccaattgtggcacttggggcaccttgctcctccttctgctgctgcccccacctctgctgcctccctctgctgtcaccttgctcagccatcccgtcttctccaacaccacctctccagaggccaaggaggccttggaaacgattcccccagtcattctgggaacatgttgtaagcactgactgggaccaggcaccaggcagggtctagaaggctgtggtgagggaagacgcctttctcctccaacccaacctcatcctccttcttcagggacttgggtgggtacttgggtgaggatccctgaaggccttcaacccgagaaaacaaacccaggttggcgactgcaacaggaacttggagtggagaggaaaagcatcagaaagaggcagaccatccaccaggcctttgagaaagggtagaattctggctggtagagcaggtgagatgggacattccaaagaacagcctgagccaaggcctagtggtagtaagaatctagcaagaattgaggaagaatggtgtgggagagggatgatgaagagagagagggcctgctggagagcatagggtctggaacaccaggctgaggtcctgatcagcttcaaggagtatgcagggagctgggcttccagaaaatgaacacagcagttctgcagaggacgggaggctggaagctgggaggtcaggtggggtggatgatataatgcgggtgagagtaatgaggcttggggctggagaggacaagatgggtaaaccctcacatcagagtgacatccaggaggaataagctcccagggcctgtctcaagctcttccttactcccaggcactgtcttaaggcatctgacatgcatcatctcatttaatcctcccttcctccctattaacctagagattgtttttgttttttattctcctcctccctccccgccctcacccgccccactccctcctaacctagagattgttacagaagctgaaattgcgttctaagaggtgaagtgattttttttctgaaactcacacaactaggaagtggctgagtcaggacttgaacccaggtctccctggatcagaacaggagctcttaactacagtggctgaatagcttctccaaaggctccctgtgttctcaccgtgatcaagttgaggggcttccggctcccttctacagcctcagaaaccagactcgttcttctgggaaccctgcccactcccaggaccaagattggcctgaggctgcactaaaattcacttagggtcgagcatcctgtttgctgataaatattaaggagaa

SEQ ID NO: 13505 - DNA, 3235 bp, Homo sapiens
  source 1..3235: mol_type = unassigned DNA
gggaggaggcagtgggagggcggagggcgggggccttcggggtgggcgcccagggtagggcaggtggccgcggcgtggaggcagggagaatgcgactctccaaaaccctcgtcgacatggacatggccgactacagtgctgcactggacccagcctacaccaccctggaatttgagaatgtgcaggtgttgacgatgggcaatgacacgtccccatcagaaggcaccaacctcaacgcgcccaacagcctgggtgtcagcgccctgtgtgccatctgcggggaccgggccacgggcaaacactacggtgcctcgagctgtgacggctgcaagggcttcttccggaggagcgtgcggaagaaccacatgtactcctgcagatttagccggcagtgcgtggtggacaaagacaagaggaaccagtgccgctactgcaggctcaagaaatgcttccgggctggcatgaagaaggaagccgtccagaatgagcgggaccggatcagcactcgaaggtcaagctatgaggacagcagcctgccctccatcaatgcgctcctgcaggcggaggtcctgtcccgacagatcacctcccccgtctccgggatcaacggcgacattcgggcgaagaagattgccagcatcgcagatgtgtgtgagtccatgaaggagcagctgctggttctcgttgagtgggccaagtacatcccagctttctgcgagctccccctggacgaccaggtggccctgctcagagcccatgctggcgagcacctgctgctcggagccaccaagagatccatggtgttcaaggacgtgctgctcctaggcaatgactacattgtccctcggcactgcccggagctggcggagatgagccgggtgtccatacgcatccttgacgagctggtgctgcccttccaggagctgcagatcgatgacaatgagtatgcctacctcaaagccatcatcttctttgacccagatgccaaggggctgagcgatccagggaagatcaagcggctgcgttcccaggtgcaggtgagcttggaggactacatcaacgaccgccagtatgactcgcgtggccgctttggagagctgctgctgctgctgcccaccttgcagagcatcacctggcagatgatcgagcagatccagttcatcaagctcttcggcatggccaagattgacaacctgttgcaggagatgctgctgggagggtcccccagcgatgcaccccatgcccaccaccccctgcaccctcacctgatgcaggaacatatgggaaccaacgtcatcgttgccaacacaatgcccactcacctcagcaacggacagatgtgtgagtggccccgacccaggggacaggcagccacccctgagaccccacagccctcaccgccaggtggctcagggtctgagccctataagctcctgccgggagccgtcgccacaatcgtcaagcccctctctgccatcccccagccgaccatcaccaagcaggaagttatctagcaagccgctggggcttgggggctccactggctccccccagccccctaagagagcacctggtgatcacgtggtcacggcaaaggaagacgtgatgccaggaccagtcccagagcaggaatgggaaggatgaagggcccgagaacatggcctaagggccacatcccactgccacccttgacgccctgctctggataacaagactttgacttggggagacctctactgccttggacaacttttctcatgttgaagccactgccttcaccttcaccttcatccatgtccaacccccgacttcatcccaaaggacagccgcctggagatgacttgaggccttacttaaacccagctcccttcttccctagcctggtgcttctcctctcctagcccctgtcatggtgtccagacagagccctgtgaggctgggtccaattgtggcacttggggcaccttgctcctccttctgctgctgcccccacctctgctgcctccctctgctgtcaccttgctcagccatcccgtcttctccaacaccacctctccagaggccaaggaggccttggaaacgattcccccagtcattctgggaacatgttgtaagcactgactgggaccaggcaccaggcagggtctagaaggctgtggtgagggaagacgcctttctcctccaacccaacctcatcctccttcttcagggacttgggtgggtacttgggtgaggatccctgaaggccttcaacccgagaaaacaaacccaggttggcgactgcaacaggaacttggagtggagaggaaaagcatcagaaagaggcagaccatccaccaggcctttgagaaagggtagaattctggctggtagagcaggtgagatgggacattccaaagaacagcctgagccaaggcctagtggtagtaagaatctagcaagaattgaggaagaatggtgtgggagagggatgatgaagagagagagggcctgctggagagcatagggtctggaacaccaggctgaggtcctgatcagcttcaaggagtatgcagggagctgggcttccagaaaatgaacacagcagttctgcagaggacgggaggctggaagctgggaggtcaggtggggtggatgatataatgcgggtgagagtaatgaggcttggggctggagaggacaagatgggtaaaccctcacatcagagtgacatccaggaggaataagctcccagggcctgtctcaagctcttccttactcccaggcactgtcttaaggcatctgacatgcatcatctcatttaatcctcccttcctccctattaacctagagattgtttttgttttttattctcctcctccctccccgccctcacccgccccactccctcctaacctagagattgttacagaagctgaaattgcgttctaagaggtgaagtgattttttttctgaaactcacacaactaggaagtggctgagtcaggacttgaacccaggtctccctggatcagaacaggagctcttaactacagtggctgaatagcttctccaaaggctccctgtgttctcaccgtgatcaagttgaggggcttccggctcccttctacagcctcagaaaccagactcgttcttctgggaaccctgcccactcccaggaccaagattggcctgaggctgcactaaaattcacttagggtcgagcatcctgtttgctgataaatattaaggagaa

SEQ ID NO: 13506 - DNA, 1470 bp, Homo sapiens
  source 1..1470: mol_type = unassigned DNA
cactcaccgccttcctggtggacgggctcctggtggctgtgctgctgctgtgagcgggcccctgctcctccatgcccccagctctccggctgggtgggcttggccatggtcagcgtgaacgcgcccctcggggctccagtggagagttcttacgacacgtccccatcagaaggcaccaacctcaacgcgcccaacagcctgggtgtcagcgccctgtgtgccatctgcggggaccgggccacgggcaaacactacggtgcctcgagctgtgacggctgcaagggcttcttccggaggagcgtgcggaagaaccacatgtactcctgcagatttagccggcagtgcgtggtggacaaagacaagaggaaccagtgccgctactgcaggctcaagaaatgcttccgggctggcatgaagaaggaagccgtccagaatgagcgggaccggatcagcactcgaaggtcaagctatgaggacagcagcctgccctccatcaatgcgctcctgcaggcggaggtcctgtcccgacagatcacctcccccgtctccgggatcaacggcgacattcgggcgaagaagattgccagcatcgcagatgtgtgtgagtccatgaaggagcagctgctggttctcgttgagtgggccaagtacatcccagctttctgcgagctccccctggacgaccaggtggccctgctcagagcccatgctggcgagcacctgctgctcggagccaccaagagatccatggtgttcaaggacgtgctgctcctaggcaatgactacattgtccctcggcactgcccggagctggcggagatgagccgggtgtccatacgcatccttgacgagctggtgctgcccttccaggagctgcagatcgatgacaatgagtatgcctacctcaaagccatcatcttctttgacccagatgccaaggggctgagcgatccagggaagatcaagcggctgcgttcccaggtgcaggtgagcttggaggactacatcaacgaccgccagtatgactcgcgtggccgctttggagagctgctgctgctgctgcccaccttgcagagcatcacctggcagatgatcgagcagatccagttcatcaagctcttcggcatggccaagattgacaacctgttgcaggagatgctgctgggagggtcccccagcgatgcaccccatgcccaccaccccctgcaccctcacctgatgcaggaacatatgggaaccaacgtcatcgttgccaacacaatgcccactcacctcagcaacggacagatgtgtgagtggccccgacccaggggacaggcagccacccctgagaccccacagccctcaccgccaggtggctcagggtctgagccctataagctcctgccgggagccgtcgccacaatcgtcaagcccctctctgccatcccccagccgaccatcaccaagcaggaagttatctagcaagcc

SEQ ID NO: 13507 - DNA, 3329 bp, Homo sapiens
  source 1..3329: mol_type = unassigned DNA
gggaggaggcagtgggagggcggagggcgggggccttcggggtgggcgcccagggtagggcaggtggccgcggcgtggaggcagggagaatgcgactctccaaaaccctcgtcgacatggacatggccgactacagtgctgcactggacccagcctacaccaccctggaatttgagaatgtgcaggtgttgacgatgggcaatgttttgttgccgctgcgtctcgccagattgaggcatcccctccgacatcactggagcatatctggaggggtggacagttctccacagggagacacgtccccatcagaaggcaccaacctcaacgcgcccaacagcctgggtgtcagcgccctgtgtgccatctgcggggaccgggccacgggcaaacactacggtgcctcgagctgtgacggctgcaagggcttcttccggaggagcgtgcggaagaaccacatgtactcctgcagatttagccggcagtgcgtggtggacaaagacaagaggaaccagtgccgctactgcaggctcaagaaatgcttccgggctggcatgaagaaggaagccgtccagaatgagcgggaccggatcagcactcgaaggtcaagctatgaggacagcagcctgccctccatcaatgcgctcctgcaggcggaggtcctgtcccgacagatcacctcccccgtctccgggatcaacggcgacattcgggcgaagaagattgccagcatcgcagatgtgtgtgagtccatgaaggagcagctgctggttctcgttgagtgggccaagtacatcccagctttctgcgagctccccctggacgaccaggtggccctgctcagagcccatgctggcgagcacctgctgctcggagccaccaagagatccatggtgttcaaggacgtgctgctcctaggcaatgactacattgtccctcggcactgcccggagctggcggagatgagccgggtgtccatacgcatccttgacgagctggtgctgcccttccaggagctgcagatcgatgacaatgagtatgcctacctcaaagccatcatcttctttgacccagatgccaaggggctgagcgatccagggaagatcaagcggctgcgttcccaggtgcaggtgagcttggaggactacatcaacgaccgccagtatgactcgcgtggccgctttggagagctgctgctgctgctgcccaccttgcagagcatcacctggcagatgatcgagcagatccagttcatcaagctcttcggcatggccaagattgacaacctgttgcaggagatgctgctgggagggtcccccagcgatgcaccccatgcccaccaccccctgcaccctcacctgatgcaggaacatatgggaaccaacgtcatcgttgccaacacaatgcccactcacctcagcaacggacagatgtgtgagtggccccgacccaggggacaggcagccacccctgagaccccacagccctcaccgccaggtggctcagggtctgagccctataagctcctgccgggagccgtcgccacaatcgtcaagcccctctctgccatcccccagccgaccatcaccaagcaggaagttatctagcaagccgctggggcttgggggctccactggctccccccagccccctaagagagcacctggtgatcacgtggtcacggcaaaggaagacgtgatgccaggaccagtcccagagcaggaatgggaaggatgaagggcccgagaacatggcctaagggccacatcccactgccacccttgacgccctgctctggataacaagactttgacttggggagacctctactgccttggacaacttttctcatgttgaagccactgccttcaccttcaccttcatccatgtccaacccccgacttcatcccaaaggacagccgcctggagatgacttgaggccttacttaaacccagctcccttcttccctagcctggtgcttctcctctcctagcccctgtcatggtgtccagacagagccctgtgaggctgggtccaattgtggcacttggggcaccttgctcctccttctgctgctgcccccacctctgctgcctccctctgctgtcaccttgctcagccatcccgtcttctccaacaccacctctccagaggccaaggaggccttggaaacgattcccccagtcattctgggaacatgttgtaagcactgactgggaccaggcaccaggcagggtctagaaggctgtggtgagggaagacgcctttctcctccaacccaacctcatcctccttcttcagggacttgggtgggtacttgggtgaggatccctgaaggccttcaacccgagaaaacaaacccaggttggcgactgcaacaggaacttggagtggagaggaaaagcatcagaaagaggcagaccatccaccaggcctttgagaaagggtagaattctggctggtagagcaggtgagatgggacattccaaagaacagcctgagccaaggcctagtggtagtaagaatctagcaagaattgaggaagaatggtgtgggagagggatgatgaagagagagagggcctgctggagagcatagggtctggaacaccaggctgaggtcctgatcagcttcaaggagtatgcagggagctgggcttccagaaaatgaacacagcagttctgcagaggacgggaggctggaagctgggaggtcaggtggggtggatgatataatgcgggtgagagtaatgaggcttggggctggagaggacaagatgggtaaaccctcacatcagagtgacatccaggaggaataagctcccagggcctgtctcaagctcttccttactcccaggcactgtcttaaggcatctgacatgcatcatctcatttaatcctcccttcctccctattaacctagagattgtttttgttttttattctcctcctccctccccgccctcacccgccccactccctcctaacctagagattgttacagaagctgaaattgcgttctaagaggtgaagtgattttttttctgaaactcacacaactaggaagtggctgagtcaggacttgaacccaggtctccctggatcagaacaggagctcttaactacagtggctgaatagcttctccaaaggctccctgtgttctcaccgtgatcaagttgaggggcttccggctcccttctacagcctcagaaaccagactcgttcttctgggaaccctgcccactcccaggaccaagattggcctgaggctgcactaaaattcacttagggtcgagcatcctgtttgctgataaatattaaggagaattca

SEQ ID NO: 13508 - DNA, 3209 bp, Homo sapiens
  source 1..3209: mol_type = unassigned DNA
gggaggaggcagtgggagggcggagggcgggggccttcggggtgggcgcccagggtagggcaggtggccgcggcgtggaggcagggagaatgcgactctccaaaaccctcgtcgacatggacatggccgactacagtgctgcactggacccagcctacaccaccctggaatttgagaatgtgcaggtgttgacgatgggcaatgacacgtccccatcagaaggcaccaacctcaacgcgcccaacagcctgggtgtcagcgccctgtgtgccatctgcggggaccgggccacgggcaaacactacggtgcctcgagctgtgacggctgcaagggcttcttccggaggagcgtgcggaagaaccacatgtactcctgcagatttagccggcagtgcgtggtggacaaagacaagaggaaccagtgccgctactgcaggctcaagaaatgcttccgggctggcatgaagaaggaagccgtccagaatgagcgggaccggatcagcactcgaaggtcaagctatgaggacagcagcctgccctccatcaatgcgctcctgcaggcggaggtcctgtcccgacagatcacctcccccgtctccgggatcaacggcgacattcgggcgaagaagattgccagcatcgcagatgtgtgtgagtccatgaaggagcagctgctggttctcgttgagtgggccaagtacatcccagctttctgcgagctccccctggacgaccaggtggccctgctcagagcccatgctggcgagcacctgctgctcggagccaccaagagatccatggtgttcaaggacgtgctgctcctaggcaatgactacattgtccctcggcactgcccggagctggcggagatgagccgggtgtccatacgcatccttgacgagctggtgctgcccttccaggagctgcagatcgatgacaatgagtatgcctacctcaaagccatcatcttctttgacccagatgccaaggggctgagcgatccagggaagatcaagcggctgcgttcccaggtgcaggtgagcttggaggactacatcaacgaccgccagtatgactcgcgtggccgctttggagagctgctgctgctgctgcccaccttgcagagcatcacctggcagatgatcgagcagatccagttcatcaagctcttcggcatggccaagattgacaacctgttgcaggagatgctgctgggagggtcccccagcgatgcaccccatgcccaccaccccctgcaccctcacctgatgcaggaacatatgggaaccaacgtcatcgttgccaacacaatgcccactcacctcagcaacggacagatgtccacccctgagaccccacagccctcaccgccaggtggctcagggtctgagccctataagctcctgccgggagccgtcgccacaatcgtcaagcccctctctgccatcccccagccgaccatcaccaagcaggaagttatctagcaagccgctggggcttgggggctccactggctccccccagccccctaagagagcacctggtgatcacgtggtcacggcaaaggaagacgtgatgccaggaccagtcccagagcaggaatgggaaggatgaagggcccgagaacatggcctaagggccacatcccactgccacccttgacgccctgctctggataacaagactttgacttggggagacctctactgccttggacaacttttctcatgttgaagccactgccttcaccttcaccttcatccatgtccaacccccgacttcatcccaaaggacagccgcctggagatgacttgaggccttacttaaacccagctcccttcttccctagcctggtgcttctcctctcctagcccctgtcatggtgtccagacagagccctgtgaggctgggtccaattgtggcacttggggcaccttgctcctccttctgctgctgcccccacctctgctgcctccctctgctgtcaccttgctcagccatcccgtcttctccaacaccacctctccagaggccaaggaggccttggaaacgattcccccagtcattctgggaacatgttgtaagcactgactgggaccaggcaccaggcagggtctagaaggctgtggtgagggaagacgcctttctcctccaacccaacctcatcctccttcttcagggacttgggtgggtacttgggtgaggatccctgaaggccttcaacccgagaaaacaaacccaggttggcgactgcaacaggaacttggagtggagaggaaaagcatcagaaagaggcagaccatccaccaggcctttgagaaagggtagaattctggctggtagagcaggtgagatgggacattccaaagaacagcctgagccaaggcctagtggtagtaagaatctagcaagaattgaggaagaatggtgtgggagagggatgatgaagagagagagggcctgctggagagcatagggtctggaacaccaggctgaggtcctgatcagcttcaaggagtatgcagggagctgggcttccagaaaatgaacacagcagttctgcagaggacgggaggctggaagctgggaggtcaggtggggtggatgatataatgcgggtgagagtaatgaggcttggggctggagaggacaagatgggtaaaccctcacatcagagtgacatccaggaggaataagctcccagggcctgtctcaagctcttccttactcccaggcactgtcttaaggcatctgacatgcatcatctcatttaatcctcccttcctccctattaacctagagattgtttttgttttttattctcctcctccctccccgccctcacccgccccactccctcctaacctagagattgttacagaagctgaaattgcgttctaagaggtgaagtgattttttttctgaaactcacacaactaggaagtggctgagtcaggacttgaacccaggtctccctggatcagaacaggagctcttaactacagtggctgaatagcttctccaaaggctccctgtgttctcaccgtgatcaagttgaggggcttccggctcccttctacagcctcagaaaccagactcgttcttctgggaaccctgcccactcccaggaccaagattggcctgaggctgcactaaaattcacttagggtcgagcatcctgtttgctgataaatattaaggagaattca

SEQ ID NO: 13509 - DNA, 1603 bp, Homo sapiens
  source 1..1603: mol_type = unassigned DNA
gggaggaggcagtgggagggcggagggcgggggccttcggggtgggcgcccagggtagggcaggtggccgcggcgtggaggcagggagaatgcgactctccaaaaccctcgtcgacatggacatggccgactacagtgctgcactggacccagcctacaccaccctggaatttgagaatgtgcaggtgttgacgatgggcaatgacacgtccccatcagaaggcaccaacctcaacgcgcccaacagcctgggtgtcagcgccctgtgtgccatctgcggggaccgggccacgggcaaacactacggtgcctcgagctgtgacggctgcaagggcttcttccggaggagcgtgcggaagaaccacatgtactcctgcagatttagccggcagtgcgtggtggacaaagacaagaggaaccagtgccgctactgcaggctcaagaaatgcttccgggctggcatgaagaaggaagccgtccagaatgagcgggaccggatcagcactcgaaggtcaagctatgaggacagcagcctgccctccatcaatgcgctcctgcaggcggaggtcctgtcccgacagatcacctcccccgtctccgggatcaacggcgacattcgggcgaagaagattgccagcatcgcagatgtgtgtgagtccatgaaggagcagctgctggttctcgttgagtgggccaagtacatcccagctttctgcgagctccccctggacgaccaggtggccctgctcagagcccatgctggcgagcacctgctgctcggagccaccaagagatccatggtgttcaaggacgtgctgctcctaggcaatgactacattgtccctcggcactgcccggagctggcggagatgagccgggtgtccatacgcatccttgacgagctggtgctgcccttccaggagctgcagatcgatgacaatgagtatgcctacctcaaagccatcatcttctttgacccagatgccaaggggctgagcgatccagggaagatcaagcggctgcgttcccaggtgcaggtgagcttggaggactacatcaacgaccgccagtatgactcgcgtggccgctttggagagctgctgctgctgctgcccaccttgcagagcatcacctggcagatgatcgagcagatccagttcatcaagctcttcggcatggccaagattgacaacctgttgcaggagatgctgctgggaggtccgtgccaagcccaggaggggcggggttggagtggggactccccaggagacaggcctcacacagtgagctcacccctcagctccttggcttccccactgtgccgctttgggcaagttgcttaacctgtctgtgcctcagtttcctcaccagaaaaatgggaacaaggcaatggtctatttgttcaggcaccgagaacctagcacgtgccagtcactgttctaagtgctggcaattcagcaaagaacaagatctttgccctcggggaggctgtgtgtgtgtgagtatgtatggatgcgtggatatctgtgtatatgcccgtatgtgcgtgcatgtgtatataaagcctcacattttatgattttgaaataaacaggtaatatga

SEQ ID NO: 13510 - DNA, 1339 bp, Homo sapiens
  source 1..1339: mol_type = unassigned DNA
ggccatggtcagcgtgaacgcgcccctcggggctccagtggagagttcttacgacacgtccccatcagaaggcaccaacctcaacgcgcccaacagcctgggtgtcagcgccctgtgtgccatctgcggggaccgggccacgggcaaacactacggtgcctcgagctgtgacggctgcaagggcttcttccggaggagcgtgcggaagaaccacatgtactcctgcagatttagccggcagtgcgtggtggacaaagacaagaggaaccagtgccgctactgcaggctcaagaaatgcttccgggctggcatgaagaaggaagccgtccagaatgagcgggaccggatcagcactcgaaggtcaagctatgaggacagcagcctgccctccatcaatgcgctcctgcaggcggaggtcctgtcccgacagatcacctcccccgtctccgggatcaacggcgacattcgggcgaagaagattgccagcatcgcagatgtgtgtgagtccatgaaggagcagctgctggttctcgttgagtgggccaagtacatcccagctttctgcgagctccccctggacgaccaggtggccctgctcagagcccatgctggcgagcacctgctgctcggagccaccaagagatccatggtgttcaaggacgtgctgctcctaggcaatgactacattgtccctcggcactgcccggagctggcggagatgagccgggtgtccatacgcatccttgacgagctggtgctgcccttccaggagctgcagatcgatgacaatgagtatgcctacctcaaagccatcatcttctttgacccagatgccaaggggctgagcgatccagggaagatcaagcggctgcgttcccaggtgcaggtgagcttggaggactacatcaacgaccgccagtatgactcgcgtggccgctttggagagctgctgctgctgctgcccaccttgcagagcatcacctggcagatgatcgagcagatccagttcatcaagctcttcggcatggccaagattgacaacctgttgcaggagatgctgctgggagggtcccccagcgatgcaccccatgcccaccaccccctgcaccctcacctgatgcaggaacatatgggaaccaacgtcatcgttgccaacacaatgcccactcacctcagcaacggacagatgtccacccctgagaccccacagccctcaccgccaggtggctcagggtctgagccctataagctcctgccgggagccgtcgccacaatcgtcaagcccctctctgccatcccccagccgaccatcaccaagcaggaagttatctagcaagcc

SEQ ID NO: 13511 - DNA, 1728 bp, Homo sapiens
  source 1..1728: mol_type = unassigned DNA
ggagcctcggttcccctcgggcggctgaaggaggggctgagcctcaggacccctaggccaggccgtgttgaaagcagataccccgaggcctcgcccagcctgcgctggagggaagaaggcgctggaggagcaccagcgaaagcagccagtctgagatattgacactacagaaaaaactgacagcttactccttgtattgattctactcttctctacaaatatagactccgttccctaccacagccttatagttctgccccagagacaagtatgaataccacagacaacggtgtcaactgtctgtgtgctatctgtggggacagagcaacaggaaaacactatggggcatccagctgtgatgggtgcaagggtttcttcagacgcagcattcgtaagagtcacgtttattcttgcaggttcagtcggcaatgtgttgttgacaaggacaaaaggaatcaatgtagatattgtcgattaagaaagtgttttagagcgggaatgaaaaaagaagctgtacaaaatgaacgtgacagaataagcaccagaagaagcacatttgatggcagcaacatcccctccattaacacactggcacaagctgaagttcggtctcgccagatctcagtctcaagccctgggtcaagcactgacataaacgttaagaaaattgcaagtattggtgatgtctgtgaatctatgaaacagcagctcttagtcttggtggaatgggctaaatatattcctgccttctgtgaattaccattggatgatcaggtggcactgttgagagctcacgcaggggagcacttactgcttggagctacaaagagatccatgatgtataaagatattttgcttttgggaaacaactatgttattcaccgcaacagctgtgaagttgagattagccgtgtggccaatcgtgttctagatgagctggttagaccatttcaagaaatccagattgatgacaatgagtatgcttgtttaaaggcaattgtattttttgatccagatgcaaaagggctaagcgatccagtaaaaattaagaacatgaggttccaagtgcagatcggtttggaggactacatcaatgatcggcagtatgactcccgggggaggtttggagagttgcttctgctcctgcccacactgcagagcatcacgtggcaaatgattgagcaaatacagtttgttaaactttttgggatggttaaaattgacaatctacttcaggaaatgctattaggtggggcttccaatgatggcagtcatctccatcatccaatgcatccacatttgtctcaagacccattaactggacaaactatacttttaggtcccatgtcaacactggttcatgcagaccagatctcaactcctgaaaccccactcccttccccaccacaaggctctgggcaagaacagtacaaaatagctgcaaaccaagcatcagtcatttcacaccagcatctctccaaacaaaagcaattgtgaaaatgtgtttacttcagaacggcactacataaatgtgaaaagttgttgatcttgaaatatctcaggatagcacttttggcaaactcttagccaaggcttcttcattggtgctgttataagatggtgtcctattttcttgtttatacgttcattctgtttgttattgctactatgtaaaactttcacatgcaaccaatgtatatctgagtttgaagatgtttatatagggta

SEQ ID NO: 13512 - DNA, 4209 bp, Homo sapiens
  source 1..4209: mol_type = unassigned DNA
ggattagcactcacagattgaaagcaaaacacatcaaaacactcatcacgcactctgggcttgtggtgccacttgtatgtgtgtttctaaatcaatgatgagggtatcagaaccaatactggacatggacatggcaaattacagtgaagttttggacccaacttacacaactttggagtttgaaactatgcagattctatataattcaagtgatagttctgccccagagacaagtatgaataccacagacaacggtgtcaactgtctgtgtgctatctgtggggacagagcaacaggaaaacactatggggcatccagctgtgatgggtgcaagggtttcttcagacgcagcattcgtaagagtcacgtttattcttgcaggttcagtcggcaatgtgttgttgacaaggacaaaaggaatcaatgtagatattgtcgattaagaaagtgttttagagcgggaatgaaaaaagaagctgtacaaaatgaacgtgacagaataagcaccagaagaagcacatttgatggcagcaacatcccctccattaacacactggcacaagctgaagttcggtctcgccagatctcagtctcaagccctgggtcaagcactgacataaacgttaagaaaattgcaagtattggtgatgtctgtgaatctatgaaacagcagctcttagtcttggtggaatgggctaaatatattcctgccttctgtgaattaccattggatgatcaggtggcactgttgagagctcacgcaggggagcacttactgcttggagctacaaagagatccatgatgtataaagatattttgcttttgggaaacaactatgttattcaccgcaacagctgtgaagttgagattagccgtgtggccaatcgtgttctagatgagctggttagaccatttcaagaaatccagattgatgacaatgagtatgcttgtttaaaggcaattgtattttttgatccagatgcaaaagggctaagcgatccagtaaaaattaagaacatgaggttccaagtgcagatcggtttggaggactacatcaatgatcggcagtatgactcccgggggaggtttggagagttgcttctgctcctgcccacactgcagagcatcacgtggcaaatgattgagcaaatacagtttgttaaactttttgggatggttaaaattgacaatctacttcaggaaatgctattaggtggggcttccaatgatggcagtcatctccatcatccaatgcatccacatttgtctcaagacccattaactggacaaactatacttttaggtcccatgtcaacactggttcatgcagaccagatctcaactcctgaaaccccactcccttccccaccacaaggctctgggcaagaacagtacaaaatagctgcaaaccaagcatcagtcatttcacaccagcatctctccaaacaaaagcaattgtgaaaatgtgtttacttcagaacggcactacataaatgtgaaaagttgttgatcttgaaatatctcaggatagcacttttggcaaactcttagccaaggcttcttcattggtgctgttataagatggtgtcctattttcttgtttatacgttcattctgtttgttattgctactatgtaaaactttcacatgcaaccaatgtatatctgagtttgaagatgtttatatagggtattttttccaactgcccctgcattgtgcctgaaccaattgaatcttatgtatgagtttcatttgttttattaatgttaatttaaatctgtaaataattgctttattgtgatgtgatacagaacaaagtgttcgtttttgactgaaaatagtagatcagaaatctcagtttaatataaaatgagctaagtttttaaaaataaattataaacttggagattagaaaaataaagcagttgctgtagaataggctgtatctttttcaagaagaatctcttatggacagtctgtggtaaagaagcaactctttgctttagagttaaatattcctatcttaagtttagaaaaatacaaaaaaccattccaaggatgactggatactttttgaaatctgactttctttgaagatgtatgttaagcaaaaacatgttgcttttatcagttaggatacagggtgaactgtaacaaagaaacccctaaaacagtgactaaatcaagagaggaatctatttctttctcctgaaacaatttagaaaatagttatccattgactagaaattagtacatgcccacagctggctcccacggtagccaggagaattatctataggtggaaagtctgtgtcagccaaagccatgtcactctgagagaactgattctgaggacaagttagccatctaccacccatgtcccttatttggtcctcacaataacactttaggagagatatcattatcgctgttttataaataagggaaactttagcttgagggtttaaggaacataaccaaagttcacaaacataacgagtgagagaaacacattcaagcccaggtctagttgactttaatgaatctttggtgtggaatgaaaaatgtgaacttcttactcatagtgtggtttttaaatatatgcagttgagtgatgattggatactattcatcatattgcctataatatatatttaccgataagcagtgagtgtaaaattgttgtagcttgaataagaaaccacttttgtagttttaaccagactttctcttaaaaacattagataaaataaaagattcaccggatggattctgatgaaaacgaaaacaaagtaaaatgactggcttagcagattctttgaaatgtagcagcccagggatgtaccaaatgtcgaattctagactgaggagtagagttcattggagtcttaaactctctgatatcacttaaagctggagtttattttaaaacaaatgaagcatgggccacctcatgatgcagtggctcctctctggttgaggagagggaaaattggaaaaactggtcgagtaattatcaataattttttttaaaaagaggatcccaaactgtaaaagattgaaataatctttctcaggattttttaaatgtctaagattatgatgtcatatctcccacttaccttataagtaaaaaggttaatatcaagtaacttattagctcttaaagtaaaattgaacttattaaaagctatctatgatttaatagatttaataaaattccttcacgacctggtacccttgtgaaactgtaaaatatatcatatggggggagttttttaactcttattttttgaaaatttactgtagcttctatttcgtgaataagaatgttttgattttgatcatacaaataacttttgtagatttttgtttacttttgggggggttcccttagaagacattaaaaaaaaatactgccttggtctgtgcaggctgctgtaatgaaatactatgaacttggcagcttataaacaacagaaatttatttctcgctgttctcaatggtgggaagtccaagattaagggatcaacaaattaggcctctggatcatacatggcattttctagctgtgtccttatacataaaaggaaaaaggtagctctctcgagtctctttaataaagatactaattctcatgactgaatcaccctccaaaggccccacctcctaataccatcactctggggactaggtgtcagcatgtgaattttggaaaacacaaaaattcagaacatagcaaatacctttgaagtataaaagataaaattcatttttagtgaaccctgtaatttattcgtgtatatttactaaacagctgtatctttgaaattgttagtaatgattctgcttcaataactatggtcagggaatttataatattatatttttatatactgaactgccatagatgctggaaaaaaggaactgatgttttcagcatattttcaaaatattgataagggaagttattacttttatatagtattcaacttttttcaggtaatagaagtgaataatttattgtgaaataattcattttataaatgtataattatttttataaattttattgttggaaatcaaaaattagtagattttttaccatgttaaattatagtgagattaaagtattactaaactgtgatgctatgtttgtttcactaaactttctaaataaaaactgagaaaaaaaaaatcactgaaa

SEQ ID NO: 13513 - DNA, 2380 bp, Homo sapiens
  source 1..2380: mol_type = unassigned DNA
gaggaggagtggggaccgggcggggggtggaggaagaggcctcgcgcagaggagggagcaattgaatttcaaacacaaacaactgcacgagcgcgcacccaccgcgccggagccttgccccgatccgcgcccgccccgtccgtgcggcgcgcgggcggagacgccgtggccgcgccggagctcgggccgggggccaccatcgaggcgggggccgcgcgagggccggagcggagcggcgccgccaccgccgcacgcgcaaacttgggctcgcgcttcccggcccggcgcggagcccggggcgcccggagccccgccatgtcgcgatccaaccggcagaaggagtacaaatgcggggacctggtgttcgccaagatgaagggctacccacactggccggcccggattgacgagatgcctgaggctgccgtgaaatcaacagccaacaaataccaagtcttttttttcgggacccacgagacggcattcctgggccccaaagacctcttcccttacgaggaatccaaggagaagtttggcaagcccaacaagaggaaagggttcagcgaggggctgtgggagatcgagaacaaccctactgtcaaggcttccggctatcagtcctcccagaaaaagagctgtgtggaagagcctgaaccagagcccgaagctgcagagggtgacggtgataagaaggggaatgcagagggcagcagcgacgaggaagggaagctggtcattgatgagccagccaaggagaagaacgagaaaggagcgttgaagaggagagcaggggacttgctggaggactctcctaaacgtcccaaggaggcagaaaaccctgaaggagaggagaaggaggcagccaccttggaggttgagaggccccttcctatggaggtggaaaagaatagcaccccctctgagcccggctctggccgggggcctccccaagaggaagaagaggaggaggatgaagaggaagaggctaccaaggaagatgctgaggccccaggcatcagagatcatgagagcctgtagccaccaatgtttcaagaggagcccccaccctgttcctgctgctgtctgggtgctactggggaaactggccatggcctgcaaactgggaacccctttcccaccccaacctgctctcctcttctactcacttttcccactccaagcccagcccatggagattgacctggatggggcaggccacctggctctcacctctaggtccccatactcctatgatctgagtcagagccatgtcttctccctggaatgagttgaggccactgtgttccttccgcttggagctattttccaggcttctgctggggcctgggacaactgctcccacctcctgacacccttctcccactctcctaggcattctggacctctgggttgggatcaggggtaggaatggaaaggatggagcatcaacagcagggtgggcttgtggggcctgggaggggcaatcctcaaatgcggggtgggggcagcacaggagggcggcctccttctgagctcctgtcccctgctacacctattatcccagctgcctagattcagggaaagtgggacagcttgtaggggaggggctcctttccataaatccttgatgattgacaacacccatttttccttttgccgaccccaagagttttgggagttgtagttaatcatcaagagaatttggggcttccaagttgttcgggccaaggacctgagacctgaagggttgactttacccatttgggtgggagtgttgagcatctgtccccctttagatctctgaagccacaaataggatgcttgggaagactcctagctgtcctttttcctctccacacagtgctcaaggccagcttatagtcatatatatcacccagacataaaggaaaagacacattttttaggaaatgtttttaataaaagaaaattacaaaaaaaaattttaaagacccctaaccctttgtgtgctctccattctgctccttccccatcgttgcccccatttctgaggtgcactgggaggctccccttctatttggggcttgatgactttctttttgtagctggggctttgatgttccttccagtgtcatttctcatccacataccctgacctggccccctcagtgttgtcaccagatctgatttgtaacccactgagaggacagagagaaataagtgccctctcccaccctcttcctactggtctctctatgcctctctacagtctcgtctcttttaccctggcccctctcccttgggctctgatgaaaaattgctgactgtagctttggaagtttagctctgagaaccgtagatgatttcagttctaggaaaataaaacccgttgattactata

SEQ ID NO: 13514 - DNA, 960 bp, Homo sapiens
  source 1..960: mol_type = unassigned DNA
agaactgagctcatctttgcggggttagctagccgttgagtccaagtctccttggcaagacagtagcttagagaaacgagatcgaatgcacccggaaggtggccaatttgtgcctcaactccttggccatctcctggctaccaaactcaagcgtttcctccttagcaaaggcggacgtagggctcaaatccccgacgtttccagggccaccccccatacgattgacgagatgcctgaggctgccgtgaaatcaacagccaacaaataccaagtcttttttttcgggacccacgagacggcattcctgggccccaaagacctcttcccttacgaggaatccaaggagaagtttggcaagcccaacaagaggaaagggttcagcgaggggctgtgggagatcgagaacaaccctactgtcaaggcttccggctatcagtcctcccagaaaaagagctgtgtggaagagcctgaaccagagcccgaagctgcagagggtgacggtgataagaaggggaatgcagagggcagcagcgacgaggaagggaagctggtcattgatgagccagccaaggagaagaacgagaaaggagcgttgaagaggagagcaggggacttgctggaggactctcctaaacgtcccaaggaggcagaaaaccctgaaggagaggagaaggaggcagccaccttggaggttgagaggccccttcctatggaggtggaaaagaatagcaccccctctgagcccggctctggccgggggcctccccaagaggaagaagaggaggaggatgaagaggaagaggctaccaaggaagatgctgaggccccaggcatcagagatcatgagagcctgtagccaccaatgtttcaagaggagcccccaccctgttcctgctgctgtctgggtgctactggggaaactggccatggcctgcaaactgggaacccctttcccacccc

SEQ ID NO: 13515 - DNA, 2171 bp, Homo sapiens
  source 1..2171: mol_type = unassigned DNA
atacggtaagcacggcgaggtccagagaggaccccagtgcgcggagcggcacggcgcccactcctctcgccctcggcgcctagcacgctgccaagaaccgcgggtgcccagtaaatatttgtggattgagatggagcagagggcaggcggaaaccgtgtacagacgtccacacttaactgcgctggggccgcggtgattgacgagatgcctgaggctgccgtgaaatcaacagccaacaaataccaagtcttttttttcgggacccacgagacggcattcctgggccccaaagacctcttcccttacgaggaatccaaggagaagtttggcaagcccaacaagaggaaagggttcagcgaggggctgtgggagatcgagaacaaccctactgtcaaggcttccggctatcagtcctcccagaaaaagagctgtgtggaagagcctgaaccagagcccgaagctgcagagggtgacggtgataagaaggggaatgcagagggcagcagcgacgaggaagggaagctggtcattgatgagccagccaaggagaagaacgagaaaggagcgttgaagaggagagcaggggacttgctggaggactctcctaaacgtcccaaggaggcagaaaaccctgaaggagaggagaaggaggcagccaccttggaggttgagaggccccttcctatggaggtggaaaagaatagcaccccctctgagcccggctctggccgggggcctccccaagaggaagaagaggaggaggatgaagaggaagaggctaccaaggaagatgctgaggccccaggcatcagagatcatgagagcctgtagccaccaatgtttcaagaggagcccccaccctgttcctgctgctgtctgggtgctactggggaaactggccatggcctgcaaactgggaacccctttcccaccccaacctgctctcctcttctactcacttttcccactccaagcccagcccatggagattgacctggatggggcaggccacctggctctcacctctaggtccccatactcctatgatctgagtcagagccatgtcttctccctggaatgagttgaggccactgtgttccttccgcttggagctattttccaggcttctgctggggcctgggacaactgctcccacctcctgacacccttctcccactctcctaggcattctggacctctgggttgggatcaggggtaggaatggaaaggatggagcatcaacagcagggtgggcttgtggggcctgggaggggcaatcctcaaatgcggggtgggggcagcacaggagggcggcctccttctgagctcctgtcccctgctacacctattatcccagctgcctagattcagggaaagtgggacagcttgtaggggaggggctcctttccataaatccttgatgattgacaacacccatttttccttttgccgaccccaagagttttgggagttgtagttaatcatcaagagaatttggggcttccaagttgttcgggccaaggacctgagacctgaagggttgactttacccatttgggtgggagtgttgagcatctgtccccctttagatctctgaagccacaaataggatgcttgggaagactcctagctgtcctttttcctctccacacagtgctcaaggccagcttatagtcatatatatcacccagacataaaggaaaagacacattttttaggaaatgtttttaataaaagaaaattacaaaaaaaaattttaaagacccctaaccctttgtgtgctctccattctgctccttccccatcgttgcccccatttctgaggtgcactgggaggctccccttctatttggggcttgatgactttctttttgtagctggggctttgatgttccttccagtgtcatttctcatccacataccctgacctggccccctcagtgttgtcaccagatctgatttgtaacccactgagaggacagagagaaataagtgccctctcccaccctcttcctactggtctctctatgcctctctacagtctcgtctcttttaccctggcccctctcccttgggctctgatgaaaaattgctgactgtagctttggaagtttagctctgagaaccgtagatgatttcagttctaggaaaataaaacccgttgattact

SEQ ID NO: 13516 - DNA, 992 bp, Homo sapiens
  source 1..992: mol_type = unassigned DNA
accgccgcacgcgcaaacttgggctcgcgcttcccggcccggcgcggagcccggggcgcccggagccccgccatgtcgcgatccaaccggcagaaggagtacaaatgcggggacctggtgttcgccaagatgaagggctacccacactggccggcccggattgacgagatgcctgaggctgccgtgaaatcaacagccaacaaataccaagtctttttttcgggacccacgagacggcattcctgggccccaaagacctcttcccttacgaggaatccaaggagaagtttggcaagcccaacaagaggaaagggttcagcgaggggctgtgggagatcgagaacaaccctactgtcaaggcttccggctatcagccctcccccctcctgcacagagccctgcctgcccggccagtgggtttaccccggggctaatccgacagagtcctcccagaaaaagagctgtgtggaagagcctgaaccagagcccgaagctgcagagggtgacggtgataagaaggggaatgcagagggcagcagcgacgaggaagggaagctggtcattgatgagccagccaaggagaagaacgagaaaggagcgttgaagaggagagcaggggacttgctggaggactctcctaaacgtcccaaggaggcagaaaaccctgaaggagaggagaaggaggcagccaccttggaggttgagaggccccttcctatggaggtggaaaagaatagcaccccctctgagcccggctctggccgggggcctccccaagaggaagaagaggaggaggatgaagaggaagaggctaccaaggaagatgctgaggccccaggcatcagagatcatgagaggtgagtgagccccctgaccccttggcagctggactaggggggaccggccactctcggagaagaggatgaaaagggcctgcagtggtcagcctctcgggaggcagggtgggctctcctaggagaccggcactggct

SEQ ID NO: 13517 - DNA, 1292 bp, Homo sapiens
  source 1..1292: mol_type = unassigned DNA
ataacaccgggaagggcacgagcgctccgcgcggagcgggcagagattgacgagatgcctgaggctgccgtgaaatcaacagccaacaaataccaagtcttttttttcgggacccacgagacggcattcctgggccccaaagacctcttcccttacgaggaatccaaggagaagtttggcaagcccaacaagaggaaagggttcagcgaggggctgtgggagatcgagaacaaccctactgtcaaggcttccggctatcagtcctcccagaaaaagagctgtgtggaagagcctgaaccagagcccgaagctgcagagggtgacggtgataagaaggggaatgcagagggcagcagcgacgaggaagggaagctggtcattgatgagccagccaaggagaagaacgagaaaggagcgttgaagaggagagcaggggacttgctggaggactctcctaaacgtcccaaggaggcagaaaaccctgaaggagaggagaaggaggcagccaccttggaggttgagaggccccttcctatggaggtggaaaagaatagcaccccctctgagcccggctctggccgggggcctccccaagaggaagaagaggaggaggatgaagaggaagaggctaccaaggaagatgctgaggccccaggcatcagagatcatgagagcctgtagccaccaatgtttcaagaggagcccccaccctgttcctgctgctgtctgggtgctactggggaaactggccatggcctgcaaactgggaacccctttcccaccccaacctgctctcctcttctactcacttttcccactccaagcccagcccatggagattgacctggatggggcaggccacctggctctcacctctaggtccccatactcctatgatctgagtcagagccatgtcttctccctggaatgagttgaggccactgtgttccttccgcttggagctattttccaggcttctgctggggcctgggacaactgctcccacctcctgacacccttctcccactctcctaggcattctggacctctgggttgggatcaggggtaggaatggaaaggatggagcatcaacagcagggtgggcttgtggggcctgggaggggcaatcctcaaatgcggggtgggggcagcacaggagggcggcctccttctgagctcctgtcccctgctacacctattatcccagctgcctagattcagggaaagtgggacagcttgtaggggaggggctcctttccataaatccttgatgattgacaacacccattttt

SEQ ID NO: 13518 - DNA, 2073 bp, Homo sapiens
  source 1..2073: mol_type = unassigned DNA
gcgcgcgggcggagacgccgtggccgcgccggagctcgggccgggggccaccatcgaggcgggggccgcgcgagggccggagcggagcggcgccgccaccgccgcacgcgcaaacttgggctcgcgcttcccggcccggcgcggagcccggggcgcccggagccccgccatgtcgcgatccaaccggcagaaggagtacaaatgcggggacctggtgttcgccaagatgaagggctacccacactggccggcccggattgacgagatgcctgaggctgccgtgaaatcaacagccaacaaataccaagtcttttttttcgggacccacgagacggcattcctgggccccaaagacctcttcccttacgaggaatccaaggagaagtttggcaagcccaacaagaggaaagggttcagcgaggggctgtgggagatcgagaacaaccctactgtcaaggcttccggctatcagtcctcccagaaaaagagctgtgtggaagagcctgaaccagagcccgaagctgcagagggtgacggtgataagaaggggaatgcagagggcagcagcgacgaggaagggaagctggtcattgatgagccagccaaggagaagaacgagaaaggagcgttgaagaggagagcaggggacttgctggaggactctcctaaacgtcccaaggaggcagaaaaccctgaaggagaggagaaggaggcagccaccttggaggttgagaggccccttcctatggaggtggaaaagaatagcaccccctctgagcccggctctggccgggggcctccccaagaggaagaagaggaggaggatgaagaggaagaggctaccaaggaagatgctgaggccccaggcatcagagatcatgagagcctgtagccaccaatgtttcaagaggagcccccaccctgttcctgctgctgtctgggtgctactggggaaactggccatggcctgcaaactgggaacccctttcccaccccaacctgctctcctcttctactcacttttcccactccaagcccagcccatggagattgacctggatggggcaggccacctggctctcacctctaggtccccatactcctatgatctgagtcagagccatgtcttctccctggaatgagttgaggccactgtgttccttccgcttgggaggggcaatcctcaaatgcggggtgggggcagcacaggagggcggcctccttctgagctcctgtcccctgctacacctattatcccagctgcctagattcagggaaagtgggacagcttgtaggggaggggctcctttccataaatccttgatgattgacaacacccatttttccttttgccgaccccaagagttttgggagttgtagttaatcatcaagagaatttggggcttccaagttgttcgggccaaggacctgagacctgaagggttgactttacccatttgggtgggagtgttgagcatctgtccccctttagatctctgaagccacaaataggatgcttgggaagactcctagctgtcctttttcctctccacacagtgctcaaggccagcttatagtcatatatatcacccagacataaaggaaaagacacattttttaggaaatgtttttaataaaagaaaattacaaaaaaaaattttaaagacccctaaccctttgtgtgctctccattctgctccttccccatcgttgcccccatttctgaggtgcactgggaggctccccttctatttggggcttgatgactttctttttgtagctggggctttgatgttccttccagtgtcatttctcatccacataccctgacctggccccctcagtgttgtcaccagatctgatttgtaacccactgagaggacagagagaaataagtgccctctcccaccctcttcctactggtctctctatgcctctctacagtctcgtctcttttaccctggcccctctcccttgggctctgatgaaaaattgctgactgtagctttggaagtttagctctgagaaccgtagatgatttcagttctaggaaaataaaacccgttgattact

SEQ ID NO: 13519 - DNA, 4228 bp, Homo sapiens
  source 1..4228: mol_type = unassigned DNA
ggaaaagagggcacccagcccttccccctccctcatcctcccatcccagtaaaccctgccaaattggaatcctggacttaatttaggagaaaggccctgtaaccaagatactgactgaacatggctggcggactcaggctggggtctgcagtgcagcattaatgggccgctgacatgaatatggagtagttttctctagcaaagagtggcttccagcttcttaaagtctgacaagaaccggatagggggaacctacaagaagaccatctataaagaatacaaggatgactcatacacagatgaagtggcccagcctgcctggttgggcttcctggggccagtgttgcaggctgaagtgggggatgtcattcttattcacctgaagaattttgccactcgtccctataccatccaccctcatggtgtcttctacgagaaggactctgaaggttccctatacccagatggctcctctgggccactgaaagctgatgactctgttcccccggggggcagccatatctacaactggaccattccagaaggccatgcacccaccgatgctgacccagcgtgcctcacctggatctaccattctcatgtagatgctccacgagacattgcaactggcctaattgggcctctcatcacctgtaaaagaggagccctggatgggaactcccctcctcaacgccaggatgtagaccatgatttcttcctcctcttcagtgtggtagatgagaacctcagctggcatctcaatgagaacattgccacttactgctcagatcctgcttcagtggacaaagaagatgagacatttcaggagagcaataggatgcatgcaatcaatggctttgtttttgggaatttacctgagctgaacatgtgtgcacagaaacgtgtggcctggcacttgtttggcatgggcaatgaaattgatgtccacacagcatttttccatggacagatgctgactacccgtggacaccacactgatgtggctaacatctttccagccacctttgtgactgctgagatggtgccctgggaacctggtacctggttaattagctgccaagtgaacagtcactttcgagatggcatgcaggcactctacaaggtcaagtcttgctccatggcccctcctgtggacctgctcacaggcaaagttcgacagtacttcattgaggcccatgagattcaatgggactatggcccgatggggcatgatgggagtactgggaagaatttgagagagccaggcagtatctcagataagtttttccagaagagctccagccgaattgggggcacttactggaaagtgcgatatgaagcctttcaagatgagacattccaagagaagatgcatttggaggaagataggcatcttggaatcctggggccagtgatccgggctgaggtgggtgacaccattcaggtggtcttctacaaccgtgcctcccagccattcagcatgcagccccatggggtcttttatgagaaagactatgaaggcactgtgtacaatgatggctcatcttaccctggcttggttgccaagccctttgagaaagtaacataccgctggacagtcccccctcatgccggtcccactgctcaggatcctgcttgtctcacttggatgtacttctctgctgcagatcccataagagacacaaattctggcctggtgggcccgctgctggtgtgcagggctggtgccttgggtgcagatggcaagcagaaaggggtggataaagaattctttcttctcttcactgtgttggatgagaacaagagctggtacagcaatgccaatcaagcagctgctatgttggatttccgactgctttcagaggatattgagggcttccaagactccaatcggatgcatgccattaatgggtttctgttctctaacctgcccaggctggacatgtgcaagggtgacacagtggcctggcacctgctcggcctgggcacagagactgatgtgcatggagtcatgttccagggcaacactgtgcagcttcagggcatgaggaagggtgcagctatgctctttcctcatacctttgtcatggccatcatgcagcctgacaaccttgggacatttgagatttattgccaggcaggcagccatcgagaagcagggatgagggcaatctataatgtctcccagtgtcctggccaccaagccacccctcgccaacgctaccaagctgcaagaatctactatatcatggcagaagaagtagagtgggactattgccctgaccggagctgggaacgggaatggcacaaccagtctgagaaggacagttatggttacattttcctgagcaacaaggatgggctcctgggttccagatacaagaaagctgtattcagggaatacactgatggtacattcaggatccctcggccaaggactggaccagaagaacacttgggaatcttgggtccacttatcaaaggtgaagttggtgatatcctgactgtggtattcaagaataatgccagccgcccctactctgtgcatgctcatggagtgctagaatctactactgtctggccactggctgctgagcctggtgaggtggtcacttatcagtggaacatcccagagaggtctggccctgggcccaatgactctgcttgtgtttcctggatctattattctgcagtggatcccatcaaggacatgtatagtggcctggtggggcccttggctatctgccaaaagggcatcctggagccccatggaggacggagtgacatggatcgggaatttgcattgttgttcttgatttttgatgaaaataagtcttggtatttggaggaaaatgtggcaacccatgggtcccaggatccaggcagtattaacctacaggatgaaactttcttggagagcaataaaatgcatgcaatcaatgggaaactctatgccaaccttaggggtcttaccatgtaccaaggagaacgagtggcctggtacatgctggccatgggccaagatgtggatctacacaccatccactttcatgcagagagcttcctctatcggaatggcgagaactaccgggcagatgtggtggatctgttcccagggacttttgaggttgtggagatggtggccagcaaccctgggacatggctgatgcactgccatgtgactgaccatgtccatgctggcatggagaccctcttcactgttttttctcgaacagaacacttaagccctctcaccgtcatcaccaaagagactgaaaaagcagtgccccccagagacattgaagaaggcaatgtgaagatgctgggcatgcagatccccataaagaatgttgagatgctggcctctgttttggttgccattagtgtcacccttctgctcgttgttctggctcttggtggagtggtttggtaccaacatcgacagagaaagctacgacgcaataggaggtccatcctggatgacagcttcaagcttctgtctttcaaacagtaacatctggagcctggagatatcctcaggaagcacatctgtagtgcactcccagcaggccatggactagtcactaaccccacactcaaaggggcatgggtggtggagaagcagaaggagcaatcaagcttatctggatatttctttctttatttattttacatggaaataatatgatttcactttttctttagtttctttgctctacgtgggcacctggcactaagggagtaccttattatcctacatcgcaaatttcaacagctacattatatttccttctgacacttggaaggtattgaaatttctagaaatgtatccttctcacaaagtagagaccaagagaaaaactcattgattgggtttctacttctttcaaggactcaggaaatttcactttgaactgaggccaagtgagctgttaagataacccacacttaaactaaaggctaagaatataggcttgatgggaaattgaaggtaggctgagtattgggaatccaaattgaattttgattctccttggcagtgaactactttgaagaagtggtcaatgggttgttgctgccatgagcatgtacaacctctggagctagaagctcctcaggaaagccagttctccaagttcttaacctgtggcactgaaaggaatgttgagttacctcttcatgttttagacagcaaaccctatccattaaagtacttgttagaacactg

SEQ ID NO: 13520 - DNA, 4854 bp, Homo sapiens
  source 1..4854: mol_type = unassigned DNA
tttgtgtctatttttttaaacattacatttgtcataatcattcatattgttgtgtgtagttgtagtttgttcattattattgctataaagaatttcattttatgaataaaatgcaatgtattcattcattatagtgttcacgaacattttgactgtttctattttgggtttatgaatattctagtaaatattttttagtaaattctcacttgttgttaagtacaatttatagaggataggaagtggcaacaacaatgagtgttccccttttgcctatgggaaaagagaggcaaagggagaattagtgttagtggcccaataaggcttctggtgcctgtttcctgattcttgggacagagcacattcttcctgctacaccattgaaaaaactggatccagatctctcttctgaaggaactagtaatacatgattagcagcacgggtgactttttaactatgcccttcaaaatccaatcattgaaaacttattgaattaaaaggaatcaggtaagttaaagaaactgggctaaatgggttttgctttctcagtcactcaacctggctcttgcctcttcagttttctggacacgtagaaagcccctttgttctctttcttctacaccagcagtttttatttgcctgtttcccagagtaatgtgggccatggagtcaggccacctcctctgggctctgctgttcatgcagtccttgtggcctcaactgactgatggagccactcgagtctactacctgggcatccgggatgtgcagtggaactatgctcccaagggaagaaatgtcatcacgaaccagcctctggacagtgacatagtggcttccagcttcttaaagtctgacaagaaccggatagggggaacctacaagaagaccatctataaagaatacaaggatgactcatacacagatgaagtggcccagcctgcctggttgggcttcctggggccagtgttgcaggctgaagtgggggatgtcattcttattcacctgaagaattttgccactcgtccctataccatccaccctcatggtgtcttctacgagaaggactctgaaggttccctatacccagatggctcctctgggccactgaaagctgatgactctgttcccccggggggcagccatatctacaactggaccattccagaaggccatgcacccaccgatgctgacccagcgtgcctcacctggatctaccattctcatgtagatgctccacgagacattgcaactggcctaattgggcctctcatcacctgtaaaagaggagccctggatgggaactcccctcctcaacgccaggatgtagaccatgatttcttcctcctcttcagtgtggtagatgagaacctcagctggcatctcaatgagaacattgccacttactgctcagatcctgcttcagtggacaaagaagatgagacatttcaggagagcaataggatgcatgcaatcaatggctttgtttttgggaatttacctgagctgaacatgtgtgcacagaaacgtgtggcctggcacttgtttggcatgggcaatgaaattgatgtccacacagcatttttccatggacagatgctgactacccgtggacaccacactgatgtggctaacatctttccagccacctttgtgactgctgagatggtgccctgggaacctggtacctggttaattagctgccaagtgaacagtcactttcgagatggcatgcaggcactctacaaggtcaagtcttgctccatggcccctcctgtggacctgctcacaggcaaagttcgacagtacttcattgaggcccatgagattcaatgggactatggcccgatggggcatgatgggagtactgggaagaatttgagagagccaggcagtatctcagataagtttttccagaagagctccagccgaattgggggcacttactggaaagtgcgatatgaagcctttcaagatgagacattccaagagaagatgcatttggaggaagataggcatcttggaatcctggggccagtgatccgggctgaggtgggtgacaccattcaggtggtcttctacaaccgtgcctcccagccattcagcatgcagccccatggggtcttttatgagaaagactatgaaggcactgtgtacaatgatggctcatcttaccctggcttggttgccaagccctttgagaaagtaacataccgctggacagtcccccctcatgccggtcccactgctcaggatcctgcttgtctcacttggatgtacttctctgctgcagatcccataagagacacaaattctggcctggtgggcccgctgctggtgtgcagggctggtgccttgggtgcagatggcaagcagaaaggggtggataaagaattctttcttctcttcactgtgttggatgagaacaagagctggtacagcaatgccaatcaagcagctgctatgttggatttccgactgctttcagaggatattgagggcttccaagactccaatcggatgcatgccattaatgggtttctgttctctaacctgcccaggctggacatgtgcaagggtgacacagtggcctggcacctgctcggcctgggcacagagactgatgtgcatggagtcatgttccagggcaacactgtgcagcttcagggcatgaggaagggtgcagctatgctctttcctcatacctttgtcatggccatcatgcagcctgacaaccttgggacatttgagatttattgccaggcaggcagccatcgagaagcagggatgagggcaatctataatgtctcccagtgtcctggccaccaagccacccctcgccaacgctaccaagctgcaagaatctactatatcatggcagaagaagtagagtgggactattgccctgaccggagctgggaacgggaatggcacaaccagtctgagaaggacagttatggttacattttcctgagcaacaaggatgggctcctgggttccagatacaagaaagctgtattcagggaatacactgatggtacattcaggatccctcggccaaggactggaccagaagaacacttgggaatcttgggtccacttatcaaaggtgaagttggtgatatcctgactgtggtattcaagaataatgccagccgcccctactctgtgcatgctcatggagtgctagaatctactactgtctggccactggctgctgagcctggtgaggtggtcacttatcagtggaacatcccagagaggtctggccctgggcccaatgactctgcttgtgtttcctggatctattattctgcagtggatcccatcaaggacatgtatagtggcctggtggggcccttggctatctgccaaaagggcatcctggagccccatggaggacggagtgacatggatcgggaatttgcattgttgttcttgatttttgatgaaaataagtcttggtatttggaggaaaatgtggcaacccatgggtcccaggatccaggcagtattaacctacaggatgaaactttcttggagagcaataaaatgcatgcaatcaatgggaaactctatgccaaccttaggggtcttaccatgtaccaaggagaacgagtggcctggtacatgctggccatgggccaagatgtggatctacacaccatccactttcatgcagagagcttcctctatcggaatggcgagaactaccgggcagatgtggtggatctgttcccagggacttttgaggttgtggagatggtggccagcaaccctgggacatggctgatgcactgccatgtgactgaccatgtccatgctggcatggagaccctcttcactgttttttctcgaacagaacacttaagccctctcaccgtcatcaccaaagagactgaaaaagcagtgccccccagagacattgaagaaggcaatgtgaagatgctgggcatgcagatccccataaagaatgttgagatgctggcctctgttttggttgccattagtgtcacccttctgctcgttgttctggctcttggtggagtggtttggtaccaacatcgacagagaaagctacgacgcaataggaggtccatcctggatgacagcttcaagcttctgtctttcaaacagtaacatctggagcctggagatatcctcaggaagcacatctgtagtgcactcccagcaggccatggactagtcactaaccccacactcaaaggggcatgggtggtggagaagcagaaggagcaatcaagcttatctggatatttctttctttatttattttacatggaaataatatgatttcactttttctttagtttctttgctctacgtgggcacctggcactaagggagtaccttattatcctacatcgcaaatttcaacagctacattatatttccttctgacacttggaaggtattgaaatttctagaaatgtatccttctcacaaagtagagaccaagagaaaaactcattgattgggtttctacttctttcaaggactcaggaaatttcactttgaactgaggccaagtgagctgttaagataacccacacttaaactaaaggctaagaatataggcttgatgggaaattgaaggtaggctgagtattgggaatccaaattgaattttgattctccttggcagtgaactactttgaagaagtggtcaatgggttgttgctgccatgagcatgtacaacctctggagctagaagctcctcaggaaagccagttctccaagttcttaacctgtggcactgaaaggaatgttgagttacctcttcatgttttagacagcaaaccctatccattaaagtacttgttagaacact

SEQ ID NO: 13521 - DNA, 4490 bp, Homo sapiens
  source 1..4490: mol_type = unassigned DNA
actgagcatttctaagggagttgaggctggtggctcctccttccttcctactggtgcttccacctgccttggtctgagttgcagtccatggggcagcgcctaagtgtctgagcacacttaagaatctctagtggtttatgacccagactttgccctaccacctcagtcttctgaatgttctcttccctggaccctgctccagacactttaaattcagaagaggaaaatgtgcccagcctgcctggagaaaagtgtctgctcctagccaagatctcctcatcacaaaagtaatgtgggccatggagtcaggccacctcctctgggctctgctgttcatgcagtccttgtggcctcaactgactgatggagccactcgagtctactacctgggcatccgggatgtgcagtggaactatgctcccaagggaagaaatgtcatcacgaaccagcctctggacagtgacatagtggcttccagcttcttaaagtctgacaagaaccggatagggggaacctacaagaagaccatctataaagaatacaaggatgactcatacacagatgaagtggcccagcctgcctggttgggcttcctggggccagtgttgcaggctgaagtgggggatgtcattcttattcacctgaagaattttgccactcgtccctataccatccaccctcatggtgtcttctacgagaaggactctgaaggttccctatacccagatggctcctctgggccactgaaagctgatgactctgttcccccggggggcagccatatctacaactggaccattccagaaggccatgcacccaccgatgctgacccagcgtgcctcacctggatctaccattctcatgtagatgctccacgagacattgcaactggcctaattgggcctctcatcacctgtaaaagaggagccctggatgggaactcccctcctcaacgccaggatgtagaccatgatttcttcctcctcttcagtgtggtagatgagaacctcagctggcatctcaatgagaacattgccacttactgctcagatcctgcttcagtggacaaagaagatgagacatttcaggagagcaataggatgcatgcaatcaatggctttgtttttgggaatttacctgagctgaacatgtgtgcacagaaacgtgtggcctggcacttgtttggcatgggcaatgaaattgatgtccacacagcatttttccatggacagatgctgactacccgtggacaccacactgatgtggctaacatctttccagccacctttgtgactgctgagatggtgccctgggaacctggtacctggttaattagctgccaagtgaacagtcactttcgagatggcatgcaggcactctacaaggtcaagtcttgctccatggcccctcctgtggacctgctcacaggcaaagttcgacagtacttcattgaggcccatgagattcaatgggactatggcccgatggggcatgatgggagtactgggaagaatttgagagagccaggcagtatctcagataagtttttccagaagagctccagccgaattgggggcacttactggaaagtgcgatatgaagcctttcaagatgagacattccaagagaagatgcatttggaggaagataggcatcttggaatcctggggccagtgatccgggctgaggtgggtgacaccattcaggtggtcttctacaaccgtgcctcccagccattcagcatgcagccccatggggtcttttatgagaaagactatgaaggcactgtgtacaatgatggctcatcttaccctggcttggttgccaagccctttgagaaagtaacataccgctggacagtcccccctcatgccggtcccactgctcaggatcctgcttgtctcacttggatgtacttctctgctgcagatcccataagagacacaaattctggcctggtgggcccgctgctggtgtgcagggctggtgccttgggtgcagatggcaagcagaaaggggtggataaagaattctttcttctcttcactgtgttggatgagaacaagagctggtacagcaatgccaatcaagcagctgctatgttggatttccgactgctttcagaggatattgagggcttccaagactccaatcggatgcatgccattaatgggtttctgttctctaacctgcccaggctggacatgtgcaagggtgacacagtggcctggcacctgctcggcctgggcacagagactgatgtgcatggagtcatgttccagggcaacactgtgcagcttcagggcatgaggaagggtgcagctatgctctttcctcatacctttgtcatggccatcatgcagcctgacaaccttgggacatttgagatttattgccaggcaggcagccatcgagaagcagggatgagggcaatctataatgtctcccagtgtcctggccaccaagccacccctcgccaacgctaccaagctgcaagaatctactatatcatggcagaagaagtagagtgggactattgccctgaccggagctgggaacgggaatggcacaaccagtctgagaaggacagttatggttacattttcctgagcaacaaggatgggctcctgggttccagatacaagaaagctgtattcagggaatacactgatggtacattcaggatccctcggccaaggactggaccagaagaacacttgggaatcttgggtccacttatcaaaggtgaagttggtgatatcctgactgtggtattcaagaataatgccagccgcccctactctgtgcatgctcatggagtgctagaatctactactgtctggccactggctgctgagcctggtgaggtggtcacttatcagtggaacatcccagagaggtctggccctgggcccaatgactctgcttgtgtttcctggatctattattctgcagtggatcccatcaaggacatgtatagtggcctggtggggcccttggctatctgccaaaagggcatcctggagccccatggaggacggagtgacatggatcgggaatttgcattgttgttcttgatttttgatgaaaataagtcttggtatttggaggaaaatgtggcaacccatgggtcccaggatccaggcagtattaacctacaggatgaaactttcttggagagcaataaaatgcatgcaatcaatgggaaactctatgccaaccttaggggtcttaccatgtaccaaggagaacgagtggcctggtacatgctggccatgggccaagatgtggatctacacaccatccactttcatgcagagagcttcctctatcggaatggcgagaactaccgggcagatgtggtggatctgttcccagggacttttgaggttgtggagatggtggccagcaaccctgggacatggctgatgcactgccatgtgactgaccatgtccatgctggcatggagaccctcttcactgttttttctcgaacagaacacttaagccctctcaccgtcatcaccaaagagactgaaaaagcagtgccccccagagacattgaagaaggcaatgtgaagatgctgggcatgcagatccccataaagaatgttgagatgctggcctctgttttggttgccattagtgtcacccttctgctcgttgttctggctcttggtggagtggtttggtaccaacatcgacagagaaagctacgacgcaataggaggtccatcctggatgacagcttcaagcttctgtctttcaaacagtaacatctggagcctggagatatcctcaggaagcacatctgtagtgcactcccagcaggccatggactagtcactaaccccacactcaaaggggcatgggtggtggagaagcagaaggagcaatcaagcttatctggatatttctttctttatttattttacatggaaataatatgatttcactttttctttagtttctttgctctacgtgggcacctggcactaagggagtaccttattatcctacatcgcaaatttcaacagctacattatatttccttctgacacttggaaggtattgaaatttctagaaatgtatccttctcacaaagtagagaccaagagaaaaactcattgattgggtttctacttctttcaaggactcaggaaatttcactttgaactgaggccaagtgagctgttaagataacccacacttaaactaaaggctaagaatataggcttgatgggaaattgaaggtaggctgagtattgggaatccaaattgaattttgattctccttggcagtgaactactttgaagaagtggtcaatgggttgttgctgccatgagcatgtacaacctctggagctagaagctcctcaggaaagccagttctccaagttcttaacctgtggcactgaaaggaatgttgagttacctcttcatgttttagacagcaaaccctatccattaaagtacttgttagaacactg

SEQ ID NO: 13522 - DNA, 3694 bp, Homo sapiens
  source 1..3694: mol_type = unassigned DNA
gtaaccaagatactgactgaacatggctggcggactcaggctggggtctgcagtgcagcattaatgggccgctgacatgaatatggagtagttttctctagcaaagagtaatgtgggccatggagtcaggccacctcctctgggctctgctgttcatgcagtccttgtggcctcaactgactgatggagccactcgagtctactacctgggcatccgggatgtgcagtggaactatgctcccaagggaagaaatgtcatcacgaaccagcctctggacagtgacatagtggcttccagcttcttaaagtctgacaagaaccggatagggggaacctacaagaagaccatctataaagaatacaaggatgactcatacacagatgaagtggcccagcctgcctggttgggcttcctggggccagtgttgcaggctgaagtgggggatgtcattcttattcacctgaagaattttgccactcgtccctataccatccaccctcatggtgtcttctacgagaaggactctgaaggttccctatacccagatggctcctctgggccactgaaagctgatgactctgttcccccggggggcagccatatctacaactggaccattccagaaggccatgcacccaccgatgctgacccagcgtgcctcacctggatctaccattctcatgtagatgctccacgagacattgcaactggcctaattgggcctctcatcacctgtaaaagaggagccctggatgggaactcccctcctcaacgccaggatgtagaccatgatttcttcctcctcttcagtgtggtagatgagaacctcagctggcatctcaatgagaacattgccacttactgctcagatcctgcttcagtggacaaagaagatgagacatttcaggagagcaataggatgcatgcaatcaatggctttgtttttgggaatttacctgagctgaacatgtgtgcacagaaacgtgtggcctggcacttgtttggcatgggcaatgaaattgatgtccacacagcatttttccatggacagatgctgactacccgtggacaccacactgatgtggctaacatctttccagccacctttgtgactgctgagatggtgccctgggaacctggtacctggttaattagctgccaagtgaacagtcactttcgagatggcatgcaggcactctacaaggtcaagtcttgctccatggcccctcctgtggacctgctcacaggcaaagttcgacagtacttcattgaggcccatgagattcaatgggactatggcccgatggggcatgatgggagtactgggaagaatttgagagagccaggcagtatctcagataagtttttccagaagagctccagccgaattgggggcacttactggaaagtgcgatatgaagcctttcaagatgagacattccaagagaagatgcatttggaggaagataggcatcttggaatcctggggccagtgatccgggctgaggtgggtgacaccattcaggtggtcttctacaaccgtgcctcccagccattcagcatgcagccccatggggtcttttatgagaaagactatgaaggcactgtgtacaatgatgggacatttgagatttattgccaggcaggcagccatcgagaagcagggatgagggcaatctataatgtctcccagtgtcctggccaccaagccacccctcgccaacgctaccaagctgcaagaatctactatatcatggcagaagaagtagagtgggactattgccctgaccggagctgggaacgggaatggcacaaccagtctgagaaggacagttatggttacattttcctgagcaacaaggatgggctcctgggttccagatacaagaaagctgtattcagggaatacactgatggtacattcaggatccctcggccaaggactggaccagaagaacacttgggaatcttgggtccacttatcaaaggtgaagttggtgatatcctgactgtggtattcaagaataatgccagccgcccctactctgtgcatgctcatggagtgctagaatctactactgtctggccactggctgctgagcctggtgaggtggtcacttatcagtggaacatcccagagaggtctggccctgggcccaatgactctgcttgtgtttcctggatctattattctgcagtggatcccatcaaggacatgtatagtggcctggtggggcccttggctatctgccaaaagggcatcctggagccccatggaggacggagtgacatggatcgggaatttgcattgttgttcttgatttttgatgaaaataagtcttggtatttggaggaaaatgtggcaacccatgggtcccaggatccaggcagtattaacctacaggatgaaactttcttggagagcaataaaatgcatgcaatcaatgggaaactctatgccaaccttaggggtcttaccatgtaccaaggagaacgagtggcctggtacatgctggccatgggccaagatgtggatctacacaccatccactttcatgcagagagcttcctctatcggaatggcgagaactaccgggcagatgtggtggatctgttcccagggacttttgaggttgtggagatggtggccagcaaccctgggacatggctgatgcactgccatgtgactgaccatgtccatgctggcatggagaccctcttcactgttttttctcgaacagaacacttaagccctctcaccgtcatcaccaaagagactgaaaaagcagtgccccccagagacattgaagaaggcaatgtgaagatgctgggcatgcagatccccataaagaatgttgagatgctggcctctgttttggttgccattagtgtcacccttctgctcgttgttctggctcttggtggagtggtttggtaccaacatcgacagagaaagctacgacgcaataggaggtccatcctggatgacagcttcaagcttctgtctttcaaacagtaacatctggagcctggagatatcctcaggaagcacatctgtagtgcactcccagcaggccatggactagtcactaaccccacactcaaaggggcatgggtggtggagaagcagaaggagcaatcaagcttatctggatatttctttctttatttattttacatggaaataatatgatttcactttttctttagtttctttgctctacgtgggcacctggcactaagggagtaccttattatcctacatcgcaaatttcaacagctacattatatttccttctgacacttggaaggtattgaaatttctagaaatgtatccttctcacaaagtagagaccaagagaaaaactcattgattgggtttctacttctttcaaggactcaggaaatttcactttgaactgaggccaagtgagctgttaagataacccacacttaaactaaaggctaagaatataggcttgatgggaaattgaaggtaggctgagtattgggaatccaaattgaattttgattctccttggcagtgaactactttgaagaagtggtcaatgggttgttgctgccatgagcatgtacaacctctggagctagaagctcctcaggaaagccagttctccaagttcttaacctgtggcactgaaaggaatgttgagttacctcttcatgttttag

SEQ ID NO: 13523 - DNA, 2459 bp, Homo sapiens
  source 1..2459: mol_type = unassigned DNA
cctgtttcccagagtaatgtgggccatggagtcaggccacctcctctgggctctgctgttcatgcagtccttgtggcctcaactgactgatggagccactcgagtctactacctgggcatccgggatgtgcagtggaactatgctcccaagggaagaaatgtcatcacgaaccagcctctggacagtgacatagtggcttccagcttcttaaagtctgacaagaaccggatagggggaacctacaagaagaccatctataaagaatacaaggatgactcatacacagatgaagtggcccagcctgcctggttgggcttcctggggccagtgttgcaggctgaagtgggggatgtcattcttattcacctgaagaattttgccactcgtccctataccatccaccctcatggtgtcttctacgagaaggactctgaaggttccctatacccagatggctcctctgggccactgaaagctgatgactctgttcccccggggggcagccatatctacaactggaccattccagaaggccatgcacccaccgatgctgacccagcgtgcctcacctggatctaccattctcatgtagatgctccacgagacattgcaactggcctaattgggcctctcatcacctgtaaaagaggagccctggatgggaactcccctcctcaacgccaggatgtagaccatgatttcttcctcctcttcagtgtggtagatgagaacctcagctggcatctcaatgagaacattgccacttactgctcagatcctgcttcagtggacaaagaagatgagacatttcaggagagcaataggatgcatgcaatcaatggctttgtttttgggaatttacctgagctgaacatgtgtgcacagaaacgtgtggcctggcacttgtttggcatgggcaatgaaattgatgtccacacagcatttttccatggacagatgctgactacccgtggacaccacactgatgtggctaacatctttccagccacctttgtgactgctgagatggtgccctgggaacctggtacctggttaattagctgccaagtgaacagtcactttcgagatggcatgcaggcactctacaaggtcaagtcttgctccatggcccctcctgtggacctgctcacaggcaaagttcgacagtacttcattgaggcccatgagattcaatgggactatggcccgatggggcatgatgggagtactgggaagaatttgagagagccaggcagtatctcagataagtttttccagaagagctccagccgaattgggggcacttactggaaagtgcgatatgaagcctttcaagatgagacattccaagagaagatgcatttggaggaagataggcatcttggaatcctggggccagtgatccgggctgaggtgggtgacaccattcaggtggtcttctacaaccgtgcctcccagccattcagcatgcagccccatggggtcttttatgagaaagactatgaaggcactgtgtacaatgatgatcccataagagacacaaattctggcctggtgggcccgctgctggtgtgcagggctggtgccttgggtgcagatggcaagcagaaaggggtggataaagaattctttcttctcttcactgtgttggatgagaacaagagctggtacagcaatgccaatcaagcagctgctatgttggatttccgactgctttcagaggatattgagggcttccaagactccaatcggatgcatgccattaatgggtttctgttctctaacctgcccaggctggacatgtgcaagggtgacacagtggcctggcacctgctcggcctgggcacagagactgatgtgcatggagtcatgttccagggcaacactgtgcagcttcagggcatgaggaagggtgcagctatgctctttcctcatacctttgtcatggccatcatgcagcctgacaaccttgggacatttgagatttattgccaggcaggcagccatcgagaagcagggatgagggcaatctataatgtctcccagtgtcctggccaccaagccacccctcgccaacgctaccaagctgcaagaatctactatatcatggcagaagaagtagagtgggactattgccctgaccggagctgggaacgggaatggcacaaccagtctgagaaggacagttatggttacattttcctgagcaacaaggatgggctcctgggttccagatacaagaaagctgtattcagggaatacactgatggtacattcaggatccctcggccaaggactggaccagaagaacacttgggaatcttgggtccacttatcaaaggtgaagttggtgatatcctgactgtggtattcaagaataatgccagccgcccctactctgtgcatgctcatggagtgctagaatctactactgtctggccactggctgctgagcctg

SEQ ID NO: 13524 - DNA, 4310 bp, Homo sapiens
  source 1..4310: mol_type = unassigned DNA
ggccctgtaaccaagatactgactgaacatggctggcggactcaggctggggtctgcagtgcagcattaatgggccgctgacatgaatatggagtagttttctctagcaaagagtaatgtgggccatggagtcaggccacctcctctgggctctgctgttcatgcagtccttgtggcctcaactgactgatggagccactcgagtctactacctgggcatccgggatgtgcagtggaactatgctcccaagggaagaaatgtcatcacgaaccagcctctggacagtgacatagtggcttccagcttcttaaagtctgacaagaaccggatagggggaacctacaagaagaccatctataaagaatacaaggatgactcatacacagatgaagtggcccagcctgcctggttgggcttcctggggccagtgttgcaggctgaagtgggggatgtcattcttattcacctgaagaattttgccactcgtccctataccatccaccctcatggtgtcttctacgagaaggactctgaaggttccctatacccagatggctcctctgggccactgaaagctgatgactctgttcccccggggggcagccatatctacaactggaccattccagaaggccatgcacccaccgatgctgacccagcgtgcctcacctggatctaccattctcatgtagatgctccacgagacattgcaactggcctaattgggcctctcatcacctgtaaaagaggagccctggatgggaactcccctcctcaacgccaggatgtagaccatgatttcttcctcctcttcagtgtggtagatgagaacctcagctggcatctcaatgagaacattgccacttactgctcagatcctgcttcagtggacaaagaagatgagacatttcaggagagcaataggatgcatgcaatcaatggctttgtttttgggaatttacctgagctgaacatgtgtgcacagaaacgtgtggcctggcacttgtttggcatgggcaatgaaattgatgtccacacagcatttttccatggacagatgctgactacccgtggacaccacactgatgtggctaacatctttccagccacctttgtgactgctgagatggtgccctgggaacctggtacctggttaattagctgccaagtgaacagtcactttcgagatggcatgcaggcactctacaaggtcaagtcttgctccatggcccctcctgtggacctgctcacaggcaaagttcgacagtacttcattgaggcccatgagattcaatgggactatggcccgatggggcatgatgggagtactgggaagaatttgagagagccaggcagtatctcagataagtttttccagaagagctccagccgaattgggggcacttactggaaagtgcgatatgaagcctttcaagatgagacattccaagagaagatgcatttggaggaagataggcatcttggaatcctggggccagtgatccgggctgaggtgggtgacaccattcaggtggtcttctacaaccgtgcctcccagccattcagcatgcagccccatggggtcttttatgagaaagactatgaaggcactgtgtacaatgatggctcatcttaccctggcttggttgccaagccctttgagaaagtaacataccgctggacagtcccccctcatgccggtcccactgctcaggatcctgcttgtctcacttggatgtacttctctgctgcagatcccataagagacacaaattctggcctggtgggcccgctgctggtgtgcagggctggtgccttgggtgcagatggcaagcagaaaggggtggataaagaattctttcttctcttcactgtgttggatgagaacaagagctggtacagcaatgccaatcaagcagctgctatgttggatttccgactgctttcagaggatattgagggcttccaagactccaatcggatgcatgccattaatgggtttctgttctctaacctgcccaggctggacatgtgcaagggtgacacagtggcctggcacctgctcggcctgggcacagagactgatgtgcatggagtcatgttccagggcaacactgtgcagcttcagggcatgaggaagggtgcagctatgctctttcctcatacctttgtcatggccatcatgcagcctgacaaccttgggacatttgagatttattgccaggcaggcagccatcgagaagcagggatgagggcaatctataatgtctcccagtgtcctggccaccaagccacccctcgccaacgctaccaagctgcaagaatctactatatcatggcagaagaagtagagtgggactattgccctgaccggagctgggaacgggaatggcacaaccagtctgagaaggacagttatggttacattttcctgagcaacaaggatgggctcctgggttccagatacaagaaagctgtattcagggaatacactgatggtacattcaggatccctcggccaaggactggaccagaagaacacttgggaatcttgggtccacttatcaaaggtgaagttggtgatatcctgactgtggtattcaagaataatgccagccgcccctactctgtgcatgctcatggagtgctagaatctactactgtctggccactggctgctgagcctggtgaggtggtcacttatcagtggaacatcccagagaggtctggccctgggcccaatgactctgcttgtgtttcctggatctattattctgcagtggatcccatcaaggacatgtatagtggcctggtggggcccttggctatctgccaaaagggcatcctggagccccatggaggacggagtgacatggatcgggaatttgcattgttgttcttgatttttgatgaaaataagtcttggtatttggaggaaaatgtggcaacccatgggtcccaggatccaggcagtattaacctacaggatgaaactttcttggagagcaataaaatgcatgcaatcaatgggaaactctatgccaaccttaggggtcttaccatgtaccaaggagaacgagtggcctggtacatgctggccatgggccaagatgtggatctacacaccatccactttcatgcagagagcttcctctatcggaatggcgagaactaccgggcagatgtggtggatctgttcccagggacttttgaggttgtggagatggtggccagcaaccctgggacatggctgatgcactgccatgtgactgaccatgtccatgctggcatggagaccctcttcactgttttttctcgaacagaacacttaagccctctcaccgtcatcaccaaagagactgaaaaagtgccccccagagacattgaagaaggcaatgtgaagatgctgggcatgcagatccccataaagaatgttgagatgctggcctctgttttggttgccattagtgtcacccttctgctcgttgttctggctcttggtggagtggtttggtaccaacatcgacagagaaagctacgacgcaataggaggtccatcctggatgacagcttcaagcttctgtctttcaaacagtaacatctggagcctggagatatcctcaggaagcacatctgtagtgcactcccagcaggccatggactagtcactaaccccacactcaaaggggcatgggtggtggagaagcagaaggagcaatcaagcttatctggatatttctttctttatttattttacatggaaataatatgatttcactttttctttagtttctttgctctacgtgggcacctggcactaagggagtaccttattatcctacatcgcaaatttcaacagctacattatatttccttctgacacttggaaggtattgaaatttctagaaatgtatccttctcacaaagtagagaccaagagaaaaactcattgattgggtttctacttctttcaaggactcaggaaatttcactttgaactgaggccaagtgagctgttaagataacccacacttaaactaaaggctaagaatataggcttgatgggaaattgaaggtaggctgagtattgggaatccaaattgaattttgattctccttggcagtgaactactttgaagaagtggtcaatgggttgttgctgccatgagcatgtacaacctctggagctagaagctcctcaggaaagccagttctccaagttcttaacctgtggcactgaaaggaatgttgagttacctcttcatgttttagacagcaaaccctatccattaaagtacttgttagaaca

SEQ ID NO: 13525 - DNA, 838 bp, Homo sapiens
  source 1..838: mol_type = unassigned DNA
aaagagggcacccagcccttccccctccctcatcctcccatcccagtaaaccctgccaaattggaatcctggacttaatttaggagaaaggccctgtaaccaagatactgactgaacatggctggcggactcaggctggggtctgcagtgcagcattaatgggccgctgacatgaatatggagtagttttctctagcaaagagtaatgtgggccatggagtcaggccacctcctctgggctctgctgttcatgcagtccttgtggcctcaactgactgatggagccactcgagtctactacctgggcatccgggatgtgcagtggaactatgctcccaagggaagaaatgtcatcacgaaccagcctctggacagtgacatagtggcttccagcttcttaaagtctgacaagaaccggatagggggaacctacaagaagaccatctataaagaatacaaggatgactcatacacagatgaagtggcccagcctgcctggttgggcttcctggggccagtgttgcaggctgaagtgggggatgtcattcttattcacctgaagaattttgccactcgtccctataccatccaccctcatggtgtcttctacgagaaggactctgaaggttccctatacccagatggctcctctgggccactgaaagctgatgactctgttcccccggggggcagccatatctacaactggaccattccagaaggccatgcacccaccgatgctgacccagcgtgcctcacctggatctaccattctcatgtagatgctccacgagacattgcaactggcctaattgggcctctcatcacctgtaaaaga

SEQ ID NO: 13526 - DNA, 6013 bp, Homo sapiens
  source 1..6013: mol_type = unassigned DNA
aattctaggggctgccatggcttggctaagcttcccttgaccactgagcatttctaagggagttgaggctggtggctcctccttccttcctactggtgcttccacctgccttggtctgagttgcagtccatggggcagcgcctaagtgtctgagcacacttaagaatctctagtggtttatgacccagactttgccctaccacctcagtcttctgaatgttctcttccctggaccctgctccagacactttaaattcagaagaggaaaatgtgcccagcctgcctggagaaaagtgtctgctcctagccaagatctcctcatcacaaaagtaatgtgggccatggagtcaggccacctcctctgggctctgctgttcatgcagtccttgtggcctcaactgactgatggagccactcgagtctactacctgggcatccgggatgtgcagtggaactatgctcccaagggaagaaatgtcatcacgaaccagcctctggacagtgacatagtggcttccagcttcttaaagtctgacaagaaccggatagggggaacctacaagaagaccatctataaagaatacaaggatgactcatacacagatgaagtggcccagcctgcctggttgggcttcctggggccagtgttgcaggctgaagtgggggatgtcattcttattcacctgaagaattttgccactcgtccctataccatccaccctcatggtgtcttctacgagaaggactctgaaggttccctatacccagatggctcctctgggccactgaaagctgatgactctgttcccccggggggcagccatatctacaactggaccattccagaaggccatgcacccaccgatgctgacccagcgtgcctcacctggatctaccattctcatgtagatgctccacgagacattgcaactggcctaattgggcctctcatcacctgtaaaagaggagccctggatgggaactcccctcctcaacgccaggatgtagaccatgatttcttcctcctcttcagtgtggtagatgagaacctcagctggcatctcaatgagaacattgccacttactgctcagatcctgcttcagtggacaaagaagatgagacatttcaggagagcaataggatgcatgcaatcaatggctttgtttttgggaatttacctgagctgaacatgtgtgcacagaaacgtgtggcctggcacttgtttggcatgggcaatgaaattgatgtccacacagcatttttccatggacagatgctgactacccgtggacaccacactgatgtggctaacatctttccagccacctttgtgactgctgagatggtgccctgggaacctggtacctggttaattagctgccaagtgaacagtcactttcgagatggcatgcaggcactctacaaggtcaagtcttgctccatggcccctcctgtggacctgctcacaggcaaagttcgacagtacttcattgaggcccatgagattcaatgggactatggcccgatggggcatgatgggagtactgggaagaatttgagagagccaggcagtatctcagataagtttttccagaagagctccagccgaattgggggcacttactggaaagtgcgatatgaagcctttcaagatgagacattccaagagaagatgcatttggaggaagataggcatcttggaatcctggggccagtgatccgggctgaggtgggtgacaccattcaggtggtcttctacaaccgtgcctcccagccattcagcatgcagccccatggggtcttttatgagaaagactatgaaggcactgtgtacaatgatggctcatcttaccctggcttggttgccaagccctttgagaaagtaacataccgctggacagtcccccctcatgccggtcccactgctcaggatcctgcttgtctcacttggatgtacttctctgctgcagatcccataagagacacaaattctggcctggtgggcccgctgctggtgtgcagggctggtgccttgggtgcagatggcaagcagaaaggggtggataaagaattctttcttctcttcactgtgttggatgagaacaagagctggtacagcaatgccaatcaagcagctgctatgttggatttccgactgctttcagaggatattgagggcttccaagactccaatcggatgcatgccattaatgggtttctgttctctaacctgcccaggctggacatgtgcaagggtgacacagtggcctggcacctgctcggcctgggcacagagactgatgtgcatggagtcatgttccagggcaacactgtgcagcttcagggcatgaggaagggtgcagctatgctctttcctcatacctttgtcatggccatcatgcagcctgacaaccttgggacatttgagatttattgccaggcaggcagccatcgagaagcagggatgagggcaatctataatgtctcccagtgtcctggccaccaagccacccctcgccaacgctaccaagctgcaagaatctactatatcatggcagaagaagtagagtgggactattgccctgaccggagctgggaacgggaatggcacaaccagtctgagaaggacagttatggttacattttcctgagcaacaaggatgggctcctgggttccagatacaagaaagctgtattcagggaatacactgatggtacattcaggatccctcggccaaggactggaccagaagaacacttgggaatcttgggtccacttatcaaaggtgaagttggtgatatcctgactgtggtattcaagaataatgccagccgcccctactctgtgcatgctcatggagtgctagaatctactactgtctggccactggctgctgagcctggtgaggtggtcacttatcagtggaacatcccagagaggtctggccctgggcccaatgactctgcttgtgtttcctggatctattattctgcagtggatcccatcaaggacatgtatagtggcctggtggggcccttggctatctgccaaaagggcatcctggagccccatggaggacggagtgacatggatcgggaatttgcattgttgttcttgatttttgatgaaaataagtcttggtatttggaggaaaatgtggcaacccatgggtcccaggatccaggcagtattaacctacaggatgaaactttcttggagagcaataaaatgcatgcaatcaatgggaaactctatgccaaccttaggggtcttaccatgtaccaaggagaacgagtggcctggtacatgctggccatgggccaagatgtggatctacacaccatccactttcatgcagagagcttcctctatcggaatggcgagaactaccgggcagatgtggtggatctgttcccagggacttttgaggttgtggagatggtggccagcaaccctgggacatggctgatgcactgccatgtgactgaccatgtccatgctggcatggagaccctcttcactgttttttctcgaacagaacacttaagccctctcaccgtcatcaccaaagagactgaaaaagcagtgccccccagagacattgaagaaggcaatgtgaagatgctgggcatgcagatccccataaagaatgttgagatgctggcctctgttttggttgccattagtgtcacccttctgctcgttgttctggctcttggtggagtggtttggtaccaacatcgacagagaaagctacgacgcaataggaggtccatcctggatgacagcttcaagcttctgtctttcaaacagtaacatctggagcctggagatatcctcaggaagcacatctgtagtgcactcccagcaggccatggactagtcactaaccccacactcaaaggggcatgggtggtggagaagcagaaggagcaatcaagcttatctggatatttctttctttatttattttacatggaaataatatgatttcactttttctttagtttctttgctctacgtgggcacctggcactaagggagtaccttattatcctacatcgcaaatttcaacagctacattatatttccttctgacacttggaaggtattgaaatttctagaaatgtatccttctcacaaagtagagaccaagagaaaaactcattgattgggtttctacttctttcaaggactcaggaaatttcactttgaactgaggccaagtgagctgttaagataacccacacttaaactaaaggctaagaatataggcttgatgggaaattgaaggtaggctgagtattgggaatccaaattgaattttgattctccttggcagtgaactactttgaagaagtggtcaatgggttgttgctgccatgagcatgtacaacctctggagctagaagctcctcaggaaagccagttctccaagttcttaacctgtggcactgaaaggaatgttgagttacctcttcatgttttagacagcaaaccctatccattaaagtacttgttagaacactgaaagactgaatttggtgatttttgacagtctctgtggcttctgtcactgtgattgaaacagaaaatacttagggggtgagtgagtatagtatgtatttgtctagcctttgtagaacctacaagtttttgttttagagatgaggaagctgttccagaggaagcatcaaagagtgctgggtaccaccctagaaaaggagctgtcgcataaatgacaaaaattttctgagtgtcaagaaaatttgccagagggaaatagaagtctgagacgagactcaaacctgtccagtgggccaggggaagtaggaccatatcttatggggcctttttggcagtggtggtgtgaaaggtctagttgcaactttgggggcttccttataggatggagtcattctttctggtattttacagcaatattcctttgttacatgcaaatttgagccaaatattggttagagagcacagataagtgataaattttagattgggtaagatggcccaccccactgcaatatccataatattgtaccacatggcaagtggagaacagaagaggtatcaaggagagaaaagatgataactatgtactgttttacactttaaaaagcattttaattcttgattgcgtttggattacctcagggcaagtcattttacatttgagtaatgttatccatttatacatttgagtgaacaaaagcttatggacattaagtaacttcatccaagatccctcaggtagaagttgagcagggattcatgtattcatctgtttgactccaaatacctatttcatcctcatatatcatggaaacatccactaatctccatccaccttacccatattgattccaacttttctgtctgtccagcaatctgtctgtctaggtagcaatctcttgaagataaaatgtagaaactcacagagctggtgttcagttacgatataagtttggaggagaaaacacaatccagaagctatgattcctcttgtttttccatggtcaatgggtttctggagagctttactgagaatctcagaaataaagtgtgggtggaagggggatttagatggctagttatccaagagttagtgtttaggccattgcagaatcaatgatttaacagcagcagaactgttttggcctgcagttaacatgaatgttaatgaagaccaagtacatgctaggaattccagtcaattaatggttataatttacatgcaactaggaggttcttagcttggtctcagttataactctaagagactaggagaggtagatgagatggaatgcatttcttcttattttgtaatcctgctccaggtcaaggaatagaaactcagagcccatgtatttaagaaagaaatgtatttttgtggtaagtttgctccaagtagggatacaagtatctatttttgacaatcaagtgacattgccatctattcagttgctcaagctggaaattatcagtgtcaacacatc

SEQ ID NO: 13527 - DNA, 2363 bp, Homo sapiens
  source 1..2363: mol_type = unassigned DNA
tcgagcccgctttccagggaccctacctgagggcccacaggtgaggcagcctggcctagcaggccccacgccaccgcctctgcctccaggccgcccgctgctgcggggccaccatgctcctgcccaggcctggagactgacccgaccccggcactacctcgaggctccgcccccacctgctggaccccagggtaaggacaagggcccccagactcacagttccagccctgaggacaggggttccctcatccccccacccagcctaatgcccacctcctaatagaggggttcctggggacctgaagagggggcactatgacgtccccccaagcacctaggtgttctgtcctgctcttccttcagactcagccgttggaccccagtcctttcctccccagacccaggagttccagccctcaggcccctcctccctcatactagggagtcctggcccccaaattcctcctttcccaagacttatgatttcaggtcctcagctgtctcctccctcaaaccgggatcctcagtcccctgctccaccaggctcaggcatgggggtccccatccctgcaaatccaggcgtccccccgctgctggtcagacactgaccccatccttgaacccagcccaatctgcgtccgtgatcacggcgtgctctggccaaggcccagtccctacagcctgcctggatggacgcctgggactgggggcgccaggactgggctgggctgggctcccccaggccctgcctccccgtccatctcctcacaggtcccaccctggcccaggaggtcagccagggaatcattaacaagaggcagtgacatggcgcagaaggagggtggccggactgtgccatgctgctccagacccaaggtggcagctctcactgcggggaccctgctacttctgacagccatcggggcggcatcctgggccattgtggctgttctcctcaggagtgaccaggagccgctgtacccagtgcaggtcagctctgcggacgctcggctcatggtctttgacaagacggaagggacgtggcggctgctgtgctcctcgcgctccaacgccagggtagccggactcagctgcgaggagatgggcttcctcagggcactgacccactccgagctggacgtgcgaacggcgggcgccaatggcacgtcgggcttcttctgtgtggacgaggggaggctgccccacacccagaggctgctggaggtcatctccgtgtgtgattgccccagaggccgtttcttggccgccatctgccaagactgtggccgcaggaagctgcccgtggaccgcatcgtgggaggccgggacaccagcttgggccggtggccgtggcaagtcagccttcgctatgatggagcacacctctgtgggggatccctgctctccggggactgggtgctgacagccgcccactgcttcccggagcggaaccgggtcctgtcccgatggcgagtgtttgccggtgccgtggcccaggcctctccccacggtctgcagctgggggtgcaggctgtggtctaccacgggggctatcttccctttcgggaccccaacagcgaggagaacagcaacgatattgccctggtccacctctccagtcccctgcccctcacagaatacatccagcctgtgtgcctcccagctgccggccaggccctggtggatggcaagatctgtaccgtgacgggctggggcaacacgcagtactatggccaacaggccggggtactccaggaggctcgagtccccataatcagcaatgatgtctgcaatggcgctgacttctatggaaaccagatcaagcccaagatgttctgtgctggctaccccgagggtggcattgatgcctgccagggcgacagcggtggtccctttgtgtgtgaggacagcatctctcggacgccacgttggcggctgtgtggcattgtgagttggggcactggctgtgccctggcccagaagccaggcgtctacaccaaagtcagtgacttccgggagtggatcttccaggccataaagactcactccgaagccagcggcatggtgacccagctctgaccggtggcttctcgctgcgcagcctccagggcccgaggtgatcccggtggtgggatccacgctgggcctaggatgggacgtttttcttcttgggcccggtccacaggtccaaggacaccctccctccagggtcctctcttccacagtggcgggcccactcagccccgagaccacccaacctcaccctcctgacccccatgtaaatattgttctgctgtctgggactcctgtctaggtgcccctgatgacgggatgctctttaaataataaagatggttttgatt

SEQ ID NO: 13528 - DNA, 1783 bp, Homo sapiens
  source 1..1783: mol_type = unassigned DNA
tcgagcccgctttccagggaccctacctgagggcccacaggtgaggcagcctggcctagcaggccccacgccaccgcctctgcctccaggccgcccgctgctgcggggccaccatgctcctgcccaggcctggagactgacccgaccccggcactacctcgaggctccgcccccacctgctggaccccagggtcccaccctggcccaggaggtcagccagggaatcattaacaagaggcagtgacatggcgcagaaggagggtggccggactgtgccatgctgctccagacccaaggtggcagctctcactgcggggaccctgctacttctgacagccatcggggcggcatcctgggccattgtggctgttctcctcaggagtgaccaggagccgctgtacccagtgcaggtcagctctgcggacgctcggctcatggtctttgacaagacggaagggacgtggcggctgctgtgctcctcgcgctccaacgccagggtagccggactcagctgcgaggagatgggcttcctcagggcactgacccactccgagctggacgtgcgaacggcgggcgccaatggcacgtcgggcttcttctgtgtggacgaggggaggctgccccacacccagaggctgctggaggtcatctccgtgtgtgattgccccagaggccgtttcttggccgccatctgccaagactgtggccgcaggaagctgcccgtggaccgcatcgtgggaggccgggacaccagcttgggccggtggccgtggcaagtcagccttcgctatgatggagcacacctctgtgggggatccctgctctccggggactgggtgctgacagccgcccactgcttcccggagcggaaccgggtcctgtcccgatggcgagtgtttgccggtgccgtggcccaggcctctccccacggtctgcagctgggggtgcaggctgtggtctaccacgggggctatcttccctttcgggaccccaacagcgaggagaacagcaacgatattgccctggtccacctctccagtcccctgcccctcacagaatacatccagcctgtgtgcctcccagctgccggccaggccctggtggatggcaagatctgtaccgtgacgggctggggcaacacgcagtactatggccaacaggccggggtactccaggaggctcgagtccccataatcagcaatgatgtctgcaatggcgctgacttctatggaaaccagatcaagcccaagatgttctgtgctggctaccccgagggtggcattgatgcctgccagggcgacagcggtggtccctttgtgtgtgaggacagcatctctcggacgccacgttggcggctgtgtggcattgtgagttggggcactggctgtgccctggcccagaagccaggcgtctacaccaaagtcagtgacttccgggagtggatcttccaggccataaagactcactccgaagccagcggcatggtgacccagctctgaccggtggcttctcgctgcgcagcctccagggcccgaggtgatcccggtggtgggatccacgctgggcctaggatgggacgtttttcttcttgggcccggtccacaggtccaaggacaccctccctccagggtcctctcttccacagtggcgggcccactcagccccgagaccacccaacctcaccctcctgacccccatgtaaatattgttctgctgtctgggactcctgtctaggtgcccctgatgacgggatgctctttaaataataaagatggttttgatt

SEQ ID NO: 13529 - DNA, 1480 bp, Homo sapiens
  source 1..1480: mol_type = unassigned DNA
agcatggtgtctgttgcaggtggccggactgtgccatgctgctccagacccaaggtggcagctctcactgcggggaccctgctacttctgacagccatcggggcggcatcctgggccattgtggctgttctcctcaggagtgaccaggagccgctgtacccagatgtgcaaaatgaggaccagagaggacatgcagctggggaacgaggggccaggaacagctcttagacttatccacttgcaggtcagctctgcggacgctcggctcatggtctttgacaagacggaagggacgtggcggctgctgtgctcctcgcgctccaacgccagggtagccggactcagctgcgaggagatgggcttcctcagggcactgacccactccgagctggacgtgcgaacggcgggcgccaatggcacgtcgggcttcttctgtgtggacgaggggaggctgccccacacccagaggctgctggaggtcatctccgtgtgtgattgccccagaggccgtttcttggccgccatctgccaagactgtggccgcaggaagctgcccgtggaccgcatcgtgggaggccgggacaccagcttgggccggtggccgtggcaagtcagccttcgctatgatggagcacacctctgtgggggatccctgctctccggggactgggtgctgacagccgcccactgcttcccggagcggaaccgggtcctgtcccgatggcgagtgtttgccggtgccgtggcccaggcctctccccacggtctgcagctgggggtgcaggctgtggtctaccacgggggctatcttccctttcgggaccccaacagcgaggagaacagcaacgatattgccctggtccacctctccagtcccctgcccctcacagaatacatccagcctgtgtgcctcccagctgccggccaggccctggtggatggcaagatctgtaccgtgacgggctggggcaacacgcagtactatggccaacaggccggggtactccaggaggctcgagtccccataatcagcaatgatgtctgcaatggcgctgacttctatggaaaccagatcaagcccaagatgttctgtgctggctaccccgagggtggcattgatgcctgccagggcgacagcggtggtccctttgtgtgtgaggacagcatctctcggacgccacgttggcggctgtgtggcattgtgagttggggcactggctgtgccctggcccagaagccaggcgtctacaccaaagtcagtgacttccgggagtggatcttccaggccataaaggtgaaagttgggtccagatgggagccagggtggggacgtttgggtgtctaatgggggaagggaggcagagatttgttttaggaaacctacgctcaggcctagaagagggccccccttgggaacagatggactttgaagggttcctggggaagggaagccagtggtgggacgtggaagcctctcaga

SEQ ID NO: 13530 - DNA, 3703 bp, Homo sapiens
  source 1..3703: mol_type = unassigned DNA
cgggctcctgcaggcggggcgctgtgcgcgccgcgatccggtacgtgggcctccgggctgtcccctctgggggcggcgatcctccctccggagccccccttcaaccctcccggaagtgagcatttgcaggaccagggatgctgtgctgctctcccatgagccagtcaccgagtcggtctgctgcagccctttctgaacctctggccgtctggatgctccactgtgcttgccaagatgaagtgcgtcttggtggccactgagggcgcagaggtcctcttctactggacagatcaggagtttgaagagagtctccggctgaagttcgggcagtcagagaatgaggaagaagagctccctgccctggaggaccagctcagcaccctcctagccccggtcatcatctcctccatgacgatgctggagaagctctcggacacctacacctgcttctccacggaaaatggcaacttcctgtatgtccttcacctgtttggagaatgcctgttcattgccatcaatggtgaccacaccgagagcgagggggacctgcggcggaagctgtatgtgctcaagtacctgtttgaagtgcactttgggctggtgactgtggacggtcatcttatccgaaaggagctgcggcccccagacctggcgcagcgtgtccagctgtgggagcacttccagagcctgctgtggacctacagccgcctgcgggagcaggagcagtgcttcgccgtggaggccctggagcgactgattcacccccagctctgtgagctgtgcatagaggcgctggagcggcacgtcatccaggctgtcaacaccagccccgagcggggaggcgaggaggccctgcatgccttcctgctcgtgcactccaagctgctggcattctactctagccacagtgccagctccctgcgcccggccgacctgcttgccctcatcctcctggttcaggacctctaccccagcgagagcacagcagaggacgacattcagccttccccgcggagggcccggagcagccagaacatccccgtgcagcaggcctggagccctcactccacgggcccaactggggggagctctgcagagacggagacagacagcttctccctccctgaggagtacttcacaccagctccttcccctggcgatcagagctcaggtagcaccatctggctggaggggggcaccccccccatggatgcccttcagatagcagaggacaccctccaaacactggttccccactgccctgtgccttccggccccagaaggatcttcctggatgccaacgtgaaggaaagctactgccccctagtgccccacaccatgtactgcctgcccctgtggcagggcatcaacctggtgctcctgaccaggagccccagcgcgcccctggccctggttctgtcccagctgatggatggcttctccatgctggagaagaagctgaaggaagggccggagcccggggcctccctgcgctcccagcccctcgtgggagacctgcgccagaggatggacaagtttgtcaagaatcgaggggcacaggagattcagagcacctggctggagtttaaggccaaggctttctccaaaagtgagcccggatcctcctgggagctgctccaggcatgtgggaagctgaagcggcagctctgcgccatctaccggctgaactttctgaccacagcccccagcaggggaggcccacacctgccccagcacctgcaggaccaagtgcagaggctcatgcgggagaagctgacggactggaaggacttcttgctggtgaagagcaggaggaacatcaccatggtgtcctacctagaagacttcccaggcttggtgcacttcatctatgtggaccgcaccactgggcagatggtggcgccttccctcaactgcagtcaaaagacctcgtcggagttgggcaaggggccgctggctgcctttgtcaaaactaaggtctggtctctgatccagctggcgcgcagatacctgcagaagggctacaccacgctgctgttccaggagggggatttctactgctcctacttcctgtggttcgagaatgacatggggtacaaactccagatgatcgaggtgcccgtcctctccgacgactcagtgcctatcggcatgctgggaggagactactacaggaagctcctgcgctactacagcaagaaccgcccaaccgaggctgtcaggtgctacgagctgctggccctgcacctgtctgtcatccccactgacctgctggtgcagcaggccggccagctggcccggcgcctctgggaggcctcccgtatccccctgctctaggccaaggtggccgcagtctgcctttgcatcctgtcctccagccacccttgcttgccactgttccccatgacgagagcctcctgtctgcagtggccatcctgaggatagggcagagtgcccagggtggccccagggcttctaaaaccccacctagaccaccctccatgtcaggtactgagcaaggccccagatccttctctctggaggaagagggaagcccaggggtcctgtttgtaaaacaacggtggcaacagctcctcttccagagctgcctctgcctttatcctgggagatggggaggaagccccatctctgctgttccctgcgtggaggaagcccacccagcaagctctctcctaccccaggtaaaaggtgctcctttgcctgggtttgaattccagcgctgccacttcctctctgcacctcctggcaagtttcttctattccccacgtttaaagcgatggcacctccgtcccagggtggtgtgaggattacccagtgtggtaggtgctcaataaatgttggtcattgttatcactgaagcccaacatgctagtgcttctagacccttctgtcagtgctgataagcccttgctaagtcccagccccttcatgcttggctggcgtctgccctagggctggggttctcaagcccctggccctggcccagagatttggattcccttggcggccgtggagcccagcctttgatgtctttcaaagcttctgtggtgcgccctggattgagaaccaccacccgaggggtacagcccctctcttccaaccgagaagttcctgtcccagaatggacccagggacaagagaccctgagagccctgggactgggagtgtctgctcctctgaggccaggaggccggtgctgggccagagaggacggcgtggcgaaagtcagcgtccactgcagcacaggatcagatggccgtgtgctgtgcatgcaggagcctcgccttctgtgtctttagtcttgagccaaaatttgctcaaagactgatctcttccttgcagggaacagctttggggctgggggaactagaacccacatgttggtctaaaccctgagaaggtggcagtgaggaagtatcccctcaggtgactggatctgtgttcctccttaacatcatctgatggaatggcaatgaaaagcgtggattgtggaaaatacagaaaaacataaaggaaaaaactccaatcccctgagcccaccactgttcaggacccctgcttttgtcacctactatttccctttagtttttagcagcggctggatgtgatatgtctagtttaaccagtccccttgatctttctatataataaataacacaggagtgaacatcctgaatcaga

SEQ ID NO: 13531 - DNA, 1580 bp, Homo sapiens
  source 1..1580: mol_type = unassigned DNA
gcggggcgctgtgcgcgccgcgatccggtacgtgggcctccgggctgtcccctctgggggcggcgatcctccctccggagccccccttcaaccctcccggaagtgagcatttgcaggaccagggatgctgtgctgctctcccatgagccagtcaccgagtcggtctgctgcagccctttctgaacctctggccgtctggatgctccactgtgcttgccaagatgaagtgcgtcttggtggccactgagggcgcagaggtcctcttctactggacagatcaggagtttgaagagagtctccggctgaagttcgggcagtcagagaatgaggaagaagagctccctgccctggaggaccagctcagcaccctcctagccccggtcatcatctcctccatgacgatgctggagaagctctcggacacctacacctgcttctccacggaaaatggcaacttcctgtatgtccttcacctgtttggagaatgcctgttcattgccatcaatggtgaccacaccgagagcgagggggacctgcggcggaagctgtatgtgctcaagtacctgtttgaagtgcactttgggctggtgactgtggacggtcatcttatccgaaaggagctgcggcccccagacctggcgcagcgtgtccagctgtgggagcacttccagagcctgctgtggacctacagccgcctgcgggagcaggagcagtgcttcgccgtggaggccctggagcgactgattcacccccagctctgtgagctgtgcatagaggcgctggagcggcacgtcatccaggctgtcaacaccagccccgagcggggaggcgaggaggccctgcatgccttcctgctcgtgcactccaagctgctggcattctactctagccacagtgccagctccctgcgcccggccgacctgcttgccctcatcctcctggttcaggacctctaccccagcgagagcacagcagaggacgacattcagccttccccgcggagggcccggagcagccagaacatccccgtgcagcaggcctggagccctcactccacgggcccaactggggggagctctgcagagacggagacagacagcttctccctccctgaggagtacttcacaccagctccttcccctggcgatcagagctcaggtgaggaccggaggaaagcaggaggaaacaatagctagctgcgagcgacaggcagcccaggacatctgtcttaggctccagtggacccccgtgcctcctaaggcttgagtgcaggtacccgtgttcctagagcacaggacgctgtctgcggctccccatcttccctgccagctccagcctgaactcaaggattgttaagaccactccactgatccctaaagctgttgatgacaagttgattcatttaaaacttctgtacatgcattctcagactcatcttttttgtaattaaaattaaaaattaagttaaatttagtaataatcatctaatttctatacattctaaaatatattcagcatctgtagtttatactttgtttctccaaagtatgtgggtaaacaataaaaaaaaactataaata

SEQ ID NO: 13532 - DNA, 978 bp, Homo sapiens
  source 1..978: mol_type = unassigned DNA
cgactgattcacccccagctctgtgagctgtgcatagaggcgctggagcggcacgtcatccaggctgtcaacaccagccccgagcggggaggcgaggaggccctgcatgccttcctgctcgtgcactccaagctgctggcattctactctagccacagtgccagctccctgcgcccggccgacctgcttgccctcatcctcctggttcaggacctctaccccagcgagagcacagcagaggacgacattcaggagacagacagcttctccctccctgaggagtacttcacaccagctccttcccctggcgatcagagctcaggtagcaccatctggctggaggggggcaccccccccatggatgcccttcagatagcagaggacaccctccaaacactggttccccactgccctgtgccttccggccccagaaggatcttcctggatgccaacgtgaaggaaagctactgccccctagtgccccacaccatgtactgcctgcccctgtggcagggcatcaacctggtgctcctgaccaggagccccagcgcgcccctggccctggttctgtcccagctgatggatggcttctccatgctggagaagaagctgaaggaagggccggagcccggggcctccctgcgctcccagcccctcgtgggagacctgcgccagaggatggacaagtttgtcaagaatcgaggggcacaggagattcagagcacctggctggagtttaaggccaaggctttctccaaaagtgagcccggatcctcctgggagctgctccaggcatgtgggaagctgaagcggcagctctgcgccatctaccggctgaactttctgaccacagcccccagcaggggaggcccacacctgccccagcacctgcaggaccaagtgcagaggctcatgcgggagaagctgacggactggaaggacttcttgctggtgaagagcaggaggaacatcaccatg

SEQ ID NO: 13533 - DNA, 3678 bp, Homo sapiens
  source 1..3678: mol_type = unassigned DNA
gggcgctgtgcgcgccgcgatccggtacgtgggcctccgggctgtcccctctgggggcggcgatcctccctccggagccccccttcaaccctcccggaagtgaggaccagggatgctgtgctgctctcccatgagccagtcaccgagtcggtctgctgcagccctttctgaacctctggccgtctggatgctccactgtgcttgccaagatgaagtgcgtcttggtggccactgagggcgcagaggtcctcttctactggacagatcaggagtttgaagagagtctccggctgaagttcgggcagtcagagaatgaggaagaagagctccctgccctggaggaccagctcagcaccctcctagccccggtcatcatctcctccatgacgatgctggagaagctctcggacacctacacctgcttctccacggaaaatggcaacttcctgtatgtccttcacctgtttggagaatgcctgttcattgccatcaatggtgaccacaccgagagcgagggggacctgcggcggaagctgtatgtgctcaagtacctgtttgaagtgcactttgggctggtgactgtggacggtcatcttatccgaaaggagctgcggcccccagacctggcgcagcgtgtccagctgtgggagcacttccagagcctgctgtggacctacagccgcctgcgggagcaggagcagtgcttcgccgtggaggccctggagcgactgattcacccccagctctgtgagctgtgcatagaggcgctggagcggcacgtcatccaggctgtcaacaccagccccgagcggggaggcgaggaggccctgcatgccttcctgctcgtgcactccaagctgctggcattctactctagccacagtgccagctccctgcgcccggccgacctgcttgccctcatcctcctggttcaggacctctaccccagcgagagcacagcagaggacgacattcagccttccccgcggagggcccggagcagccagaacatccccgtgcagcaggcctggagccctcactccacgggcccaactggggggagctctgcagagacggagacagacagcttctccctccctgaggagtacttcacaccagctccttcccctggcgatcagagctcaggtagcaccatctggctggaggggggcaccccccccatggatgcccttcagatagcagaggacaccctccaaacactggttccccactgccctgtgccttccggccccagaaggatcttcctggatgccaacgtgaaggaaagctactgccccctagtgccccacaccatgtactgcctgcccctgtggcagggcatcaacctggtgctcctgaccaggagccccagcgcgcccctggccctggttctgtcccagctgatggatggcttctccatgctggagaagaagctgaaggaagggccggagcccggggcctccctgcgctcccagcccctcgtgggagacctgcgccagaggatggacaagtttgtcaagaatcgaggggcacaggagattcagagcacctggctggagtttaaggccaaggctttctccaaaagtgagcccggatcctcctgggagctgctccaggcatgtgggaagctgaagcggcagctctgcgccatctaccggctgaactttctgaccacagcccccagcaggggaggcccacacctgccccagcacctgcaggaccaagtgcagaggctcatgcgggagaagctgacggactggaaggacttcttgctggtgaagagcaggaggaacatcaccatggtgtcctacctagaagacttcccaggcttggtgcacttcatctatgtggaccgcaccactgggcagatggtggcgccttccctcaactgcagtcaaaagacctcgtcggagttgggcaaggggccgctggctgcctttgtcaaaactaaggtctggtctctgatccagctggcgcgcagatacctgcagaagggctacaccacgctgctgttccaggagggggatttctactgctcctacttcctgtggttcgagaatgacatggggtacaaactccagatgatcgaggtgcccgtcctctccgacgactcagtgcctatcggcatgctgggaggagactactacaggaagctcctgcgctactacagcaagaaccgcccaaccgaggctgtcaggtgctacgagctgctggccctgcacctgtctgtcatccccactgacctgctggtgcagcaggccggccagctggcccggcgcctctgggaggcctcccgtatccccctgctctaggccaaggtggccgcagtctgcctttgcatcctgtcctccagccacccttgcttgccactgttccccatgacgagagcctcctgtctgcagtggccatcctgaggatagggcagagtgcccagggtggccccagggcttctaaaaccccacctagaccaccctccatgtcaggtactgagcaaggccccagatccttctctctggaggaagagggaagcccaggggtcctgtttgtaaaacaacggtggcaacagctcctcttccagagctgcctctgcctttatcctgggagatggggaggaagccccatctctgctgttccctgcgtggaggaagcccacccagcaagctctctcctaccccaggtaaaaggtgctcctttgcctgggtttgaattccagcgctgccacttcctctctgcacctcctggcaagtttcttctattccccacgtttaaagcgatggcacctccgtcccagggtggtgtgaggattacccagtgtggtaggtgctcaataaatgttggtcattgttatcactgaagcccaacatgctagtgcttctagacccttctgtcagtgctgataagcccttgctaagtcccagccccttcatgcttggctggcgtctgccctagggctggggttctcaagcccctggccctggcccagagatttggattcccttggcggccgtggagcccagcctttgatgtctttcaaagcttctgtggtgcgccctggattgagaaccaccacccgaggggtacagcccctctcttccaaccgagaagttcctgtcccagaatggacccagggacaagagaccctgagagccctgggactgggagtgtctgctcctctgaggccaggaggccggtgctgggccagagaggacggcgtggcgaaagtcagcgtccactgcagcacaggatcagatggccgtgtgctgtgcatgcaggagcctcgccttctgtgtctttagtcttgagccaaaatttgctcaaagactgatctcttccttgcagggaacagctttggggctgggggaactagaacccacatgttggtctaaaccctgagaaggtggcagtgaggaagtatcccctcaggtgactggatctgtgttcctccttaacatcatctgatggaatggcaatgaaaagcgtggattgtggaaaatacagaaaaacataaaggaaaaaactccaatcccctgagcccaccactgttcaggacccctgcttttgtcacctactatttccctttagtttttagcagcggctggatgtgatatgtctagtttaaccagtccccttgatctttctatataataaataacacaggagtgaacatcctgaatcaga

SEQ ID NO: 13534 - DNA, 2778 bp, Homo sapiens
  source 1..2778: mol_type = unassigned DNA
cacgcggtcctacccggaagcgcgcccgggctcctgcaggcggggcgctgtgcgcgccgcgatccggtacgtgggcctccgggctgtcccctctgggggcggcgatcctccctccggagccccccttcaaccctcccggaagtgagcatttgcaggaccagggatgctgtgctgctctcccatgagccagtcaccgagtcggtctgctgcagccctttctgaacctctggccgtctggatgctccactgtgcttgccaagatgaagtgcgtcttggtggccactgagggcgcagaggtcctcttctactggacagatcaggagtttgaagagagtctccggctgaagttcgggcagtcagagaatgaggaagaagagctccctgccctggaggaccagctcagcaccctcctagccccggtcatcatctcctccatgacgatgctggagaagctctcggacacctacacctgcttctccacggaaaatggcaacttcctgtatgtccttcacctgtttggagaatgcctgttcattgccatcaatggtgaccacaccgagagcgagggggacctgcggcggaagctgtatgtgctcaagtacctgtttgaagtgcactttgggctggtgactgtggacggtcatcttatccgaaaggagctgcggcccccagacctggcgcagcgtgtccagctgtgggagcacttccagagcctgctgtggacctacagccgcctgcgggagcaggagcagtgcttcgccgtggaggccctggagcgactgattcacccccagctctgtgagctgtgcatagaggcgctggagcggcacgtcatccaggctgtcaacaccagccccgagcggggaggcgaggaggccctgcatgccttcctgctcgtgcactccaagctgctggcattctactctagccacagtgccagctccctgcgcccggccgacctgcttgccctcatcctcctggttcaggacctctaccccagcgagagcacagcagaggacgacattcaggagacagacagcttctccctccctgaggagtacttcacaccagctccttcccctggcgatcagagctcaggtagcaccatctggctggaggggggcaccccccccatggatgcccttcagatagcagaggacaccctccaaacactggttccccactgccctgtgccttccggccccagaaggatcttcctggatgccaacgtgaaggaaagctactgccccctagtgccccacaccatgtactgcctgcccctgtggcagggcatcaacctggtgctcctgaccaggagccccagcgcgcccctggccctggttctgtcccagctgatggatggcttctccatgctggagaagaagctgaaggaagggccggagcccggggcctccctgcgctcccagcccctcgtgggagacctgcgccagaggatggacaagtttgtcaagaatcgaggggcacaggagattcagagcacctggctggagtttaaggccaaggctttctccaaaagtgagcccggatcctcctgggagctgctccaggcatgtgggaagctgaagcggcagctctgcgccatctaccggctgaactttctgaccacagcccccagcaggggaggcccacacctgccccagcacctgcaggaccaagtgcagaggctcatgcgggagaagctgacggactggaaggacttcttgctggtgaagagcaggaggaacatcaccatggtgtcatatctagaagacttcccaggcttggtgcacttcatctatgtggaccgcaccactgggcagatggtggcgccttccctcaactgcagtcaaaagacctcgtcggagttgggcaaggggccgctggctgcctttgtcaaaactaaggtctggtctctgatccagctggcgcgcagatacctgcagaagggctacaccacgctgctgttccaggagggggatttctactgctcctacttcctgtggttcgagaatgacatggggtacaaactccagatgatcgaggtgcccgtcctctccgacgactcagtgcctatcggcatgctgggaggagactactacaggaagctcctgcgctactacagcaagaaccgcccaaccgaggctgtcaggtgctacgagctgctggccctgcacctgtctgtcatccccactgacctgctggtgcagcaggccggccagctggcccggcgcctctgggaggcctcccgtatccccctgctctaggccaaggtggccgcagtctgcctttgcatcctgtcctccagccacccttgcttgccactgttccccatgacgagagcctcctgtctgcagtggccatcctgaggatagggcagagtgcccagggtggccccagggcttctaaaaccccacctagaccaccctccatgtcaggtactgagcaaggccccagatccttctctctggaggaagagggaagcccaggggtcctgtttgtaaaacaacggtggcaacagctcctcttccagagctgcctctgcctttatcctgggagatggggaggaagccccatctctgctgttccctgcgtggaggaagcccacccagcaagctctctcctaccccaggtaaaaggtgctcctttgcctgggtttgaattccagcgctgccacttcctctctgcacctcctggcaagtttcttctattccccacgtttaaagcgatggcacctccgtcccagggtggtgtgaggattacccagtgtggtaggtgctc

SEQ ID NO: 13535 - DNA, 857 bp, Homo sapiens
  source 1..857: mol_type = unassigned DNA
gctgcggcccccagacctggcgcagcgtgtccagctgtgggagcacttccagagcctgctgtggacctacagccgcctgcgggagcaggagcagtgcttcgccgtggaggccctggagcgactgattcacccccagctctgtgagctgtgcatagaggcgctggagcggcacgtcatccaggctgtcaacaccagccccgagcggggaggcgaggaggccctgcatgccttcctgctcgtgcactccaagctgctggcattctactctagccacagtgccagctccctgcgcccggccgacctgcttgccctcatcctcctggttcaggacctctaccccagcgagagcacagcagaggacgacattcaggagacagacagcttctccctccctgaggagtacttcacaccagctccttcccctggcgatcagagctcaggtgaggaccggaggaaagcaggaggaaacaatagctagctgcgagcgacaggcagcccaggacatctgtcttaggctccagtggacccccgtgcctcctaaggcttgagtgcaggtacccgtgttcctagagcacaggacgctgtctgcggctccccatcttccctgccagctccagcctgaactcaaggattgttaagaccactccactgatccctaaagctgttgatgacaagttgattcatttaaaacttctgtacatgcattctcagactcatcttttttgtaattaaaattaaaaattaagttaaatttagtaataatcatctaatttctatacattctaaaatatattcagcatctgtagtttatactttgtttctccaaagtatgtgggtaaacaataaaaaaaaactat

SEQ ID NO: 13536 - DNA, 4665 bp, Homo sapiens
  source 1..4665: mol_type = unassigned DNA
ccgcgggcggggccggctggcgttcacgtgacccggcgtcattggctcgctcgcggaagtagtcctacattcgcggtcagcgcggggtctccgggcgccctgcagggcgggcaggctgtgccatcccgccggacgtcgggatggtgcagctgtacaacctgcacccgttcgggtcgcagcaggtggtgccctgcaagctggagccggaccggttctgtggcggggggcgtgacgcgcttttcgtggcggcgggctgcaaggtggaggcgttcgcggtggccggccaggagctgtgccagccgcggtgcgccttctccacgctgggccgggtgttgcgcctggcctacagcgaggctggagattatttggtagcaattgaagagaaaaacaaagctacatttctacgtgcttatgtgaactggagaaataaaaggactgaaaactctcgtgtgtgtatccgaatgattgggcataatgtggagggaccattcagcaaagccttcagagaccagatgtacattattgaaatgccgctttcggaggcccccttgtgcatttcctgttgccctgtgaaaggagaccttctcgttggctgcacaaataaattagtcttatttagtttgaagtaccagatcattaatgaggaattctcactattggactttgaacgttctttaattatacacatagataatatcactcctgttgaggtttctttttgtgttggatatgttgctgtcatgtcagacttagaagtcttaatcgtaaaactggagtcaggccctaaaaatggagagagagttcaccaccatccacataagaccaacaatcgaataagacggacagaagaaggcatcagtaatgaaatttcacagcttgagtcagatgattttgtcatctgccagaagcccctggaacttcttggtgaaaaaagtgaacagtctggattatctgttacactggagtctacgggattagctgatgaaaaaagaaaatattcccactttcagcacctgctctatagacgttttgctcctgatatttcgtcctatgtcttgtctgatgacatcaagctacattccctccagctgctacccatttaccagaccggttctcttacatctgatggaaaaaatttgtctcaggaaaaagaattgctgagtctcttttgctttttctccttacctcatgtgggctatctctacatggttgtcaaatctgttgaattgatgtcagtctaccagtatcctgaaaagtctcagcaggcagtactcacgccacaatttttgcacgtcattacaagtaacaacctgcagtgtttcactgtgcggtgcagtgcggcggcagctcgtgaggaggacccgtacatggacaccaccctgaaggcttgcccacctgtcagtatggatgtctgtgctttaagaatacagcttttcataggcttgaaagccatctgtcactttaaaaaccacatcatacttttgactaaagcagaacctgaagccattccagagagaagacagtcacccaagaggcttctttcgagaaaagataccagtgttaaaatcaaaatacctcctgtagctgaggctgggtggaatttgtatattgtgaatacgatctcaccagtgcagctgtacaaagagatggtagactatagcaatacctataagactgtcaaaacccagagctgcattcaccttctcagtgaggctcatctgttagtgcgagctgccctgatggatgccagtcagctggaacctggagagaaggcagagcttttggaagcatttaaggaaagctgtgggcaccttggggactgttacagcaggcttgactcccagcattctcatctcaccttgccatactataagatgtctggtttgtctatggctgaagttctggcccgcacggactggacagtagaggatggattacagaaatacgagagaggattaatcttttacattaatcattcactttatgaaaacctggatgaagaattaaatgaagaattagcagcaaaagtggttcagatgttttatgtggctgagccaaagcaagtgccccatattctctgtagtccttctatgaagaatattaatcctttaactgccatgagctatctaaggaagctggatacttctgggttttcatcgatcttagtgacattgaccaaggcagcagtggctctgaaaatgggagatcttgacatgcacagaaatgaaatgaaaagccattcagagatgaagttggtatgtggcttcattctggaacctcggctgttgattcaacagagaaagggacagattgttccaaccgagcttgcacttcacttgaaggaaactcagcctggattgcttgtggcttcagttctgggcttgcagaagaacaacaaaattggaattgaagaagcagattccttttttaaggtgctttgtgctaaggatgaagatacaattcctcagctcttggtagacttttgggaagctcagctagtggcatgtctcccagatgtggtacttcaggaactctttttcaaactcacatcacagtacatctggagattgtctaagaggcagcctcctgacaccacaccattgcgaacatcggaggatctgataaatgcctgtagtcattatggcttaatttatccatgggttcacgtcgtaatatcatctgattctttagctgataaaaattatacagaagatctttcaaaattacagtctcttatatgtggtccttcatttgacatagcttccattattccgttcttggagccactttcagaagacactattgccggcctcagtgtccatgttctgtgtcgtacacgcttgaaagagtatgaacagtgcatagacatactgttagagagatgcccggaggcagtcattccatatgctaatcatgaactgaaagaagagaaccggactctgtggtggaaaaaactgttgcctgaactttgtcagagaataaaatgtggtggagagaagtatcaactctacctgtcatcattaaaagaaacattgtcaattgttgctgtggaactagaactgaaggatttcatgaatgttctcccagaagatggtactgcaacatttttcttgccatatcttctctattgcagtcgaaagaaaccattgacttaaaggtatcatttgaaaaataccataatggcatttgagactgaatttctaaaaattgaatgccaaagtacaagtagaggagttttttattttatatatcacacacacacacacacacacacacacacacacacacatatatgatacaaatgctttcaggctgcttaccttaccgtgtagtggtaactattcacttcttaatttatgacctcaatcaatttaattgtctagaatgtaaaaagtctttaagacataagaattcctcaaagaagccatacattttttaaggtggggattgacttttattccaaggaacaacatcagttcactgttgttggagacatgacaatcattttcatcccaagaacactttaaggaaacattttacaagtatgcttgaaagaatgtcactaactggtccagaattttatcttcttgatttttccagatttctctatgtttttgagaaagatgttaatgttttgccatggtaaaagatttcaaacctcattttttttgttccttttcttgttacttttaagaaaactcatgctctgtttctctgaatcaaatgaagtagaagtttacaaagctaactttcttcttgtctagctattaacatgatttgtcaaatgcatgtttttttcagccaaagccttgtttccatttttgttgatgtgtactcttgctcttttagctagagtgtatgtgaaaataaagaaatacatcattgtattcacaaccatgtgtcttcatttataactttttgtttaaaaaatttttagttcaagtttagttcattgatattatcctctgaatgcagttaaggctgggcagaaattctactcatgtgacatctgccacaggtctattttgaagcttttcttctaatggcaatgtttgtccttaccaggatttaatctatagaattgtctctcaactctgcttttctccagttccagataacgtccttaagaccatctgttcaggggttcacaaaactcaaatttgtgtcattctattttatttattttattttttatttccttccctcataccttgcccattccctctgaatattaggtgtgatgtcaacagcatgttagaaggatcaatgggaaggcaatgattgaaaacatttcaatgaaccttaatagtgttcctttgaggagcacccaggagaatatctggtcatagatctttttttaaatgcagttttataaaaccctaacagcggtgatatcattagactgtatgaatcagttttattacctagtgtacaagtgtcagtcatgtatcattatatagtctgttgatctttccatttgcaaaaaattaatagttttcccccacaaatgtacaaagttgtatgcttccagtcttcttttaatgtttatagtcattccaaagtaacattctattttacactttcacatacattgttatgaatcattggtttttctcttttttccacttatcaccaatttatttcattcagccagatttggtgtct

SEQ ID NO: 13537 - DNA, 2246 bp, Homo sapiens
  source 1..2246: mol_type = unassigned DNA
acgtcatcgccgcgcgccggcttgccaggagctggagggggaggtaggcggggcggcgcgtgacctaaggcctctctgccgcgcgcgcaggtacggggcagaagtcgcaggtacccagctgctgcccacatttctggtccagagtcccgaaccccgagcactgggatgcctggctactccgagccaaggcactgatgtttgaactggaaacttcaaaacgtttaataagagtcttcaggatgggtttgaactagacaagctagaaatttctttagaacaccagctctagcatgcatctcccacttttggctttcctggagaggagcttgaagaggtggttctgcagacagccacagtgatacttaggaaaccagaggaatggatttgacttttctgctaggattctctgttatagtttctccctgagttgtaagaggcatggaaatatacatgaaactgaagaacctgcaaggaagggaagtggaactttccatgctgagtgaaaactaaccaagtggcagttgtgactgaaaacactgaaacctaccacgtccagattcactggattgggggatagaggaacggtcacagctagggagaaagaagtgataccggaaaagaaaacctaaatgaagagaatgaggatgactgcacagtagatggccacctctacctccacagaggcaaagtcagcctcgtggtggaattatttttttctttatgatggttccaaggtaaaggaagaaggcgatccaacaagagctggcatttgttacttttatccttcccagaccctgctagaccaacaggagttgctttgtggacagattgctggagttgtccgctgtgtttctgacatttctgactctcctcctactcttgttcgtctgagaaaactgaagtttgccataaaagttgatggagattacctttgggtgctgggctgtgctgtggagctccctgatgtcagctgcaagcggtttctggatcagctagttggattctttaatttttacaatggacctgtttccctagcttatgagaactgttctcaggaagaactgagcacggagtgggacaccttcatcgagcaaattctgaaaaacaccagtgatctgcataagattttcaattccctctggaacttggaccaaactaaagtggagcccctgttgttgctgaaggcagcccgcattctgcagacctgccagcgctcgcctcacattctcgctggctgcatcctctataaaggactgattgtcagcacccaactcccgccctccctcaccgccaaggtcctgcttcaccgaacagcacctcaggagcagagactccctacgggagaggatgccccgcaggaacatggaaaatggatgttatggagcttcaagaatcgagttacccaccagaaccctaatggagcggcattgcccccgaatgtccagattatccctgtttttgtgaccaaagaggaagccattagtctccacgagttcccggtggaacagatgacaaggtctctagcatctccagcaggactccaggatggttcagcccagcaccatccaaagggtgggagcacatctgccctgaaagaaaacgccactggccatgtggaatccatggcctggaccaccccagatcccacatcccctgacgaagcttgtccagatggcaggaaggagaacggatgcttgtctggccatgatctggagagcatcaggcccgcaggactgcacaactctgccaggggtgaggttcttggcctcagctcctccctggggaaggaactagtctttctccaagaagaactcgacttgtctgaaatccacattccagaggctcaggaagtggaaatggcctcaggtcattttgccttcctacatgtgcctgttccagatggcagggctccttactgcaaggcatctctcagcgcctccagcagcctggaacccacgcctcctgaggacacagccatcagcagcttgcgccctccctctgctcctgagatgctgacccagcatggagcccaagagcagctcgaagaccatcctggccatagcagccaagcccccattcccagagcagaccctctccccaaaagcactgtgcttttcagtggtggctgcgtgaaagggagcgacactcagctgtgtgttcctgggcttgtgtggtacttagaacctcagttctattacgttatagtcagacatttttttgacagtatgagacagactgcaggatga

SEQ ID NO: 13538 - DNA, 3786 bp, Homo sapiens
  source 1..3786: mol_type = unassigned DNA
gtgacctaaggcctctctgccgcgcgcgcagagccaaggcactgatgtttgaactggaaacttcaaaacgtttaataagagtcttcaggatgggtttgaactagacaagctagaaatttctttagaacaccagctctagcatgcatctcccacttttggctttcctggagaggagcttgaagaggtggttctgcagacagccacagtgatacttaggaaaccagaggaatggatttgacttttctgctaggattctctgttatagtttctccctgagttgtaagaggcatggaaatatacatgaaactgaagaacctgcaaggaagggaagtggaactttccatgctgagtgaaaactaaccaagtggcagttgtgactgaaaacactgaaacctaccacgtccagattcactggattgggggatagaggaacggtcacagctagggagaaagaagtgataccggaaaagaaaacctaaatgaagagaatgaggatgactgcacagtagatggccacctctacctccacagaggcaaagtcagcctcgtggtggaattatttttttctttatgatggttccaaggtaaaggaagaaggcgatccaacaagagctggcatttgttacttttatccttcccagaccctgctagaccaacaggagttgctttgtggacagattgctggagttgtccgctgtgtttctgacatttctgactctcctcctactcttgttcgtctgagaaaactgaagtttgccataaaagttgatggagattacctttgggtgctgggctgtgctgtggagctccctgatgtcagctgcaagcggtttctggatcagctagttggattctttaatttttacaatggacctgtttccctagcttatgagaactgttctcaggaagaactgagcacggagtgggacaccttcatcgagcaaattctgaaaaacaccagtgatctgcataagattttcaattccctctggaacttggaccaaactaaagtggagcccctgttgttgctgaaggcagcccgcattctgcagacctgccagcgctcgcctcacattctcgctggctgcatcctctataaaggactgattgtcagcacccaactcccgccctccctcaccgccaaggtcctgcttcaccgaacagcacctcaggagcagagactccctacgggagaggatgccccgcaggaacatggagcggcattgcccccgaatgtccagattatccctgtttttgtgaccaaagaggaagccattagtctccacgagttcccggtggaacagatgacaaggtctctagcatctccagcaggactccaggatggttcagcccagcaccatccaaagggtgggagcacatctgccctgaaagaaaacgccactggccatgtggaatccatggcctggaccaccccagatcccacatcccctgacgaagcttgtccagatggcaggaaggagaacggatgcttgtctggccatgatctggagagcatcaggcccgcaggactgcacaactctgccaggggtgaggttcttggcctcagctcctccctggggaaggaactagtctttctccaagaagaactcgacttgtctgaaatccacattccagaggctcaggaagtggaaatggcctcaggtcattttgccttcctacatgtgcctgttccagatggcagggctccttactgcaaggcatctctcagcgcctccagcagcctggaacccacgcctcctgaggacacagccatcagcagcttgcgccctccctctgctcctgagatgctgacccagcatggagcccaagagcagctcgaagaccatcctggccatagcagccaagcccccattcccagagcagaccctctccccagaaggacccgcaggcccttgttattgcctcgcttagatccaggacagagaggaaacaagcttcccacgggggaacaaggcctggatgaggatgttgatggggtctgtgaaagccacgcagcccctggtctggaatgcagttcaggctcagcaaactgtcagggtgctggcccctctgcagatggaatcagctccaggctgacaccagcagagtcctgcatggggctcgtgaggatgaatctctacactcactgcgtcaaagggctggtgctgtccctgctggctgaggagccgctgctgggagacagcgcagccatagaggaagtgtaccacagcagcctggcttcactgaatgggctggaagtccacctgaaagagacgctgcccagggatgaggcagcctccacgagcagcacctacaacttcacacattacgaccgcattcagagcttgctgatggcaaacctgccgcaggtggccaccccgcaggatcgccgcttcctccaggccgtcagcctgatgcatagcgaatttgcccagctgcccgcgctttatgaaatgactgtcagaaatgcctccacggctgtgtacgcctgttgcaaccccatccaggagacatatttccagcagctggcacctgcagcacggagctccggcttcccaaaccctcaggatggcgccttcagcctctccggcaaagcaaagcagaagctgctgaagcacggggtgaacttgctctgaactgcacccaggaggtgactgggaaggagaaaaccagcaaaggaagctctgccttttataattgaaaaggcccctctattttatttttcttgaaaacattcccttttttaggaaccaaatgatatttgagtttttgttattccttttgcagattgggatgtgttttgggggcaggggttagttcttcaggtcggcagacccagagcacttgataaagaactgtatttaatcggtagtgttggggccgggacgggcttggctccctctctgccatactgagcctgaggtatttcatatctcctgctgttccatcccagcttgaattggtgccacaagcttccaagttggcattttttctagaacctgatcgtccactagcccagagtgtgtgtgttcaacccccacaccaggtggtggtaggcggtgtgactgcacagcgaggtgccggatctgtgagcaggccgactccactcccacgccgcaggtaggtttctccagtgcgctcttgctgggaggtccggatcgttcctgcagggaagcggcagcacacggagaccacttggttgaattctgttggaactctactcaaatctaggggcgtcttctttggacccacaatgggggcaagccttaataatatggaagggagtttgggctttagagatccctttataaaagctctgggggctgagccctgagaattcagtgacaacaggaccaacctgcgctgcctttgactacaagtgggccgtgcagctggttcctctcgagcgagtgtccctaaataggagtttacaagatgtctgggggtaaaagcactgtgcttttcagtggtggctgcgtgaaagggagcgacactcagctgtgtgttcctgggcttgtgtggtacttagaacctcagttctattacgttatagtcagacatttttttgacagtatgagacagactgcaggatgaaaatatttgtcaaaatcttaactgaatgtttactggaagtacttgagattccatttgagagttgtattgttaataatttcatgtcagtgaactgatatctgatgtttatgatatggtgtctttttcttgaaacaagcttccaagggctagaaataaaatagccaaaaaatgctggagttctgagtaattaaa

SEQ ID NO: 13539 - DNA, 3919 bp, Homo sapiens
  source 1..3919: mol_type = unassigned DNA
atggctccactctgttctcttgccaggtggaattatttttttctttatgatggttccaaggtaaaggaagaaggcgatccaacaagagctggcatttgttacttttatccttcccagaccctgctagaccaacaggagttgctttgtggacagattgctggagttgtccgctgtgtttctgacatttctgactctcctcctactcttgttcgtctgagaaaactgaagtttgccataaaagttgatggagattacctttgggtgctgggctgtgctgtggagctccctgatgtcagctgcaagcggtttctggatcagctagttggattctttaatttttacaatggacctgtttccctagcttatgagaactgttctcaggaagaactgagcacggagtgggacaccttcatcgagcaaattctgaaaaacaccagtgatctgcataagattttcaattccctctggaacttggaccaaactaaagtggagcccctgttgttgctgaaggcagcccgcattctgcagacctgccagcgctcgcctcacattctcgctggctgcatcctctataaaggactgattgtcagcacccaactcccgccctccctcaccgccaaggtcctgcttcaccgaacagcacctcaggagcagagactccctacgggagaggatgccccgcaggaacatggaaaatggatgttatggagcttcaagaatcgagttacccaccagaaccctaatggagcggcattgcccccgaatgtccagattatccctgtttttgtgaccaaagaggaagccattagtctccacgagttcccggtggaacagatgacaaggtctctagcatctccagcaggactccaggatggttcagcccagcaccatccaaagggtgggagcacatctgccctgaaagaaaacgccactggccatgtggaatccatggcctggaccaccccagatcccacatcccctgacgaagcttgtccagatggcaggaaggagaacggatgcttgtctggccatgatctggagagcatcaggcccgcaggactgcacaactctgccaggggtgaggttcttggcctcagctcctccctggggaaggaactagtctttctccaagaagaactcgacttgtctgaaatccacattccagaggctcaggaagtggaaatggcctcaggtcattttgccttcctacatgtgcctgttccagatggcagggctccttactgcaaggcatctctcagcgcctccagcagcctggaacccacgcctcctgaggacacagccatcagcagcttgcgccctccctctgctcctgagatgctgacccagcatggagcccaagagcagctcgaagaccatcctggccatagcagccaagcccccattcccagagcagaccctctccccagaaggacccgcaggcccttgttattgcctcgcttagatccaggacagagaggaaacaagcttcccacgggggaacaaggcctggatgaggatgttgatggggtctgtgaaagccacgcagcccctggtctggaatgcagttcaggctcagcaaactgtcagggtgctggcccctctgcagatggaatcagctccaggctgacaccagcagagtcctgcatggggctcgtgaggatgaatctctacactcactgcgtcaaagggctggtgctgtccctgctggctgaggagccgctgctgggagacagcgcagccatagaggaagtgtaccacagcagcctggcttcactgaatgggctggaagtccacctgaaagagacgctgcccagggatgaggcagcctccacgagcagcacctacaacttcacacattacgaccgcattcagagcttgctgatggcaaacctgccgcaggtggccaccccgcaggatcgccgcttcctccaggccgtcagcctgatgcatagcgaatttgcccagctgcccgcgctttatgaaatgactgtcagaaatgcctccacggctgtgtacgcctgttgcaaccccatccaggagacatatttccagcagctggcacctgcagcacggagctccggcttcccaaaccctcaggatggcgccttcagcctctccggcaaagcaaagcagaagctgctgaagcacggggtgaacttgctctgaactgcacccaggaggtgactgggaaggagaaaaccagcaaaggaagctctgccttttataattgaaaaggcccctctattttatttttcttgaaaacattcccttttttaggaaccaaatgatatttgagtttttgttattccttttgcagattgggatgtgttttgggggcaggggttagttcttcaggtcggcagacccagagcacttgataaagaactgtatttaatcggtagtgttggggccgggacgggcttggctccctctctgccatactgagcctgaggtatttcatatctcctgctgttccatcccagcttgaattggtgccacaagcttccaagttggcattttttctagaacctgatcgtccactagcccagagtgtgtgtgttcaacccccacaccaggtggtggtaggcggtgtgactgcacagcgaggtgccggatctgtgagcaggccgactccactcccacgccgcaggtaggtttctccagtgcgctcttgctgggaggtccggatcgttcctgcagggaagcggcagcacacggagaccacttggttgaattctgttggaactctactcaaatctaggggcgtcttctttggacccacaatgggggcaagccttaataatatggaagggagtttgggctttagagatccctttataaaagctctgggggctgagccctgagaattcagtgacaacaggaccaacctgcgctgcctttgactacaagtgggccgtgcagctggttcctctcgagcgagtgtccctaaataggagtttacaagatgtctgggggtaaaagcactgtgcttttcagtggtggctgcgtgaaagggagcgacactcagctgtgtgttcctgggcttgtgtggtacttagaacctcagttctattacgttatagtcagacatttttttgacagtatgagacagactgcaggatgaaaatatttgtcaaaatcttaactgaatgtttactggaagtacttgagattccatttgagagttgtattgttaataatttcatgtcagtgaactgatatctgatgtttatgatatggtgtctttttcttgaaacaagcttccaagggctagaaataaaatagccaaaaaatgctggagttctgagtaattaaatggcagcatttttttgtgacaaaggtaagggttaagacagtgtgtgtgtgtgtgtgtgtgtgtgtgtgtgtgtgtgtgcgcgcgcgcgcgcgcgcgtaacgtgggcgcatccctcttttccttccctgggttcagtgtggctgggtaaggaccgtctgtttgtagggctgccaggctgcagcctgctgctccagggagcaccagctgcagctgatccaatacaccaagcctgtgtctccctcttctatcacctctctccaggatctctgctgtctcttggatcccatctgcctagatggaagaggatcctatccgaagctaggataaatgttgtcttactcctctgctatgttctcccagaaaaaattgattacaagttctctgctgtggttgctgcagctccaggaagtccccgcaatgtctcacgttgtctttgaccagtggtccccagtaccaggccagcgaagacaactttataatgtcatttgtgttgtgaaaattcttccactgacccaaaatggaaccgtacaaagcctatccgtgtatatggaaaagtctcatgcacctggattaactcagaaaaagtaaagtcctgaaacttca

SEQ ID NO: 13540 - DNA, 4497 bp, Homo sapiens
  source 1..4497: mol_type = unassigned DNA
ggtaggcggggcggcgcgtgacctaaggcctctctgccgcgcgcgcaggtacggggcagaagtcgcaggtacccagctgctgcccacatttctggtccagagtcccgaaccccgagcactgggatgcctggctactccgagccaaggcactgatgtttgaactggaaacttcaaaacgtttaataagagtcttcaggatgggtttgaactagacaagctagaaatttctttagaacaccagctctagcatgcatctcccacttttggctttcctggagaggagcttgaagaggtggttctgcagacagccacagtgatacttaggaaaccagaggaatggatttgacttttctgctaggattctctgttatagtttctccctgagttgtaagaggcatggaaatatacatgaaactgaagaacctgcaaggaagggaagtggaactttccatgctgagtgaaaactaaccaagtggcagttgtgactgaaaacactgaaacctaccacgtccagattcactggattgggggatagaggaacggtcacagctagggagaaagaagtgataccggaaaagaaaacctaaatgaagagaatgaggatgactgcacagtagatggccacctctacctccacagaggcaaagtcagcctcgtggtggaattatttttttctttatgatggttccaaggtaaaggaagaaggcgatccaacaagagctggcatttgttacttttatccttcccagaccctgctagaccaacaggagttgctttgtggacagattgctggagttgtccgctgtgtttctgacatttctgactctcctcctactcttgttcgtctgagaaaactgaagtttgccataaaagttgatggagattacctttgggtgctgggctgtgctgtggagctccctgatgtcagctgcaagcggtttctggatcagctagttggattctttaatttttacaatggacctgtttccctagcttatgagaactgttctcaggaagaactgagcacggagtgggacaccttcatcgagcaaattctgaaaaacaccagtgatctgcataagattttcaattccctctggaacttggaccaaactaaagtggagcccctgttgttgctgaaggcagcccgcattctgcagacctgccagcgctcgcctcacattctcgctggctgcatcctctataaaggactgattgtcagcacccaactcccgccctccctcaccgccaaggtcctgcttcaccgaacagcacctcaggagcagagactccctacgggagaggatgccccgcaggaacatggagcggcattgcccccgaatgtccagattatccctgtttttgtgaccaaagaggaagccattagtctccacgagttcccggtggaacagatgacaaggtctctagcatctccagcaggactccaggatggttcagcccagcaccatccaaagggtgggagcacatctgccctgaaagaaaacgccactggccatgtggaatccatggcctggaccaccccagatcccacatcccctgacgaagcttgtccagatggcaggaaggagaacggatgcttgtctggccatgatctggagagcatcaggcccgcaggactgcacaactctgccaggggtgaggttcttggcctcagctcctccctggggaaggaactagtctttctccaagaagaactcgacttgtctgaaatccacattccagaggctcaggaagtggaaatggcctcaggtcattttgccttcctacatgtgcctgttccagatggcagggctccttactgcaaggcatctctcagcgcctccagcagcctggaacccacgcctcctgaggacacagccatcagcagcttgcgccctccctctgctcctgagatgctgacccagcatggagcccaagagcagctcgaagaccatcctggccatagcagccaagcccccattcccagagcagaccctctccccagaaggacccgcaggcccttgttattgcctcgcttagatccaggacagagaggaaacaagcttcccacgggggaacaaggcctggatgaggatgttgatggggtctgtgaaagccacgcagcccctggtctggaatgcagttcaggctcagcaaactgtcagggtgctggcccctctgcagatggaatcagctccaggctgacaccagcagagtcctgcatggggctcgtgaggatgaatctctacactcactgcgtcaaagggctggtgctgtccctgctggctgaggagccgctgctgggagacagcgcagccatagaggaagtgtaccacagcagcctggcttcactgaatgggctggaagtccacctgaaagagacgctgcccagggatgaggcagcctccacgagcagcacctacaacttcacacattacgaccgcattcagagcttgctgatggcaaacctgccgcaggtggccaccccgcaggatcgccgcttcctccaggccgtcagcctgatgcatagcgaatttgcccagctgcccgcgctttatgaaatgactgtcagaaatgcctccacggctgtgtacgcctgttgcaaccccatccaggagacatatttccagcagctggcacctgcagcacggagctccggcttcccaaaccctcaggatggcgccttcagcctctccggcaaagcaaagcagaagctgctgaagcacggggtgaacttgctctgaactgcacccaggaggtgactgggaaggagaaaaccagcaaaggaagctctgccttttataattgaaaaggcccctctattttatttttcttgaaaacattcccttttttaggaaccaaatgatatttgagtttttgttattccttttgcagattgggatgtgttttgggggcaggggttagttcttcaggtcggcagacccagagcacttgataaagaactgtatttaatcggtagtgttggggccgggacgggcttggctccctctctgccatactgagcctgaggtatttcatatctcctgctgttccatcccagcttgaattggtgccacaagcttccaagttggcattttttctagaacctgatcgtccactagcccagagtgtgtgtgttcaacccccacaccaggtggtggtaggcggtgtgactgcacagcgaggtgccggatctgtgagcaggccgactccactcccacgccgcaggtaggtttctccagtgcgctcttgctgggaggtccggatcgttcctgcagggaagcggcagcacacggagaccacttggttgaattctgttggaactctactcaaatctaggggcgtcttctttggacccacaatgggggcaagccttaataatatggaagggagtttgggctttagagatccctttataaaagctctgggggctgagccctgagaattcagtgacaacaggaccaacctgcgctgcctttgactacaagtgggccgtgcagctggttcctctcgagcgagtgtccctaaataggagtttacaagatgtctgggggtaaaagcactgtgcttttcagtggtggctgcgtgaaagggagcgacactcagctgtgtgttcctgggcttgtgtggtacttagaacctcagttctattacgttatagtcagacatttttttgacagtatgagacagactgcaggatgaaaatatttgtcaaaatcttaactgaatgtttactggaagtacttgagattccatttgagagttgtattgttaataatttcatgtcagtgaactgatatctgatgtttatgatatggtgtctttttcttgaaacaagcttccaagggctagaaataaaatagccaaaaaatgctggagttctgagtaattaaatggcagcatttttttgtgacaaaggtaagggttaagacagtgtgtgtgtgtgtgtgtgtgtgtgtgtgtgtgtgtgtgcgcgcgcgcgcgcgcgcgtaacgtgggcgcatccctcttttccttccctgggttcagtgtggctgggtaaggaccgtctgtttgtagggctgccaggctgcagcctgctgctccagggagcaccagctgcagctgatccaatacaccaagcctgtgtctccctcttctatcacctctctccaggatctctgctgtctcttggatcccatctgcctagatggaagaggatcctatccgaagctaggataaatgttgtcttactcctctgctatgttctcccagaaaaaattgattacaagttctctgctgtggttgctgcagctccaggaagtccccgcaatgtctcacgttgtctttgaccagtggtccccagtaccaggccagcgaagacaactttataatgtcatttgtgttgtgaaaattcttccactgacccaaaatggaaccgtacaaagcctatccgtgtatatggaaaagtctcatgcacctggattaactcagaaaaagtaaagtcctgaaacttca

SEQ ID NO: 13541 - DNA, 3562 bp, Homo sapiens
  source 1..3562: mol_type = unassigned DNA
agaccatgtggttgtatagttaaggttcagtgtttcaaataagagcagtcattgtgggcgcctcgtttttttttctagctactcgtgtcttctccggcagatggtctaacggctggatagaggcatatttttagtttgaatttcctgcgcttacagaatggttttatctaatttgtagctactggggttctttattctctggggccacctgaaggctttcaaacacagtaataagccctcctcgggctgggaaacaggaagctgtgttttaaatgccgtgatcactggattaaaggaaacatggctccactctgttctcttgccaggtggaattatttttttctttatgatggttccaaggtaaaggaagaaggcgatccaacaagagctggcatttgttacttttatccttcccagaccctgctagaccaacaggagttgctttgtggacagattgctggagttgtccgctgtgtttctgacatttctgactctcctcctactcttgttcgtctgagaaaactgaagtttgccataaaagttgatggagattacctttgggtgctgggctgtgctgtggagctccctgatgtcagctgcaagcggtttctggatcagctagttggattctttaatttttacaatggacctgtttccctagcttatgagaactgttctcaggaagaactgagcacggagtgggacaccttcatcgagcaaattctgaaaaacaccagtgatctgcataagattttcaattccctctggaacttggaccaaactaaagtggagcccctgttgttgctgaaggcagcccgcattctgcagacctgccagcgctcgcctcacattctcgctggctgcatcctctataaaggactgattgtcagcacccaactcccgccctccctcaccgccaaggtcctgcttcaccgaacagcacctcaggagcagagactccctacgggagaggatgccccgcaggaacatggagcggcattgcccccgaatgtccagattatccctgtttttgtgaccaaagaggaagccattagtctccacgagttcccggtggaacagatgacaaggtctctagcatctccagcaggactccaggatggttcagcccagcaccatccaaagggtgggagcacatctgccctgaaagaaaacgccactggccatgtggaatccatggcctggaccaccccagatcccacatcccctgacgaagcttgtccagatggcaggaaggagaacggatgcttgtctggccatgatctggagagcatcaggcccgcaggactgcacaactctgccaggggtgaggttcttggcctcagctcctccctggggaaggaactagtctttctccaagaagaactcgacttgtctgaaatccacattccagaggctcaggaagtggaaatggcctcaggtcattttgccttcctacatgtgcctgttccagatggcagggctccttactgcaaggcatctctcagcgcctccagcagcctggaacccacgcctcctgaggacacagccatcagcagcttgcgccctccctctgctcctgagatgctgacccagcatggagcccaagagcagctcgaagaccatcctggccatagcagccaagcccccattcccagagcagaccctctccccagaaggacccgcaggcccttgttattgcctcgcttagatccaggacagagaggaaacaagcttcccacgggggaacaaggcctggatgaggatgttgatggggtctgtgaaagccacgcagcccctggtctggaatgcagttcaggctcagcaaactgtcagggtgctggcccctctgcagatggaatcagctccaggctgacaccagcagagtcctgcatggggctcgtgaggatgaatctctacactcactgcgtcaaagggctggtgctgtccctgctggctgaggagccgctgctgggagacagcgcagccatagaggaagtgtaccacagcagcctggcttcactgaatgggctggaagtccacctgaaagagacgctgcccagggatgaggcagcctccacgagcagcacctacaacttcacacattacgaccgcattcagagcttgctgatggcaaacctgccgcaggtggccaccccgcaggatcgccgcttcctccaggccgtcagcctgatgcatagcgaatttgcccagctgcccgcgctttatgaaatgactgtcagaaatgcctccacggctgtgtacgcctgttgcaaccccatccaggagacatatttccagcagctggcacctgcagcacggagctccggcttcccaaaccctcaggatggcgccttcagcctctccggcaaagcaaagcagaagctgctgaagcacggggtgaacttgctctgaactgcacccaggaggtgactgggaaggagaaaaccagcaaaggaagctctgccttttataattgaaaaggcccctctattttatttttcttgaaaacattcccttttttaggaaccaaatgatatttgagtttttgttattccttttgcagattgggatgtgttttgggggcaggggttagttcttcaggtcggcagacccagagcacttgataaagaactgtatttaatcggtagtgttggggccgggacgggcttggctccctctctgccatactgagcctgaggtatttcatatctcctgctgttccatcccagcttgaattggtgccacaagcttccaagttggcattttttctagaacctgatcgtccactagcccagagtgtgtgtgttcaacccccacaccaggtggtggtaggcggtgtgactgcacagcgaggtgccggatctgtgagcaggccgactccactcccacgccgcaggtaggtttctccagtgcgctcttgctgggaggtccggatcgttcctgcagggaagcggcagcacacggagaccacttggttgaattctgttggaactctactcaaatctaggggcgtcttctttggacccacaatgggggcaagccttaataatatggaagggagtttgggctttagagatccctttataaaagctctgggggctgagccctgagaattcagtgacaacaggaccaacctgcgctgcctttgactacaagtgggccgtgcagctggttcctctcgagcgagtgtccctaaataggagtttacaagatgtctgggggtaaaagcactgtgcttttcagtggtggctgcgtgaaagggagcgacactcagctgtgtgttcctgggcttgtgtggtacttagaacctcagttctattacgttatagtcagacatttttttgacagtatgagacagactgcaggatgaaaatatttgtcaaaatcttaactgaatgtttactggaagtacttgagattccatttgagagttgtattgttaataatttcatgtcagtgaactgatatctgatgtttatgatatggtgtctttttcttgaaacaagcttccaagggctagaaataaaatagccaaaaaatgctggagttctgagtaattaaa

SEQ ID NO: 13542 - DNA, 4491 bp, Homo sapiens
  source 1..4491: mol_type = unassigned DNA
cgcgaggggagactgaagttcacgttccgctcttagtgcgcggtgagttccccggcgctaagccgggagacaagatccgatctactgagagctgcgaggtactgccctggatgtggtggagctgggctgggacctccgggctgctggtctgtgagcctggctttgaaaattggttactgggtctcctctcaagaaatctcaagatattaaagttactgctgttaaaaaggtgaggaatactgtatctatcattcaacaagtttcagctttctggctaaatggcttttgtgccagtgataccagagtcctacagccatgttcttgcagagtttgaatctctggatccattactctcagccctgcggctggactccagtcgtctaaagtgcacgagcatagctgtgtctcggaaatggttggctttgggcagttcaggaggaggactccatctcattcagaaagaaggctggaagcacaggctttttctttcacacagggaaggtgcaatttctcaagtcgcctgttgtttacatgatgatgattatgttgctgtagctaccagtcaaggtcttgtggttgtttgggaattaaatcaagagcgtcgtgggaaaccggaacaaatgtatgtgtcttcagaacacaaaggccgaagagtcacagctctctgctgggatacagctattcttagagtttttgtaggtgatcatgctgggaaggtttctgctatcaaactcaatacttctaaacaagcaaaggcagctgctgcttttgtgatgtttcctgttcagacaatcacaactgttgactcctgtgttgtacagttagattatttggatggaaggctacttatatcttcacttactcgatccttcttgtgtgacactgagagagaaaagttttggaaaattggaaacaaggaaagagatggagaatatggagcttgtttctttcctggaagatgttctgggggccagcaacctctgatatattgtgctcgcccaggctctaggatgtgggaagtgaactttgatggagaagttataagtacacatcagttcaagaaactcctctcgttgccacctctccctgtgattactctcagatcagaacctcagtatgatcatacagctggatcctcccagtctttgtctttccccaaactcttacatcttagtgagcattgtgtgctgacttggacagaaagaggaatttatattttcattcctcagaatgttcaagttcttctttggagtgaagtcaaagatattcaggatgtggctgtctgtaggaatgaattgttctgtttgcacctaaatgggaaagtctcacatctctccctgatatctgtggagcgctgtgtggaacgcctgctaagaagaggcctatggaacttggctgctcgtacatgctgtcttttccaaaattctgtcattgccagcagagcaagaaaaactttgactgcagataaattggagcatttgaaatctcagctggaccatggcacctacaatgatctaatttctcaactggaagaattgatcttaaaatttgaacctttggattcagcttgtagcagtagaagaagctccatttcatcacatgaaagtttcagcatcttggactctggtatttatcgtatcattagtagtagaagaggcagtcagtcagatgaagactcttgctcccttcacagccaaaccctctcagaagatgagagatttaaagaattcacctcacagcaggaagaggacctgccagatcagtgttgtggctcacacggaaatgaagacaatgtttctcatgctccagtgatgtttgagacagataagaatgaaacttttctcccgttcggcattccattaccatttcgttctccatctcctcttgtgtctcttcaggctgtcaaagaaagtgtttctagctttgtgcgtaaaactactgagaagattggcacccttcacacgagccctgatctgaaagtgagaccagagctcaggggtgatgagcaatcatgtgaagaggatgtgagttcagatacctgcccaaaggaggaagacactgaggaggaaaaagaggtaactagtccacctccagaagaagacaggttccaggagcttaaagtagcaacagcagaagcaatgaccaagctacaggaccctctggttttatttgaatccgagtctctgagaatggttttacaggagtggctttcacatttagaaaaaacatttgccatgaaggacttttcaggtgtttcagatactgacaactcatccatgaaattgaaccaggatgtgctattagttaatgaatcaaaaaagggaatattagatgaagataatgaaaaagaaaaaagggactctttaggcaatgaagaatctgttgataaaacagcatgtgaatgtgtaaggagtccaagggagtctttggatgacctgtttcaaatatgttctccatgcgccattgcaagtggtcttcggaacgacctggctgaattgacaacattatgtttggagttgaatgtattgaattctaagatcaaaagcaccagtggacatgtggaccacactttgcaacagtactctcctgaaattctggcttgccagttcctgaagaagtacttttttctcctgaacttgaaaagagcgaaggagagtatcaagcttagttacagtaatagcccttctgtttgggatacttttattgaaggattgaaagaaatggcaagttccaatcctgtgtatatggagatggaaaaaggagatctaccaacaaggttaaagttactagatgacgaggttccttttgatagtccgttgttggttgtttatgctacccggttgtatgaaaagtttggggagtctgctcttcgatccttaatcaagttctttccatccattttgccatcggatatcatacaactttgtcatcatcatcctgctgagtttttggcctatttagacagtctggtgaaatcaaggcctgaagatcagcggtcatcttttcttgagtcccttctgcaaccagagtctttaaggttggattggctgcttttggcagtgtcccttgatgctccaccaagcaccagcacaatggatgatgaaggttatcccaggcctcattcacacttgctttcctggggttacagtcagctgatccttcatctaattaaacttcctgcagattttataaccaaagagaaaatgacagacatctgcaggtcttgtggtttctggcctggatatctaattctctgtttggagctggagagaagaagagaggccttcaccaatattgtgtatctgaatgatatgagcctgatggaaggggacaatggttggatcccagagaccgtggaggaatggaagcttctccttcatctcatacagagcaagagcacgaggccagccccccaggagtcactaaatgggagcctcagtgatgggccttcccccatcaatgtggagaatgtggcacttctgttagctaaggccatgggcccagatcgggcttggtcactgctacaggaatgtggtctggcccttgagttgtcagagaagtttaccagaacctgcgatatcctgaggattgctgagaaaaggcagagggccttgatacaaagcatgcttgaaaaatgcgatcggtttctctggtcccagcaggcctagtgggagaagattcagcaggatgtcatgacattttgagaaaaactaaatcatgctcctgaaccttctgaacgcatttgttattgaaggaaagacaccacccccaaatcctgccatcttattggggctacttttgtcagtgtctgtacccttggcatcggcatctgtgactctttatccatgacctcagtgtttcttaaccaaagttgtactcagcatttcttaaccaaagttgaattttgaaaagagtcagtccttgtttgctggaattagaatgttaatgtcctagtattattccgaactacagtattaactgcttgttgctagtggattagacagattcttttcttactgtggcttccatgttgggagcagaagcttttcatcctggtcacatgaagacagatggtattattgactggagttgaattatttttatatcttgtctggcacaatatggaaattactgaaataagacggtgtataatggaattaacacccaaaataagtagaacactgaagatttgaatttgatatttaagtaaaatgggactgggtgcagtggctcaggcctgtaatcccaaccctttggaaggtaaagacgggaggatcacttgaggccaggagttcaagaccagcctgggcaacatagtgagaatgcatctctacaaaaaataaaaaaaattagctaggcatagtacctgaggccaggaggtccaggccgcaatgagatgtgtttgtgccattgcacaccagtctgggtgacagagaaagaccctgtctcaaaaacaaattaaataaaatatcttcatatataaattaagct

SEQ ID NO: 13543 - DNA, 4717 bp, Homo sapiens
  source 1..4717: mol_type = unassigned DNA
cgcgaggggagactgaagttcacgttccgctcttagtgcgcggtgagttccccggcgctaagccgggagacaagatccgatctactgagagctgcgaggtactgccctggatgtggtggagctgggctgggacctccgggctgctggtctgtgagcctggctttgaaaattggttactgggtctcctctcaagaaatctcaagatattaaagttactgctgttaaaaagtgcacgagcatagctgtgtctcggaaatggttggctttgggcagttcaggaggaggactccatctcattcagaaagaaggctggaagcacaggctttttctttcacacagggaaggtgcaatttctcaagtcgcctgttgtttacatgatgatgattatgttgctgtagctaccagtcaaggtcttgtggttgtttgggaattaaatcaagagcgtcgtgggaaaccggaacaaatgtatgtgtcttcagaacacaaaggccgaagagtcacagctctctgctgggatacagctattcttagagtttttgtaggtgatcatgctgggaaggtttctgctatcaaactcaatacttctaaacaagcaaaggcagctgctgcttttgtgatgtttcctgttcagacaatcacaactgttgactcctgtgttgtacagttagattatttggatggaaggctacttatatcttcacttactcgatccttcttgtgtgacactgagagagaaaagttttggaaaattggaaacaaggaaagagatggagaatatggagcttgtttctttcctggaagatgttctgggggccagcaacctctgatatattgtgctcgcccaggctctaggatgtgggaagtgaactttgatggagaagttataagtacacatcagttcaagaaactcctctcgttgccacctctccctgtgattactctcagatcagaacctcagtatgatcatacagctggatcctcccagtctttgtctttccccaaactcttacatcttagtgagcattgtgtgctgacttggacagaaagaggaatttatattttcattcctcagaatgttcaagttcttctttggagtgaagtcaaagatattcaggatgtggctgtctgtaggaatgaattgttctgtttgcacctaaatgggaaagtctcacatctctccctgatatctgtggagcgctgtgtggaacgcctgctaagaagaggcctatggaacttggctgctcgtacatgctgtcttttccaaaattctgtcattgccagcagagcaagaaaaactttgactgcagataaattggagcatttgaaatctcagctggaccatggcacctacaatgatctaatttctcaactggaagaattgatcttaaaatttgaacctttggattcagcttgtagcagtagaagaagctccatttcatcacatgaaagtttcagcatcttggactctggtatttatcgtatcattagtagtagaagaggcagtcagtcagatgaagactcttgctcccttcacagccaaaccctctcagaagatgagagatttaaagaattcacctcacagcaggaagaggacctgccagatcagtgttgtggctcacacggaaatgaagacaatgtttctcatgctccagtgatgtttgagacagataagaatgaaacttttctcccgttcggcattccattaccatttcgttctccatctcctcttgtgtctcttcaggctgtcaaagaaagtgtttctagctttgtgcgtaaaactactgagaagattggcacccttcacacgagccctgatctgaaagtgagaccagagctcaggggtgatgagcaatcatgtgaagaggatgtgagttcagatacctgcccaaaggaggaagacactgaggaggaaaaagaggtaactagtccacctccagaagaagacaggttccaggagcttaaagtagcaacagcagaagcaatgaccaagctacaggaccctctggttttatttgaatccgagtctctgagaatggttttacaggagtggctttcacatttagaaaaaacatttgccatgaaggacttttcaggtgtttcagatactgacaactcatccatgaaattgaaccaggatgtgctattagttaatgaatcaaaaaagggaatattagatgaagataatgaaaaagaaaaaagggactctttaggcaatgaagaatctgttgataaaacagcatgtgaatgtgtaaggagtccaagggagtctttggatgacctgtttcaaatatgttctccatgcgccattgcaagtggtcttcggaacgacctggctgaattgacaacattatgtttggagttgaatgtattgaattctaagatcaaaagcaccagtggacatgtggaccacactttgcaacagtactctcctgaaattctggcttgccagttcctgaagaagtacttttttctcctgaacttgaaaagagcgaaggagagtatcaagcttagttacagtaatagcccttctgtttgggatacttttattgaaggattgaaagaaatggcaagttccaatcctgtgtatatggagatggaaaaaggagatctaccaacaaggttaaagttactagatgacgaggttccttttgatagtccgttgttggttgtttatgctacccggttgtatgaaaagtttggggagtctgctcttcgatccttaatcaagttctttccatccattttgccatcggatatcatacaactttgtcatcatcatcctgctgagtttttggcctatttagacagtctggtgaaatcaaggcctgaagatcagcggtcatcttttcttgagtcccttctgcaaccagagtctttaaggttggattggctgcttttggcagtgtcccttgatgctccaccaagcaccagcacaatggatgatgaaggttatcccaggcctcattcacacttgctttcctggggttacagtcagctgatccttcatctaattaaacttcctgcagattttataaccaaagagaaaatgacagacatctgcaggtcttgtggtttctggcctggatatctaattctctgtttggagctggagagaagaagagaggccttcaccaatattgtgtatctgaatgatatgagcctgatggaaggggacaatggttggatcccagagaccgtggaggaatggaagcttctccttcatctcatacagagcaagagcacgaggccagccccccaggagtcactaaatgggagcctcagtgatgggccttcccccatcaatgtggagaatgtggcacttctgttagctaaggccatgggcccagatcgggcttggtcactgctacaggaatgtggtctggcccttgagttgtcagagaagtttaccagaacctgcgatatcctgaggattgctgagaaaaggcagagggccttgatacaaagcatgcttgaaaaatgcgatcggtttctctggtcccagcaggcctagtgggagaagattcagcaggatgtcatgacattttgagaaaaactaaatcatgctcctgaaccttctgaacgcatttgttattgaaggaaagacaccacccccaaatcctgccatcttattggggctacttttgtcagtgtctgtacccttggcatcggcatctgtgactctttatccatgacctcagtgtttcttaaccaaagttgtactcagcatttcttaaccaaagttgaattttgaaaagagtcagtccttgtttgctggaattagaatgttaatgtcctagtattattccgaactacagtattaactgcttgttgctagtggattagacagattcttttcttactgtggcttccatgttgggagcagaagcttttcatcctggtcacatgaagacagatggtattattgactggagttgaattatttttatatcttgtctggcacaatatggaaattactgaaataagacggtgtataatggaattaacacccaaaataagtagaacactgaagatttgaatttgatatttaagtaaaatgggactgggtgcagtggctcaggcctgtaatcccaaccctttggaaggtaaagacgggaggatcacttgaggccaggagttcaagaccagcctgggcaacatagtgagaatgcatctctacaaaaaataaaaaaaattagctaggcatagtacctgaggccaggaggtccaggccgcaatgagatgtgtttgtgccattgcacaccagtctgggtgacagagaaagaccctgtctcaaaaacaaattaaataaaatatcttcatatataaattaagctaattaaaaatatttttccctgtatttatttaatattttctaatctgaacccatatacagctgactaattcattcttagaaatgtgttatctgtaatctttcctaaacagagtagcccacaagaatcatgcactttttaaaattatttctaagaagccataacaaagctgtgtactaataaagactgcagcaagcacttgtgttatttaaattatgtaagtagattgtcatttgtcaggctcctgtacatttacatagcatgttatattaataataaatgtaaaatatgactaaagttttcattggaacacaatgtagacaggaggtttattatgagcattttgcagaaaggtgtggagtaagtaaagtgttggatgcactgaa

SEQ ID NO: 13544 - DNA, 4147 bp, Homo sapiens
  source 1..4147: mol_type = unassigned DNA
cgcgaggggagactgaagttcacgttccgctcttagtgcgcgtgcacgagcatagctgtgtctcggaaatggttggctttgggcagttcaggaggaggactccatctcattcagaaagaaggctggaagcacaggctttttctttcacacagggaaggtgcaatttctcaagtcgcctgttgtttacatgatgatgattatgttgctgtagctaccagtcaaggtcttgtggttgtttgggaattaaatcaagagcgtcgtgggaaaccggaacaaatgtatgtgtcttcagaacacaaaggccgaagagtcacagctctctgctgggatacagctattcttagagtttttgtaggtgatcatgctgggaaggtttctgctatcaaactcaatacttctaaacaagcaaaggcagctgctgcttttgtgatgtttcctgttcagacaatcacaactgttgactcctgtgttgtacagttagattatttggatggaaggctacttatatcttcacttactcgatccttcttgtgtgacactgagagagaaaagttttggaaaattggaaacaaggaaagagatggagaatatggagcttgtttctttcctggaagatgttctgggggccagcaacctctgatatattgtgctcgcccaggctctaggatgtgggaagtgaactttgatggagaagttataagtacacatcagttcaagaaactcctctcgttgccacctctccctgtgattactctcagatcagaacctcagtatgatcatacagctggatcctcccagtctttgtctttccccaaactcttacatcttagtgagcattgtgtgctgacttggacagaaagaggaatttatattttcattcctcagaatgttcaagttcttctttggagtgaagtcaaagatattcaggatgtggctgtctgtaggaatgaattgttctgtttgcacctaaatgggaaagtctcacatctctccctgatatctgtggagcgctgtgtggaacgcctgctaagaagaggcctatggaacttggctgctcgtacatgctgtcttttccaaaattctgtcattgccagcagagcaagaaaaactttgactgcagataaattggagcatttgaaatctcagctggaccatggcacctacaatgatctaatttctcaactggaagaattgatcttaaaatttgaacctttggattcagcttgtagcagtagaagaagctccatttcatcacatgaaagtttcagcatcttggactctggtatttatcgtatcattagtagtagaagaggcagtcagtcagatgaagactcttgctcccttcacagccaaaccctctcagaagatgagagatttaaagaattcacctcacagcaggaagaggacctgccagatcagtgttgtggctcacacggaaatgaagacaatgtttctcatgctccagtgatgtttgagacagataagaatgaaacttttctcccgttcggcattccattaccatttcgttctccatctcctcttgtgtctcttcaggctgtcaaagaaagtgtttctagctttgtgcgtaaaactactgagaagattggcacccttcacacgagccctgatctgaaagtgagaccagagctcaggggtgatgagcaatcatgtgaagaggatgtgagttcagatacctgcccaaaggaggaagacactgaggaggaaaaagaggtaactagtccacctccagaagaagacaggttccaggagcttaaagtagcaacagcagaagcaatgaccaagctacaggaccctctggttttatttgaatccgagtctctgagaatggttttacaggagtggctttcacatttagaaaaaacatttgccatgaaggacttttcaggtgtttcagatactgacaactcatccatgaaattgaaccaggatgtgctattagttaatgaatcaaaaaagggaatattagatgaagataatgaaaaagaaaaaagggactctttaggcaatgaagaatctgttgataaaacagcatgtgaatgtgtaaggagtccaagggagtctttggatgacctgtttcaaatatgttctccatgcgccattgcaagtggtcttcggaacgacctggctgaattgacaacattatgtttggagttgaatgtattgaattctaagatcaaaagcaccagtggacatgtggaccacactttgcaacagtactctcctgaaattctggcttgccagttcctgaagaagtacttttttctcctgaacttgaaaagagcgaaggagagtatcaagcttagttacagtaatagcccttctgtttgggatacttttattgaaggattgaaagaaatggcaagttccaatcctgtgtatatggagatggaaaaaggagatctaccaacaaggttaaagttactagatgacgaggttccttttgatagtccgttgttggttgtttatgctacccggttgtatgaaaagtttggggagtctgctcttcgatccttaatcaagttctttccatccattttgccatcggatatcatacaactttgtcatcatcatcctgctgagtttttggcctatttagacagtctggtgaaatcaaggcctgaagatcagcggtcatcttttcttgagtcccttctgcaaccagagtctttaaggttggattggctgcttttggcagtgtcccttgatgctccaccaagcaccagcacaatggatgatgaaggttatcccaggcctcattcacacttgctttcctggggttacagtcagctgatccttcatctaattaaacttcctgcagattttataaccaaagagaaaatgacagacatctgcaggtcttgtggtttctggcctggatatctaattctctgtttggagctggagagaagaagagaggccttcaccaatattgtgtatctgaatgatatgagcctgatggaaggggacaatggttggatcccagagaccgtggaggaatggaagcttctccttcatctcatacagagcaagagcacgaggccagccccccaggagtcactaaatgggagcctcagtgatgggccttcccccatcaatgtggagaatgtggcacttctgttagctaaggccatgggcccagatcgggcttggtcactgctacaggaatgtggtctggcccttgagttgtcagagaagtttaccagaacctgcgatatcctgaggattgctgagaaaaggcagagggccttgatacaaagcatgcttgaaaaatgcgatcggtttctctggtcccagcaggcctagtgggagaagattcagcaggatgtcatgacattttgagaaaaactaaatcatgctcctgaaccttctgaacgcatttgttattgaaggaaagacaccacccccaaatcctgccatcttattggggctacttttgtcagtgtctgtacccttggcatcggcatctgtgactctttatccatgacctcagtgtttcttaaccaaagttgtactcagcatttcttaaccaaagttgaattttgaaaagagtcagtccttgtttgctggaattagaatgttaatgtcctagtattattccgaactacagtattaactgcttgttgctagtggattagacagattcttttcttactgtggcttccatgttgggagcagaagcttttcatcctggtcacatgaagacagatggtattattgactggagttgaattatttttatatcttgtctggcacaatatggaaattactgaaataagacggtgtataatggaattaacacccaaaataagtagaacactgaagatttgaatttgatatttaagtaaaatgggactgggtgcagtggctcaggcctgtaatcccaaccctttggaaggtaaagacgggaggatcacttgaggccaggagttcaagaccagcctgggcaacatagtgagaatgcatctctacaaaaaataaaaaaaattagctaggcatagtacctgaggccaggaggtccaggccgcaatgagatgtgtttgtgccattgcacaccagtctgggtgacagagaaagaccctgtctcaaaaacaaattaaataaaatatcttcatatataaattaagct

SEQ ID NO: 13545 - DNA, 2646 bp, Homo sapiens
  source 1..2646: mol_type = unassigned DNA
gctccgctcccccgagaatcgggcctcgccctgctgggcggctggacctgggcaaagcctgggcgcgctcccgcgcagcggcgccatgaagcgctcggggactctgcggctgctctcggacctgagcgccttcggcggcgcggcgcggctccgggagctggtggccggggactcagcggtccgagtccgtggcagtccggacggccgccacttgctgctcctgcgaccccctggggcggtagccccacagctgctagtcgcgtcgcgagggcccggcgcggagctagagcgggcctggccggccggccagccctccccgctggacgccttcttcctgccgtggccagcgcggccggcgctggtgctggtgtgggagagtggcctggccgaggtgtggggcgcgggcgtggggcctggctggcggccgctgcagagcaccgagctgtgtccgggcgggggagcccgcgttgtggcagtggcggcgctccgaggccgcctggtgtggtgcgaggagcggcaggcccgggccgagggcccgtcagggtcgccagcagccgctttcagccactgtgtgtgcgtccggactctggagcccagcggggaagctagcaccagcctgggccgcacacacgtcctgctgcaccactgccctgccttcgggctgctggcctcctgcagacaactcttcctggtgcccactgccaccacctggcctggcgtggcccacgttctactcatctggagcccaggcaagggcaaagtgatggtggctgccccacggcttggtctctcctacagtaagagtctgaatcctggacgaggggacacatgggacttccggaccctgctccgaggccttcctgggttgctgtcccccagggagccactggctgtacacacctgggccccaactccccagggcctgctgttgcttgacttcgggggcactgtgagcctattgcagtcccacggtggtacgcgggctgtgggcaccctgcaggaggcacctgtaggcccgtgggggtctgcagccctaggcacatttcagggcactctggcctgtgtgctgggctccacattggaactgctggacatgggcagtgggcagctgctggagaggaaggtcctaagtacagacagggtacatctgctagaaccgccagcccccggcatggaggatgaggaagagctggagacccgagggaatcttcgtctgctttcagccttgggtctgttttgtgtgggctgggaagccccacagggtgttgagttgccttcagccaaggatctggtgtttgaggaggcctgcgggtactaccagcggcggagcctgcggggtgcccagctcactccagaagaactgagacacagcagcacattccgggcacctcaggctctggcctccatcctccagggccacctgcccccatctgcactgctgaccatgttgaggaccgagcttcgggattaccgaggcttagaacagctgaaggcccagctggtggctggggatgatgaggaggctggttggactgagctggcggagcaggaagtggcacgcctgctgaggactgagttgataggagaccagctagcccagctcaacaccgttttccaagcccttcctacagcagcctggggtgccaccctcagggccctgcagctccagctagatgggaatggcaagctgaggtcccaagcaccccctgatgtgtggaagaaagtgttagggggaataaccgctggaaaggaaccccccaatggaatactgcccccctttgaactcctgtgccagtgtctgtgccagctggagcctcgatggctgccaccctttgtggagctggcacagcagcagggcgggccgggctggggggcagggggcccaggactgcccctgtatcgccgagctctggcagtgctaggtgaggaggggaccaggcctgaggctctggagctagagctgctcttgagcagtgggcggcctaaagctgtgctccaagctgtcgggcagctggtgcaaaaggaacaatgggatcgggctctggatgctggcctggccctcggcccctccagtcccctgcttcgaagtgaaatcttcaaactgctgctggccgagtttgcccagcaccgccggcttgatgctcacctccccctcctttgccgcctgtgcccaccagaactggctccagctgagctcctgcttctactgaggacatacctcccagatgaggtggggcccccaaccccattccctgagcctggagcagagccccctctcactgtgggcttgctcaaagccctgctggagcagactggggctcaaggatggctgtcgggcccagttctaagcccatatgaggacatcctatgggaccccagcactccacccccgactccacctcgggacctatgactacccttcaggcatcagaacactcagggcctggaggcttgcttgggactggaggcttgcttggacagttcctctgtgtcactgacacaggaaatcatttctaggacacagtgatcagggaagggtgcctgggacttggagggtcccatgtatggacctgtgtatgcaatactgttctgtcatctggagctatttttaagatgtgtgtgttaaatatatacatagtttaatat

SEQ ID NO: 13546 - DNA, 4105 bp, Homo sapiens
  source 1..4105: mol_type = unassigned DNA
atgctgggcttcctgtcacgtggtccttcaatgaagctgtgcatgggcctggcatgtgtcttgtccctttggaacacagtgtctggcatcaaaggagaagccaagaaagagaagggaatgacctttttacctacaacagtgtctggccttagagaagaagagaggaaggagaagggggtggcatttcttgctacgacggagctgcccgcaaggtcaatcgatctgtccgcgcttaacctgacagagcttgtgaatgggatgctcagtagagcgttaaaagatagcaagaagttcttctccttgctgagtgtcacttcctacagttccttcgccttccacaagttttctgtagctgtttacaacatttctaacctgaagacagtagaccccgccaaattccccacaaggtattgctactgtttaaacaatcggaccaatgacttatcagattttacagctctactggtagatatcatcggcaattctaccagctacctcacagagatttttaagtcaacctccatcctctcagtgaatcaaagcaatgaatcagattgcatcttcatctgtgtgatgacaggaaagtcaggaaggaatctttctgacttctgggagatagaagaaaaatatcccattatcaattacacatttaccagcggcttgtctggtgttctgggtgcagctaccaggggaactgccaggacttcaaagcccacaaccaaaagccagaaaacactaccaagtacaagccccggacactggacccagagcacaccctgggcatctgctctgagatcctctccctggacagagacagctgctccttcagaaacagaggagaccctgaacacaggcaggcctcctgagcttccagccagggccacagccacatggttcagtgcctcccacactctcccagccttggctaccaggagggtggccagaactcagtggttgacagctgacagacagacgtgggcttccatatcgtccgtgccctgggctcagaccatcagtgagaaaaaacctggagggtctctctgggaaactcgttcttccccaccgactactgcagggaccgaggaagccatgaacactacaagccttttggcgcctgctgctgagataatggccacacctggcagcccatcccaggccagccctaccttgggagcattcacccatggcacacagactccgagtccaaccaaggcaacagcccccagatatccacaaacaggtgatctctctgcagagtggccattcactgctggtgaagagccagtcctggtcccaagaccccatcaagtttcaaggtgtcctcagccactcttcaaggtgggagctatggcagctgctcctctcaccctggctattcagaggctcaacccatgcctgatggagctgtgccaattcttccagcaatgcctctgcatgagccagaggagtcccaggacagaggacatgagatactgtcttgaatactattcctggtttctgaagaatgcaacatatatctgtcagagggtgaaaagggtgtcccactcgcacaccttaaagcaaaagtgccttgagaatatctgcaagtctgtgtgaggccttgaaaataacactagggcataacaattacttcaggggatacgccatccaccctggctcttgtcccaagtgggctacatttgaagaattcacccaggctccagctagatcatcagttaatttaaagtggttattcttggaagtagcattttttttccctctcctgtgaatctgtgcaaaacattgaaggtagaagttttcttgttagaggcctcacaattaatacagtaatgccagactccttgcctgcttcaaaatcatggaaatctagtgttcatgctcaagaaactcctacaatgcttgaggcaatcctgacaatttaaaaactggggatgcgtgggcactctagcctgcacaaaccagttcagccatggagactctgacacaatacctgaggtgacttaaacttgagacttttgaaagacaacaaaagcataaattaatattgaattcatactctagagagattcacatatactgatagttaactaatacatgtacaaccaatcagacttgccatggtatgggatctatataatcttccaagcccccttaagtgggcgataatgaaaactttatcattaggaggaggtttagagagttgtttttattgacatcttgtcttgattcctcttctgtgtgacccactggattcagaggtccccatgagcaccctcaggttcaatgattcatgagtagaactcagaggtagggaaaactgttatatgcacatttagcatttattacaacaaaaggatgcagatgaaaagcagcaaatgtgaaaggcacctctagagagagtccaagagagcccaggcacaagcttccagtggggttgcacagtcagcatctaatcctcccagaaataatgtttaacaacacgtggagtattgtcagccaggaaagctcatccaagttttggtgtccaggggatgtttgggggtatggagtaggtatggagtgccttcatggcctgcatggctaaacttagttattcagtctccagtccctctagaggtcaagctgatactgcacgacctaaggccccaccataaatcacattgttaacataaactatctgtcatggcacgaagccccaggtacaagagacactcatcaggcaggatattccaaggatttacaggggattccccaggagctggtcaaggaccagatgttcctctgaaaggtgcaggatttgagctcatctgtggagtacgtctgtggagtcaactttcttctgcatccccacatactgatttgccaccttcattgtatcagattcctttttcactatattcaggtttgcggttgctccagtatccctatctatgctgagtctccacgtagagcatgtgtgccctctccagtggctctgcacggaccccttatttctcattaccagggacagtttttctcctgatgtgcctggtgctccttctccactctcttgccttaggactctgctgggccatgagtattttttttacccttttgtgacctagggctgcccttgggtgaggaaagtcactttctgttcatcatctaagtagaaaacagtttctgccattggaagacccctgagttccctggcactcctgtgaaccacaaggtgcctggggaggtagaacttggacattggagagaggagcagccagacatttctctttctaatcatatgcagaaagatttctttttattctccagaacacttgaaagactctccaagttatgcaaatgtcaagctcataaatgtatattatcatgacttttgcaaagatgaagaggatacagcaaattttctgggaggcaaagggacttctacctggataggaaccaagcaaactcattaagcatggattaatttgattcaacccttgcgtggatattaattaaggacctttgacaggagagggtcctcaaggttcctcaaagagtaacttatcatcaaggaaggtgaagaatggatggatggcttgggcccaagactggggctattcacttgtggggaaacccatgtgaacccagttaccccatactttgggaataatgactgagcatgactataatctttaagaagctcaaatgcggaatacctctgaggcttatgcaaggatctggcctagcatcaaggacaaaggctcagaggactccttggggccagttttctacagtcataccatcagccacaacagcagcaaaggcagaaggaaaacagggcccaggagtggctgacgactgcctggagtccaactggtctcctggagttcataagaggtttgaccccttctgagctgaatgtgtcctgatttaggggatagctagggcaataagaaagcctcagggggtgctactgatctggaactcctactaattagtgtgtatgtatgtggccaccagtggttagcagatgaggtgaaagagatgggacagtgactgtatctgttctgatgaaggagattgtgcagttacatgcgtaacgtcattaaacttcattcttccaggt

SEQ ID NO: 13547 - DNA, 876 bp, Homo sapiens
  source 1..876: mol_type = unassigned DNA
gaggccagagctgttgctctgtgcagaccacgagaggatgtctcccagccttcaggaaggcgctcagctcggggaaaacaaaccctcaacttgctccttttcaattgagagaatcttaggactggaccagaagaaagactgtgttccattaatgaaaccccacaggccctgggcagacacctgcagctcatcagggaaagatggtaacttatgtctacatgtcccaaatcctcccagtgggatttcattccctagcgtggtggatcacccaatgccagaagaaagagcttcgaaatatgaaaattacttttcagcctcagaaagactgtctttgaaaagagagttgagttggtatagaggccgaagaccaagaactgcttttactcaaaaccagattgaagtgttagaaaatgtctttagagtaaactgctatcctggtatcgatattagagaagacttagctcaaaaattgaatctagaggaagacagaatccagatttggtttcaaaatcggcgtgcaaaactgaaaaggtcccatagagaatcacagtttctaatggcgaaaaaaaatttcaacacaaatctgctggaatagatagaaaactaaacaagtgaaattatcttctaattgcagagcatgaagaatcagtggaaatattaagtgttaaaatgtgatgttttctttcctgcatttaatctgaatattgtcattttttctgaaaatatattgtaaatactattatagcatggtacatatttgggcacttttagttatagtaaagaccttttatatatattttaataaacattttcagaaaagattgctattttttaagtaagccaaattaatctaataaattagtttgttaaaatcaa

SEQ ID NO: 13548 - DNA, 657 bp, Homo sapiens
  source 1..657: mol_type = unassigned DNA
tttttagtgttacaatctttaaaagttttccccttagattgtttatcagccagtctctctctcccgaagagttctttagtttttgaggaagttgatttggaggcagttcttacaatgagttaagggttcccagttgtgttacagtttctttttccttgatatctcatttctactctgccaacaagaacaccatgcaccccagctctaaagaaggaagactttcaagcccccttgtcagcggagctataaggtgaactgcaggaagatcccagccctatacacgtggggcagagccagcagaggccagagctgttgctctgtgcagaccacgagaggatgtctcccagccttcaggaaggcgctcagctcggggaaaacaaaccctcaacttgctccttttcaattgagagaatcttaggactggaccagaagaaagactgtgttccattaatgaaaccccacaggccctgggcagacacctgcagctcatcagggaaagatggtaacttatgtctacatgtcccaaatcctcccagtgggatttcattccctagcgtggtggatcacccaatgccagaagaaagagcttcgaaatatgaaaattacttttcagcctcagaaagactgtctttgaaaagagagttgagttggtataga

SEQ ID NO: 13549 - DNA, 3781 bp, Homo sapiens
  source 1..3781: mol_type = unassigned DNA
ccggacgccagagacaaaggctcccaaggcaagagggactgtggccctgcgtcggctctgctcgggactgctgaccccaggaatttacgccccttcgtttttctcttctgattcttctcttctcccaagcccgcgtcccctcacgcgtggcctctctccttgccgggagggccgcgatggaggtcccgcccaggctttcccatgtgccgccgccattgttcccctccgctcccgctactttagcctcccgcagcctctcccattggcggccgcggccgccgcggcagctagccccgctcctcccttcgctcgctcccagctccgcccggcagggggcgcgccgggcccagcgccacgtcaccgcccagcagccctcccgattggcgggcggggcggctataaagggagggcgcaggcggcgcccggatctcttccgccgccattttaaatccagctccatacaacgctccgccgccgctgctgccgcgacccggactgcgcgccagcacccccctgccgacagctccgtcactatggaggatatgaacgagtacagcaatatagaggaattcgcagagggatccaagatcaacgcgagcaagaatcagcaggatgacggtaaaatgtttattggaggcttgagctgggatacaagcaaaaaagatctgacagagtacttgtctcgatttggggaagttgtagactgcacaattaaaacagatccagtcactgggagatcaagaggatttggatttgtgcttttcaaagatgctgctagtgttgataaggttttggaactgaaagaacacaaactggatggcaaattgatagatcccaaaagggccaaagctttaaaagggaaagaacctcccaaaaaggtttttgtgggtggattgagcccggatacttctgaagaacaaattaaagaatattttggagcctttggagagattgaaaatattgaacttcccatggatacaaaaacaaatgaaagaagaggattttgttttatcacatatactgatgaagagccagtaaaaaaattgttagaaagcagataccatcaaattggttctgggaagtgtgaaatcaaagttgcacaacccaaagaggtatataggcagcaacagcaacaacaaaaaggtggaagaggtgctgcagctggtggacgaggtggtacgaggggtcgtggccgaggtcagggccaaaactggaaccaaggatttaataactattatgatcaaggatatggaaattacaatagtgcctatggtggtgatcaaaactatagtggctatggcggatatgattatactgggtataactatgggaactatggatatggacagggatatgcagactacagtggccaacagagcacttatggcaaggcatctcgagggggtggcaatcaccaaaacaattaccagccatactaaaggagaacattggagaaaacaggaggagatgttaaagtaacccatcttgcaggacgacattgaagattggtcttctgttgatctaagatgattattttgtaaaagactttctagtgtacaagacaccattgtgtccaactgtatatagctgccaattagttttctttgtttttactttgtcctttgctatctgtgttatgactcaatgtggatttgtttatacacattttatttgtatcatttcatgttaaacctcaaataaatgcttccttatgtgattgcttttctgcgtcaggtactacatagctctgtaaaaaatgtaatttaaaataagcaataattaaggcacagttgattttgtagagtattggtccatacagagaaactgtggtcctttataaatagccagccagcgtcaccctcttctccaatttgtaggtgtattttatgctcttaaggcttcatcttctccctgtaactgagatttctaccacacctttgaacaatgttctttcccttctggttatctgaagactgtcctgaaaggaagacataagtgttgtgattagtagaagctttctagtagaccatatttcttctggattgtaataaaattgttagtagctccttttactttgttcctgtctctggaaagccatttttgaattgctgattactttggctttaatcagtggtcacctagaaaaagctttgtaatcataacacaatgagtaattcttgataaaagttcagatacaaaaggagcactgtaaaactggtaggagctatggtttaagagcattggaagtagttacaactcaaggattttggtagaaaggtatgagtttggtcgaaaaattaaaatagtggcaaaataagatttagttgtgttttctcagagccgccacaagattgaacaaaatgttttctgtttgggcatcctgaggaagttgtattagctgttaatgctctgtgagtttagaaaaagtcttgatagtaaatctagtttttgacacagtgcatgaactaagtagttaaatatttacatattcagaaaggaatagtggaaaaggtatcttggttatgacaaagtcattacaaatgtgactaagtcattacaaatgtgactgagtcattacagtggaccctctgggtgcattgaaaagaatccgttttatatccaggtttcagaggacctggaataataaaaagctttggattttgcattcagtgtagttggattttgggaccttggcctcagtgttatttactgggattggcatacgtgttcacaggcagagtagttgatctcacacaacgggtgatctcacaaaactggtaagtttcttatgctcatgagccctccctttttttttttaatttggtgcctgcaactttcttaacaatgattctacttcctgggctatcacattataatgctcttggcctcttttttgctgctgttttgctattcttaaacttaggccaagtaccaatgttggctgttagaagggattctgttcattcaacatgcaactttagggaatggaagtaagttcatttttaagttgtgttgtcagtaggtgcggtgtctagggtagtgaatcctgtaagttcaaatttatgattaggtgacgagttgacattgagattgtccttttccctgatcaaaaaatgaataaagcctttttaaacaaaatccaaacttttaatcaagtcttgatatgtatgactgagaaaaaatacactacatctagagatgattgagatgttttgcaaagaattgaagggggagtgagaattggtttttcttgcaggggctttgaactctagatttgggctttgaactctagatttaattcagatttcagggtctatcagttcaccaactgatgcaaatttgaacagatactctaaggctaagtgtcctaggttggatgaactgaagctactatcaagatctcgttcccaaggattaatttagaacaaagtaattggacaagtttattggggaggggatagaaatgaattctaaagtacctataacaaatactctgtgtatgttttttacatcgtatttgccttttacattgtttagaccaaattctgtgtgatgttatcctcgggaagaggatagaaattaattctaaagtacctataacaaatgctcggtttgtatatgtttttatacatcgtatttgccttttgcattgttcagaccaaattctgtgtgatgttatcctaacaaaacaccttagtaatttctttggttaacatgttaatctgtaatctcacttttataagatgaggactattaaaatgagatgtctgttgggatgcta

SEQ ID NO: 13550 - DNA, 1120 bp, Homo sapiens
  source 1..1120: mol_type = unassigned DNA
gatctcttccgccgccattttaaatccagctccatacaacgctccgccgccgctgctgccgcgacccggactgcgcgccagcacccccctgccgacagctccgtcactatggaggatatgaacgagtacagcaatatagaggaattcgcagagggatccaagatcaacgcgagcaagaatcagcaggatgacggtaaaatgtttattggaggcttgagctgggatacaagcaaaaaagatctgacagagtacttgtctcgatttggggaagttgtagactgcacaattaaaacagatccagtcactgggagatcaagaggatttggatttgtgcttttcaaagatgctgctagtgttgataaggttttggaactgaaagaacacaaactggatggcaaattgatagatcccaaaagggccaaagctttaaaagggaaagaacctcccaaaaaggtttttgtgggtggattgagcccggatacttctgaagaacaaattaaagaatattttggagcctttggagagattgaaaatattgaacttcccatggatacaaaaacaaatgaaagaagaggattttgttttatcacatatactgatgaagagccagtaaaaaaattgttagaaagcagataccatcaaattggttctgggaagtgtgaaatcaaagttgcacaacccaaagaggtatataggcagcaacagcaacaacaaaaaggtggaagaggtgctgcagctggtggacgaggtggtacgaggggtcgtggccgaggccaacagagcacttatggcaaggcatctcgagggggtggcaatcaccaaaacaattaccagccatactaaaggagaacattggagaaaacaggaggagatgttaaagtaacccatcttgcaggacgacattgaagattggtcttctgttgatctaagatgattattttgtaaaagactttctagtgtacaagacaccattgtgtccaactgtatatagctgccaattagttttctttgtttttactttgtcctttgctatctgtgttatgactcaatgtggatttgtttatacacattttatttgtatcatttcatgttaaacctcaaataaatgcttccttatgtg

SEQ ID NO: 13551 - DNA, 2096 bp, Homo sapiens
  source 1..2096: mol_type = unassigned DNA
ggaagaggcgcccgcgctgcgctgcccggaggagccgtcgcgcgcccgcttcctgttcggctggttcctgccagctcgaggacaaaacacgcgtgcgcgcggcgggcgagcgcgctcgccgcctcagtcgccagcgccgggcgcagtccgcctttttccggagcagactggccgcggtgctagtcggtagcagcggccgccgcagcggctccgcactggcgaaccgagggcagaaaaaggcggggttgacggctttttggtaggagtgggctggaccggacgccagagacaaaggctcccaaggcaagagggactgtggccctgcgtcggctctgctcgggactgctgaccccaggaatttacgccccttcgtttttctcttctgattcttctcttctcccaagcccgcgtcccctcacgcgtggcctctctccttgccgggagggccgcgatggaggtcccgcccaggctttcccatgtgccgccgccattgttcccctccgctcccgctactttagcctcccgcagcctctcccattggcggccgcggccgccgcggcagctagccccgctcctcccttcgctcgctcccagctccgcccggcagggggcgcgccgggcccagcgccacgtcaccgcccagcagccctcccgattggcgggcggggcggctataaagggagggcgcaggcggcgcccggatctcttccgccgccattttaaatccagctccatacaacgctccgccgccgctgctgccgcgacccggactgcgcgccagcacccccctgccgacagctccgtcactatggaggatatgaacgagtacagcaatatagaggaattcgcagagggatccaagatcaacgcgagcaagaatcagcaggatgacggtaaaatgtttattggaggcttgagctgggatacaagcaaaaaagatctgacagagtacttgtctcgatttggggaagttgtagactgcacaattaaaacagatccagtcactgggagatcaagaggatttggatttgtgcttttcaaagatgctgctagtgttgataaggttttggaactgaaagaacacaaactggatggcaaattgatagatcccaaaagggccaaagctttaaaagggaaagaacctcccaaaaaggtttttgtgggtggattgagcccggatacttctgaagaacaaattaaagaatattttggagcctttggagagattgaaaatattgaacttcccatggatacaaaaacaaatgaaagaagaggattttgttttatcacatatactgatgaagagccagtaaaaaaattgttagaaagcagataccatcaaattggttctgggaagtgtgaaatcaaagttgcacaacccaaagaggtatataggcagcaacagcaacaacaaaaaggtggaagaggtgctgcagctggtggacgaggtggtacgaggggtcgtggccgaggtcagggccaaaactggaaccaaggatttaataactattatgatcaaggatatggaaattacaatagtgcctatggtggtgatcaaaactatagtggctatggcggatatgattatactgggtataactatgggaactatggatatggacagggatatgcagactacagtggccaacagagcacttatggcaaggcatctcgagggggtggcaatcaccaaaacaattaccagccatactaaaggagaacattggagaaaacagcgggaacttcattgcaggccgtgtgtcaccctgaccacgtctatctctgggggtcgcacgttgcgggcagagcgcaaggcatacaccagaaaacgctgtcctgtggaggagatgttaaagtaacccatcttgcaggacgacattgaagattggtcttctgttgatctaagatgattattttgtaaaagactttctagtgtacaagacaccattgtgtccaactgtatatagctgccaattagttttctttgtttttactttgtcctttgctatctgtgttatgactcaatgtggatttgtttatacacattttatttgtatcatttcatgttaaacctcaaataaatgcttccttatgtg

SEQ ID NO: 13552 - DNA, 2629 bp, Homo sapiens
  source 1..2629: mol_type = unassigned DNA
gcgcctcgcgctgattctcacgggcccggctgccggcccccgctctgccctgcataataaaatggctaatcaggtgaatggtaatgcggtacagttaaaagaagaggaagaaccaatggatacttccagtgtaactcacacagaacactacaagacactgatagaggcaggcctcccacagaaggtggcagaaagacttgatgaaatatttcagacaggattggtagcttatgtcgatcttgatgaaagagcaattgatgctctcagggaatttaatgaagaaggagctctgtctgtactacagcagttcaaggaaagtgacttatcacatgttcagaacaaaagtgcatttttatgtggagttatgaagacctacaggcagagagagaaacaggggagcaaggtgcaagagtccacaaagggacctgatgaagcgaagatcaaggccttgcttgagagaactggttatactctggatgtaaccacaggacagaggaagtatggtggtcctccaccagacagtgtgtactctggcgtgcaacctggaattggaacggaggtatttgtaggcaaaataccaagggatttatatgaggatgagttggtgcccctttttgagaaggccggacccatttgggatctacgtcttatgatggatccactgtccggtcagaatagagggtatgcatttatcaccttctgtggaaaggaagctgcacaggaagccgtgaaactgtgtgacagctatgaaattcgccctggtaaacaccttggagtgtgcatttctgtggcaaacaacagactttttgttggatccattccgaagaataagactaaagaaaacattttggaagaattcagtaaagtcacagagggtttggtggacgttattctctatcatcaacccgatgacaaaaagaagaatcgggggttctgcttccttgaatatgaggatcacaagtcagcagcacaagccagacgccggctgatgagtggaaaagtaaaagtgtggggaaatgtagttacagttgaatgggctgaccctgtggaagaaccagatccagaagtcatggctaaggtaaaagttttgtttgtgagaaacttggctactacggtgacagaagaaatattggaaaagtcattttctgaatttggaaaactcgaaagagtaaagaagttgaaagattatgcatttgttcattttgaagacagaggagcagctgttaaggctatggatgaaatgaatggcaaagaaatagaaggggaagaaattgaaatagtcttagccaagccaccagacaagaaaaggaaagagcgccaagctgctagacaggcctccagaagcactgcgtatgaagattattactaccaccctcctcctcgcatgccacctccaattagaggtcggggtcgtggtggggggagaggtggatatggctaccctccagattactacggctatgaagattactatgatgattactatggttatgattatcacgactatcgtggaggctatgaagatccctactacggctatgatgatggctatgcagtaagaggaagaggaggaggaaggggagggcgaggtgctccaccaccaccaagggggaggggagcaccacctccaagaggtagagctggctattcacagaggggggcacctttgggaccaccaagaggctctaggggtggcagagggggtcctgctcaacagcagagaggccgtggttcccgtggatctcggggcaatcgtgggggcaatgtaggaggcaagagaaaggcagatgggtacaaccagcctgattccaagcgtcgtcagaccaacaaccaacagaactggggttcccaacccatcgctcagcagccgcttcagcaaggtggtgactattctggtaactatggttacaataatgacaaccaggaattttatcaggatacttatgggcaacagtggaagtagacaagtaagggcttgaaaatgatactggcaagatacgattggctctagatctacattcttcaaaaaaaaaaattggcttaactgtttcatctttaagtagcattttgctgccatttgtattgggctgaagaaatcactattgtgtatatactcaagtctttttatttttcctcttttcataaatgctcttggacattattgggcttgcagagttcccttattctggggattacaatgcttttatcgtttcaggcttcattttagcttcaaaacaagctgggcacactgttaaatcatgattttgcagaacctttggttttggacagtttcatttttttggatttgggatagattacataggagtatggagtatgctgtaaataaaaatacaagctagtgctttgtcttagtagttttaagaaattaaagcaaacaaatttaagttttcttgtattgaaaataacctatgattgtatgttttgcattcctagaagtaggttaactgtgtttttaaattgttataacttcacacctttttgaaatctgccctacaaaatttgtttggcttaaacgtcaaaagccgtgacaatttgttctttgatgtgattgtatttccaatttcttgttcatgtaagatttcaataaaactaaaaaatctattcaaaa

SEQ ID NO: 13553 - DNA, 2694 bp, Homo sapiens
  source 1..2694: mol_type = unassigned DNA
gtctcagtccatcaggggggggagggggtggcgcgcgcgccatttctagtcgttttcaaagcgcctcgcgctgattctcacgggcccggctgccggcccccgctctgccctgcagcataataaaatggctaatcaggtgaatggtaatgcggtacagttaaaagaagaggaagaaccaatggatacttccagtgtaactcacacagaacactacaagacactgatagaggcaggcctcccacagaaggtggcagaaagacttgatgaaatatttcagacaggattggtagcttatgtcgatcttgatgaaagagcaattgatgctctcagggaatttaatgaagaaggagctctgtctgtactacagcagttcaaggaaagtgacttatcacatgttcagaacaaaagtgcatttttatgtggagttatgaagacctacaggcagagagagaaacaggggagcaaggtgcaagagtccacaaagggacctgatgaagcgaagatcaaggccttgcttgagagaactggttatactctggatgtaaccacaggacagaggaagtatggtggtcctccaccagacagtgtgtactctggcgtgcaacctggaattggaacggaggtatttgtaggcaaaataccaagggatttatatgaggatgagttggtgcccctttttgagaaggccggacccatttgggatctacgtcttatgatggatccactgtccggtcagaatagagggtatgcatttatcaccttctgtggaaaggaagctgcacaggaagccgtgaaactgtgtgacagctatgaaattcgccctggtaaacaccttggagtgtgcatttctgtggcaaacaacagactttttgttggatccattccgaagaataagactaaagaaaacattttggaagaattcagtaaagtcacagagggtttggtggacgttattctctatcatcaacccgatgacaaaaagaagaatcgggggttctgcttccttgaatatgaggatcacaagtcagcagcacaagccagacgccggctgatgagtggaaaagtaaaagtgtggggaaatgtagttacagttgaatgggctgaccctgtggaagaaccagatccagaagtcatggctaaggtaaaagttttgtttgtgagaaacttggctactacggtgacagaagaaatattggaaaagtcattttctgaatttggaaaactcgaaagagtaaagaagttgaaagattatgcatttgttcattttgaagacagaggagcagctgttaaggctatggatgaaatgaatggcaaagaaatagaaggggaagaaattgaaatagtcttagccaagccaccagacaagaaaaggaaagagcgccaagctgctagacaggcctccagaagcactgcgtatgaagattattactaccaccctcctcctcgcatgccacctccaattagaggtcggggtcgtggtggggggagaggtggatatggctaccctccagattactacggctatgaagattactatgatgattactatggttatgattatcacgactatcgtggaggctatgaagatccctactacggctatgatgatggctatgcagtaagaggaagaggaggaggaaggggagggcgaggtgctccaccaccaccaagggggaggggagcaccacctccaagaggtagagctggctattcacagaggggggcacctttgggaccaccaagaggctctaggggtggcagagggggtcctgctcaacagcagagaggccgtggttcccgtggatctcggggcaatcgtgggggcaatgtaggaggcaagagaaaggcagatgggtacaaccagcctgattccaagcgtcgtcagaccaacaaccaacagaactggggttcccaacccatcgctcagcagccgcttcagcaaggtggtgactattctggtaactatggttacaataatgacaaccaggaattttatcaggatacttatgggcaacagtggaagtagacaagtaagggcttgaaaatgatactggcaagatacgattggctctagatctacattcttcaaaaaaaaaaattggcttaactgtttcatctttaagtagcattttgctgccatttgtattgggctgaagaaatcactattgtgtatatactcaagtctttttatttttcctcttttcataaatgctcttggacattattgggcttgcagagttcccttattctggggattacaatgcttttatcgtttcaggcttcattttagcttcaaaacaagctgggcacactgttaaatcatgattttgcagaacctttggttttggacagtttcatttttttggatttgggatagattacataggagtatggagtatgctgtaaataaaaatacaagctagtgctttgtcttagtagttttaagaaattaaagcaaacaaatttaagttttcttgtattgaaaataacctatgattgtatgttttgcattcctagaagtaggttaactgtgtttttaaattgttataacttcacacctttttgaaatctgccctacaaaatttgtttggcttaaacgtcaaaagccgtgacaatttgttctttgatgtgattgtatttccaatttcttgttcatgtaagatttcaataaaactaaaaaatctattcaaaaca

SEQ ID NO: 13554 - DNA, 2691 bp, Homo sapiens
  source 1..2691: mol_type = unassigned DNA
caggggggggagggggtggcgcgcgcgccatttctagtcgttttcaaagcgcctcgcgctgattctcacgggcccggctgccggcccccgctctgccctgcataataaaatggctaatcaggtgaatggtaatgcggtacagttaaaagaagaggaagaaccaatggatacttccagtgtaactcacacagaacactacaagacactgatagaggcaggcctcccacagaaggtggcagaaagacttgatgaaatatttcagacaggattggtagcttatgtcgatcttgatgaaagagcaattgatgctctcagggaatttaatgaagaaggagctctgtctgtactacagcagttcaaggaaagtgacttatcacatgttcagaacaaaagtgcatttttatgtggagttatgaagacctacaggcagagagagaaacaggggagcaaggtgcaagagtccacaaagggacctgatgaagcgaagatcaaggccttgcttgagagaactggttatactctggatgtaaccacaggacagaggaagtatggtggtcctccaccagacagtgtgtactctggcgtgcaacctggaattggaacggaggtatttgtaggcaaaataccaagggatttatatgaggatgagttggtgcccctttttgagaaggccggacccatttgggatctacgtcttatgatggatccactgtccggtcagaatagagggtatgcatttatcaccttctgtggaaaggaagctgcacaggaagccgtgaaactgtgtgacagctatgaaattcgccctggtaaacaccttggagtgtgcatttctgtggcaaacaacagactttttgttggatccattccgaagaataagactaaagaaaacattttggaagaattcagtaaagtcacaggtttaacagagggtttggtggacgttattctctatcatcaacccgatgacaaaaagaagaatcgggggttctgcttccttgaatatgaggatcacaagtcagcagcacaagccagacgccggctgatgagtggaaaagtaaaagtgtggggaaatgtagttacagttgaatgggctgaccctgtggaagaaccagatccagaagtcatggctaaggtaaaagttttgtttgtgagaaacttggctactacggtgacagaagaaatattggaaaagtcattttctgaatttggaaaactcgaaagagtaaagaagttgaaagattatgcatttgttcattttgaagacagaggagcagctgttaaggctatggatgaaatgaatggcaaagaaatagaaggggaagaaattgaaatagtcttagccaagccaccagacaagaaaaggaaagagcgccaagctgctagacaggcctccagaagcactgcgtatgaagattattactaccaccctcctcctcgcatgccacctccaattagaggtcggggtcgtggtggggggagaggtggatatggctaccctccagattactacggctatgaagattactatgatgattactatggttatgattatcacgactatcgtggaggctatgaagatccctactacggctatgatgatggctatgcagtaagaggaagaggaggaggaaggggagggcgaggtgctccaccaccaccaagggggaggggagcaccacctccaagaggtagagctggctattcacagaggggggcacctttgggaccaccaagaggctctaggggtggcagagggggtcctgctcaacagcagagaggccgtggttcccgtggatctcggggcaatcgtgggggcaatgtaggaggcaagagaaaggcagatgggtacaaccagcctgattccaagcgtcgtcagaccaacaaccaacagaactggggttcccaacccatcgctcagcagccgcttcagcaaggtggtgactattctggtaactatggttacaataatgacaaccaggaattttatcaggatacttatgggcaacagtggaagtagacaagtaagggcttgaaaatgatactggcaagatacgattggctctagatctacattcttcaaaaaaaaaaattggcttaactgtttcatctttaagtagcattttgctgccatttgtattgggctgaagaaatcactattgtgtatatactcaagtctttttatttttcctcttttcataaatgctcttggacattattgggcttgcagagttcccttattctggggattacaatgcttttatcgtttcaggcttcattttagcttcaaaacaagctgggcacactgttaaatcatgattttgcagaacctttggttttggacagtttcatttttttggatttgggatagattacataggagtatggagtatgctgtaaataaaaatacaagctagtgctttgtcttagtagttttaagaaattaaagcaaacaaatttaagttttcttgtattgaaaataacctatgattgtatgttttgcattcctagaagtaggttaactgtgtttttaaattgttataacttcacacctttttgaaatctgccctacaaaatttgtttggcttaaacgtcaaaagccgtgacaatttgttctttgatgtgattgtatttccaatttcttgttcatgtaagatttcaataaaactaaaaaatctattcaaaacatta

SEQ ID NO: 13555 - DNA, 1699 bp, Homo sapiens
  source 1..1699: mol_type = unassigned DNA
tttctagtcgttttcaaagcgcctcgcgctgattctcacgggcccggctgccggcccccgctctgccctggattggtagcttatgtcgatcttgatgaaagagcaattgatgctctcagggaatttaatgaagaaggagctctgtctgtactacagcagttcaaggaaagtgacttatcacatgttcagaacaaaagtgcatttttatgtggagttatgaagacctacaggcagagagagaaacaggggagcaaggtgcaagagtccacaaagggacctgatgaagcgaagatcaaggccttgcttgagagaactggttatactctggatgtaaccacaggacagaggaagtatggtggtcctccaccagacagtgtgtactctggcgtgcaacctggaattggaacggagtgtgacagctatgaaattcgccctggtaaacaccttggagtgtgcatttctgtggcaaacaacagactttttgttggatccattccgaagaataagactaaagaaaacattttggaagaattcagtaaagtcacagagggtttggtggacgttattctctatcatcaacccgatgacaaaaagaagaatcgggggttctgcttccttgaatatgaggatcacaagtcagcagcacaagccagacgccggctgatgagtggaaaagtaaaagtgtggggaaatgtagttacagttgaatgggctgaccctgtggaagaaccagatccagaagtcatggctaaggtaaaagttttgtttgtgagaaacttggctactacggtgacagaagaaatattggaaaagtcattttctgaatttggaaaactcgaaagagtaaagaagttgaaagattatgcatttgttcattttgaagacagaggagcagctgttaaggctatggatgaaatgaatggcaaagaaatagaaggggaagaaattgaaatagtcttagccaagccaccagacaagaaaaggaaagagcgccaagctgctagacaggcctccagaagcactgcgtatgaagattattactaccaccctcctcctcgcatgccacctccaattagaggtcggggtcgtggtggggggagaggtggatatggctaccctccagattactacggctatgaagattactatgatgattactatggttatgattatcacgactatcgtggaggctatgaagatccctactacggctatgatgatggctatgcagtaagaggaagaggaggaggaaggggagggcgaggtgctccaccaccaccaagggggaggggagcaccacctccaagaggtagagctggctattcacagaggggggcacctttgggaccaccaagaggctctaggggtggcagagggggtcctgctcaacagcagagaggccgtggttcccgtggatctcggggcaatcgtgggggcaatgtaggaggcaagagaaaggcagatgggtacaaccagcctgattccaagcgtcgtcagaccaacaaccaacagaactggggttcccaacccatcgctcagcagccgcttcagcaaggtggtgactattctggtaactatggttacaataatgacaaccaggaattttatcaggatacttatgggcaacagtggaagtagacaagtaagggcttgaaaatgatactggcaagatacgattggctctagatctacattcttc

SEQ ID NO: 13556 - DNA, 2107 bp, Homo sapiens
  source 1..2107: mol_type = unassigned DNA
atttctagtcgttttcaaagcgcctcgcgctgattctcacgggcccggctgccggcccccgctctgccctgcataataaaatggctaatcaggtgaatggtaatgcggtacagttaaaagaagaggaagaaccaatggatacttccagtgtaactcacacagaacactacaagacactgatagaggcaggcctcccacagaaggtggcagaaagacttgatgaaatatttcagacaggattggtagcttatgtcgatcttgatgaaagagcaattgatgctctcagggaatttaatgaagaaggagctctgtctgtactacagcagttcaaggaaagtgacttatcacatgttcagaacaaaagtgcatttttatgtggagttatgaagacctacaggcagagagagaaacaggggagcaaggtgcaagagtccacaaagggacctgatgaagcgaagatcaaggtatttgtaggcaaaataccaagggatttatatgaggatgagttggtgcccctttttgagaaggccggacccatttgggatctacgtcttatgatggatccactgtccggtcagaatagagggtatgcatttatcaccttctgtggaaaggaagctgcacaggaagccgtgaaactgtgtgacagctatgaaattcgccctggtaaacaccttggagtgtgcatttctgtggcaaacaacagactttttgttggatccattccgaagaataagactaaagaaaacattttggaagaattcagtaaagtcacagagggtttggtggacgttattctctatcatcaacccgatgacaaaaagaagaatcgggggttctgcttccttgaatatgaggatcacaagtcagcagcacaagccagacgccggctgatgagtggaaaagtaaaagtgtggggaaatgtagttacagttgaatgggctgaccctgtggaagaaccagatccagaagtcatggctaaggtaaaagttttgtttgtgagaaacttggctactacggtgacagaagaaatattggaaaagtcattttctgaatttggaaaactcgaaagagtaaagaagttgaaagattatgcatttgttcattttgaagacagaggagcagctgttaaggctatggatgaaatgaatggcaaagaaatagaaggggaagaaattgaaatagtcttagccaagccaccagacaagaaaaggaaagagcgccaagctgctagacaggcctccagaagcactgcgtatgaagattattactaccaccctcctcctcgcatgccacctccaattagaggtcggggtcgtggtggggggagaggtggatatggctaccctccagattactacggctatgaagattactatgatgattactatggttatgattatcacgactatcgtggaggctatgaagatccctactacggctatgatgatggctatgcagtaagaggaagaggaggaggaaggggagggcgaggtgctccaccaccaccaagggggaggggagcaccacctccaagaggtagagctggctattcacagaggggggcacctttgggaccaccaagaggctctaggggtggcagagggggtcctgctcaacagcagagaggccgtggttcccgtggatctcggggcaatcgtgggggcaatgtaggaggcaagagaaaggcagatgggtacaaccagcctgattccaagcgtcgtcagaccaacaaccaacagaactggggttcccaacccatcgctcagcagccgcttcagcaaggtggtgactattctggtaactatggttacaataatgacaaccaggaattttatcaggatacttatgggcaacagtggaagtagacaagtaagggcttgaaaatgatactggcaagatacgattggctctagatctacattcttcaaaaaaaaaaattggcttaactgtttcatctttaagtagcattttgctgccatttgtattgggctgaagaaatcactattgtgtatatactcaagtctttttatttttcctcttttcataaatgctcttggacattattgggcttgcagagttcccttattctggggattacaatgct

SEQ ID NO: 13557 - DNA, 2952 bp, Homo sapiens
  source 1..2952: mol_type = unassigned DNA
gttttccgtttgggttggggagggtctcgaaaatggggatcctagggtacggagctccgtgggcttggcggtcgtgctagcccagcgtgtgggctggggggtggggagccgtgtttccagggtggggaaggaatgtccaggtgtgcggggctgcgagagttctgaggaaggaggatcctggaatatgccgctggatgcgatcctgggcgttctcctatttggatgccatggacaatattaccaggcagaaccaattctacgatacccaagtcatcaaacaagaaaacgagtcaggctacgagaggagaccactggaaatggagcagcagcaggcctatcgtccagaaatgaagacagagatgaagcaaggagcacccaccagcttcctcccgcctgaagcttctcaactcaagccagacaggcagcaattccagagtcgaaagaggccttatgaagaaaaccggggacgggggtactttgagcaccgagaggataggaggggccgctctcctcagcctcctgctgaagaggatgaagatgactttgatgatacccttgttgctattgacacctataactgcgacctccacttcaaggtggcccgagatcggagtagtggctatccgctcacaattgagggctttgcatacctgtggtcaggagcccgtgccagctatggggtcagaaggggccgtgtatgcttcgagatgaagatcaatgaggaaatctccgtgaagcaccttccgtctacagagcctgacccccacgtggtccgtatcggctggtccctggactcctgcagcacccagctaggcgaagagcctttctcctatggctatggaggcactgggaagaagtccaccaatagccggtttgaaaactacggagacaagtttgcagagaacgatgtgattggctgctttgcggattttgaatgtggaaatgacgtggaactgtcttttaccaagaatggaaagtggatgggcattgctttccgaatccagaaggaagccttggggggtcaggccctctatcctcatgtcctggtgaagaattgcgcagtggagttcaacttcggacagagagcagagccctactgttctgtcctcccggggtttaccttcatccagcaccttccccttagtgagcgtatccggggcaccgttggaccaaagagcaaggcagaatgtgagattctgatgatggtgggcctgcctgctgctggcaagaccacatgggccatcaaacatgcagcctccaacccttccaagaagtacaacatcctgggtaccaatgccatcatggataagatgcgggtgatgggcctacgccggcagcggaactatgctggccgctgggatgtcctgatccagcaggccacccagtgcctcaaccgcctcatccagattgctgcccgcaagaaacgcaactatatcctagatcagacaaatgtttatgggtcagcccagagacgaaaaatgagaccatttgaaggcttccagcgcaaagctattgtaatttgtcccactgacgaggacctaaaagaccgaacaataaagcgaaccgacgaggaagggaaggatgtcccagatcatgcggtcttagaaatgaaagccaacttcacgttgccagatgttggggacttcctggatgaggttctgttcattgagctgcagcgggaggaagcggacaagctagtgaggcagtacaacgaggaaggccgcaaggctgggccaccccctgaaaagcgctttgacaaccgaggtggtggtggcttccggggccgcgggggtggtggtggcttccagcgctatgaaaaccgaggaccccctggaggcaaccgtggcggcttccagaaccgagggggaggcagcggtggaggaggcaactaccgaggaggtttcaaccgcagcggaggtggtggctatagccagaaccgctggggtaacaacaaccgggataacaacaactccaacaacagaggcagctacaaccgggctccccagcaacagccgccaccacagcagcctccgccaccacagccaccaccccagcagccaccgccaccacccagctacagccctgctcggaaccccccaggggccagcacctacaataagaacagcaacatccctggctcaagcgccaataccagcacccccaccgtcagcagctacagccctccacagccgagttacagccagccaccctacaaccagggaggttacagccagggctacacagccccaccgcctccacctccaccaccacctgcctacaactatgggagctacggcggttacaacccggccccctataccccaccgccaccccccactgcacagacctaccctcagcccagctataaccagtatcagcagtatgcccagcagtggaaccagtactatcagaaccagggccagtggccgccatactacgggaactacgactacgggagctactccgggaacacacagggtggcacaagtacacagtagccagtgtgacccagaggctcccggaggcccctgccggcttcctccaccagcgcctgcctcggcccctcctctgcccccgccagatcccgtggtgctggggatggggtcatcccagggctgcctccctccagcccactgcctcccctctgaggggcttccttcccctccatagggccaggcatttttttctggattcaaacaggcaacaatgaccttttattttctgtttgtccccacctccccagccttccacctcctgttcttcctaccttcttcctttttgactaaataatccccacctcccttgatcatacagtgaggctacagtgactgaggggagaatcccctcctgttcactctcccaaccctgctccagcccctcagcttcccagaccctcatgcagttggttgtaaattctcccaggagctgttttactgtctacttttcaggatt

SEQ ID NO: 13558 - DNA, 1018 bp, Homo sapiens
  source 1..1018: mol_type = unassigned DNA
ctgggaggccgggccgggctcgggggccaccccgggggcccgggccatggatgtgcgccgtctgaaggtgaacgaacttcgcgaggagctgcagcgccgcggcctggacactcgaggcctcaaggccgagcttgctgagcggctgcaggcggcgttggaggccgaggagcctgacgacgagcgggagctcgacgccgacgacgaaccggggcgacccgggcacatcaacgaggaggccgagttacagccagccaccctacaaccagggaggttacagccagggctacacagccccaccgcctccacctccaccaccacctgcctacaactatgggagctacggcggttacaacccggccccctataccccaccgccaccccccactgcacagacctaccctcagcccagctataaccagtatcagcagtatgcccagcagtggaaccagtactatcagaaccagggccagtggccgccatactacgggaactacgactacgggagctactccgggaacacacagggtggcacaagtacacagtagccagtgtgacccagaggctcccggaggcccctgccggcttcctccaccagcgcctgcctcggcccctcctctgcccccgccagatcccgtggtgctggggatggggtcatcccagggctgcctccctccagcccactgcctcccctctgaggggcttccttcccctccatagggccaggcatttttttctggattcaaacaggcaacaatgaccttttattttctgtttgtccccacctccccagccttccacctcctgttcttcctaccttcttcctttttgactaaataatccccacctcccttgatcatacagtgaggctacagtgactgaggggagaatcccctcctgttcactctcccaaccctgctccagcccctcagcttcccagaccctcatgcagttggttgtaaattctcccaggagctgttttactgtctacttttcaggattaaaaaaaaaatcaaaactt

SEQ ID NO: 13559 - DNA, 3714 bp, Homo sapiens
  source 1..3714: mol_type = unassigned DNA
agaacaaatcattgtgggaagctgggaggagagagagagagaggaagtcggacgtgggcgaggggcggggtgtctggactggaacctctgggcccacatgccatggacaatattaccaggcagaaccaattctacgatacccaagtcatcaaacaagaaaacgagtcaggctacgagaggagaccactggaaatggagcagcagcaggcctatcgtccagaaatgaagacagagatgaagcaaggagcacccaccagcttcctcccgcctgaagcttctcaactcaagccagacaggcagcaattccagagtcgaaagaggccttatgaagaaaaccggggacgggggtactttgagcaccgagaggataggaggggccgctctcctcagcctcctgctgaagaggatgaagatgactttgatgatacccttgttgctattgacacctataactgcgacctccacttcaaggtggcccgagatcggagtagtggctatccgctcacaattgagggctttgcatacctgtggtcaggagcccgtgccagctatggggtcagaaggggccgtgtatgcttcgagatgaagatcaatgaggaaatctccgtgaagcaccttccgtctacagagcctgacccccacgtggtccgtatcggctggtccctggactcctgcagcacccagctaggcgaagagcctttctcctatggctatggaggcactgggaagaagtccaccaatagccggtttgaaaactacggagacaagtttgcagagaacgatgtgattggctgctttgcggattttgaatgtggaaatgacgtggaactgtcttttaccaagaatggaaagtggatgggcattgctttccgaatccagaaggaagccttggggggtcaggccctctatcctcatgtcctggtgaagaattgcgcagtggagttcaacttcggacagagagcagagccctactgttctgtcctcccggggtttaccttcatccagcaccttccccttagtgagcgtatccggggcaccgttggaccaaagagcaaggcagaatgtgagattctgatgatggtgggcctgcctgctgctggcaagaccacatgggccatcaaacatgcagcctccaacccttccaagaagtacaacatcctgggtaccaatgccatcatggataagatgcgggtgatgggcctacgccggcagcggaactatgctggccgctgggatgtcctgatccagcaggccacccagtgcctcaaccgcctcatccagattgctgcccgcaagaaacgcaactatatcctagatcagacaaatgtttatgggtcagcccagagacgaaaaatgagaccatttgaaggcttccagcgcaaagctattgtaatttgtcccactgacgaggacctaaaagaccgaacaataaagcgaaccgacgaggaagggaaggatgtcccagatcatgcggtcttagaaatgaaagccaacttcacgttgccagatgttggggacttcctggatgaggttctgttcattgagctgcagcgggaggaagcggacaagctagtgaggcagtacaacgaggaaggccgcaaggctgggccaccccctgaaaagcgctttgacaaccgaggtggtggtggcttccggggccgcgggggtggtggtggcttccagcgctatgaaaaccgaggaccccctggaggcaaccgtggcggcttccagaaccgagggggaggcagcggtggaggaggcaactaccgaggaggtttcaaccgcagcggaggtggtggctatagccagaaccgctggggtaacaacaaccgggataacaacaactccaacaacagaggcagctacaaccgggctccccagcaacagccgccaccacagcagcctccgccaccacagccaccaccccagcagccaccgccaccacccagctacagccctgctcggaaccccccaggggccagcacctacaataagaacagcaacatccctggctcaagcgccaataccagcacccccaccgtcagcagctacagccctccacagccgagttacagccagccaccctacaaccagggaggttacagccagggctacacagccccaccgcctccacctccaccaccacctgcctacaactatgggagctacggcggttacaacccggccccctataccccaccgccaccccccactgcacagacctaccctcagcccagctataaccagtatcagcagtatgcccagcagtggaaccagtactatcagaaccagggccagtggccgccatactacgggaactacgactacgggagctactccgggaacacacagggtggcacaagtacacagtagccagtgtgacccagaggctcccggaggcccctgccggcttcctccaccagcgcctgcctcggcccctcctctgcccccgccagatcccgtggtgctggggatggggtcatcccagggctgcctccctccagcccactgcctcccctctgaggggcttccttcccctccatagggccaggcatttttttctggattcaaacaggcaacaatgaccttttattttctgtttgtccccacctccccagccttccacctcctgttcttcctaccttcttcctttttgactaaataatccccacctcccttgatcatacagtgaggctacagtgactgaggggagaatcccctcctgttcactctcccaaccctgctccagcccctcagcttcccagaccctcatgcagttggttgtaaattctcccaggagctgttttactgtctacttttcaggattaaaaaaaaaatcaaaacttaaaaaaaaaaaagtttaaaaagcaaaatggggagggggaggaagcagtgacttttttttggtaattatgcgcttttttttaatttttagaatttgtctttttactgtgggtgggctgttgatatttcatcaagataagcatttctttcctgagttcaggtgactgaggaagagccacaaaacaaaacacaacaaaaccaaaccacagaatcatctttaacccaactttttatacgatgccccagttccccataactttgcacacaagcttctgtgttcagttgaattgtaactgctttttgtatttggagagagtgactattgaacttgaaaccttttattccgggcgtcttggtagtttctggtgggattcagtgggtgagagggaagaaggggaggttggggggctccttcccttcagaacttgaagtttctcccactgcctcctctccagtggtctcccaggtgccagacccaaaagcttttcctacagtgataccctttatttttacttccccttgactcatatgttttaacatgattttaacaaactgcacttattaagaaatgtgtttgccctgttttgtttggtttcgttttgttttctttgaataaatgacatggcacctcctagcaggaaggaagcagggttgaaaccctgaagtgttactgcagttggccgttaattggggtgggggcctctttaaagggaaattatttactcattcattaaacaacttaactgagggattcatgtgcctggccccgattttggtgctaaaaatgcacgcttaaacaagggtccctggtttaaaatccactagttcatttttaaagtgcttctcttgttctctacctctcacagtcta

SEQ ID NO: 13560 - DNA, 3600 bp, Homo sapiens
  source 1..3600: mol_type = unassigned DNA
atggatgtgcgccgtctgaaggtgaacgaacttcgcgaggagctgcagcgccgcggcctggacactcgaggcctcaaggccgagcttgctgagcggctgcagccaccgccgcccgggctgcagccgcacgcggagcccggcggctactcggggccggacggacattatgccatggacaatattaccaggcagaaccaattctacgatacccaagtcatcaaacaagaaaacgagtcaggctacgagaggagaccactggaaatggagcagcagcaggcctatcgtccagaaatgaagacagagatgaagcaaggagcacccaccagcttcctcccgcctgaagcttctcaactcaagccagacaggcagcaattccagagtcgaaagaggccttatgaagaaaaccggggacgggggtactttgagcaccgagaggataggaggggccgctctcctcagcctcctgctgaagaggatgaagatgactttgatgatacccttgttgctattgacacctataactgcgacctccacttcaaggtggcccgagatcggagtagtggctatccgctcacaattgagggctttgcatacctgtggtcaggagcccgtgccagctatggggtcagaaggggccgtgtatgcttcgagatgaaggattttgaatgtggaaatgacgtggaactgtcttttaccaagaatggaaagtggatgggcattgctttccgaatccagaaggaagccttggggggtcaggccctctatcctcatgtcctggtgaagaattgcgcagtggagttcaacttcggacagagagcagagccctactgttctgtcctcccggggtttaccttcatccagcaccttccccttagtgagcgtatccggggcaccgttggaccaaagagcaaggcagaatgtgagattctgatgatggtgggcctgcctgctgctggcaagaccacatgggccatcaaacatgcagcctccaacccttccaagaagtacaacatcctgggtaccaatgccatcatggataagatgcgggtgatgggcctacgccggcagcggaactatgctggccgctgggatgtcctgatccagcaggccacccagtgcctcaaccgcctcatccagattgctgcccgcaagaaacgcaactatatcctagatcagacaaatgtttatgggtcagcccagagacgaaaaatgagaccatttgaaggcttccagcgcaaagctattgtaatttgtcccactgacgaggacctaaaagaccgaacaataaagcgaaccgacgaggaagggaaggatgtcccagatcatgcggtcttagaaatgaaagccaacttcacgttgccagatgttggggacttcctggatgaggttctgttcattgagctgcagcgggaggaagcggacaagctagtgaggcagtacaacgaggaaggccgcaaggctgggccaccccctgaaaagcgctttgacaaccgaggtggtggtggcttccggggccgcgggggtggtggtggcttccagcgctatgaaaaccgaggaccccctggaggcaaccgtggcggcttccagaaccgagggggaggcagcggtggaggaggcaactaccgaggaggtttcaaccgcagcggaggtggtggctatagccagaaccgctggggtaacaacaaccgggataacaacaactccaacaacagaggcagctacaaccgggctccccagcaacagccgccaccacagcagcctccgccaccacagccaccaccccagcagccaccgccaccacccagctacagccctgctcggaaccccccaggggccagcacctacaataagaacagcaacatccctggctcaagcgccaataccagcacccccaccgtcagcagctacagccctccacagagctttggcttttttccctccactttccagccgagttacagccagccaccctacaaccagggaggttacagccagggctacacagccccaccgcctccacctccaccaccacctgcctacaactatgggagctacggcggttacaacccggccccctataccccaccgccaccccccactgcacagacctaccctcagcccagctataaccagtatcagcagtatgcccagcagtggaaccagtactatcagaaccagggccagtggccgccatactacgggaactacgactacgggagctactccgggaacacacagggtggcacaagtacacagtagccagtgtgacccagaggctcccggaggcccctgccggcttcctccaccagcgcctgcctcggcccctcctctgcccccgccagatcccgtggtgctggggatggggtcatcccagggctgcctccctccagcccactgcctcccctctgaggggcttccttcccctccatagggccaggcatttttttctggattcaaacaggcaacaatgaccttttattttctgtttgtccccacctccccagccttccacctcctgttcttcctaccttcttcctttttgactaaataatccccacctcccttgatcatacagtgaggctacagtgactgaggggagaatcccctcctgttcactctcccaaccctgctccagcccctcagcttcccagaccctcatgcagttggttgtaaattctcccaggagctgttttactgtctacttttcaggattaaaaaaaaaatcaaaacttaaaaaaaaaaaagtttaaaaagcaaaatggggagggggaggaagcagtgacttttttttggtaattatgcgcttttttttaatttttagaatttgtctttttactgtgggtgggctgttgatatttcatcaagataagcatttctttcctgagttcaggtgactgaggaagagccacaaaacaaaacacaacaaaaccaaaccacagaatcatctttaacccaactttttatacgatgccccagttccccataactttgcacacaagcttctgtgttcagttgaattgtaactgctttttgtatttggagagagtgactattgaacttgaaaccttttattccgggcgtcttggtagtttctggtgggattcagtgggtgagagggaagaaggggaggttggggggctccttcccttcagaacttgaagtttctcccactgcctcctctccagtggtctcccaggtgccagacccaaaagcttttcctacagtgataccctttatttttacttccccttgactcatatgttttaacatgattttaacaaactgcacttattaagaaatgtgtttgccctgttttgtttggtttcgttttgttttctttgaataaatgacatggcacctcctagcaggaaggaagcagggttgaaaccctgaagtgttactgcagttggccgttaattggggtgggggcctctttaaagggaaattatttactcattcattaaacaacttaactgagggattcatgtgcctggccccgattttggtgctaaaaatgcacgcttaaacaagggtccctggtttaaaatccactagttcatttttaaagtgcttctcttgttctctacctctcacagtcta

SEQ ID NO: 13561 - DNA, 4201 bp, Homo sapiens
  source 1..4201: mol_type = unassigned DNA
cagtagctcctaggccttctcgtggccgttgttttgaaaacggcgctctgattggctaggtttccgggcccgcgcccgttgccccacgcactgaccaattggcactcatgtaacatcggacgaggcacgagtgaggggggaggcggtggcggcggccattttgagccgctgccgccattggagtgggccccccccctttcccccttcgcctcctgacaggaaaggtttaagggggacagagccctgggaggccgggccgggctcgggggccaccccgggggcccgggccatggatgtgcgccgtctgaaggtgaacgaacttcgcgaggagctgcagcgccgcggcctggacactcgaggcctcaaggccgagcttgctgagcggctgcaggcggcgttggaggccgaggagcctgacgacgagcgggagctcgacgccgacgacgaaccggggcgacccgggcacatcaacgaggaggtcgagaccgaggggggctccgagctggaggggaccgcgcagccaccgccgcccgggctgcagccgcacgcggagcccggcggctactcggggccggacggacattatgccatggacaatattaccaggcagaaccaattctacgatacccaagtcatcaaacaagaaaacgagtcaggctacgagaggagaccactggaaatggagcagcagcaggcctatcgtccagaaatgaagacagagatgaagcaaggagcacccaccagcttcctcccgcctgaagcttctcaactcaagccagacaggcagcaattccagagtcgaaagaggccttatgaagaaaaccggggacgggggtactttgagcaccgagaggataggaggggccgctctcctcagcctcctgctgaagaggatgaagatgactttgatgatacccttgttgctattgacacctataactgcgacctccacttcaaggtggcccgagatcggagtagtggctatccgctcacaattgagggctttgcatacctgtggtcaggagcccgtgccagctatggggtcagaaggggccgtgtatgcttcgagatgaagatcaatgaggaaatctccgtgaagcaccttccgtctacagagcctgacccccacgtggtccgtatcggctggtccctggactcctgcagcacccagctaggcgaagagcctttctcctatggctatggaggcactgggaagaagtccaccaatagccggtttgaaaactacggagacaagtttgcagagaacgatgtgattggctgctttgcggattttgaatgtggaaatgacgtggaactgtcttttaccaagaatggaaagtggatgggcattgctttccgaatccagaaggaagccttggggggtcaggccctctatcctcatgtcctggtgaagaattgcgcagtggagttcaacttcggacagagagcagagccctactgttctgtcctcccggggtttaccttcatccagcaccttccccttagtgagcgtatccggggcaccgttggaccaaagagcaaggcagaatgtgagattctgatgatggtgggcctgcctgctgctggcaagaccacatgggccatcaaacatgcagcctccaacccttccaagaagtacaacatcctgggtaccaatgccatcatggataagatgcgggtgatgggcctacgccggcagcggaactatgctggccgctgggatgtcctgatccagcaggccacccagtgcctcaaccgcctcatccagattgctgcccgcaagaaacgcaactatatcctagatcagacaaatgtttatgggtcagcccagagacgaaaaatgagaccatttgaaggcttccagcgcaaagctattgtaatttgtcccactgacgaggacctaaaagaccgaacaataaagcgaaccgacgaggaagggaaggatgtcccagatcatgcggtcttagaaatgaaagccaacttcacgttgccagatgttggggacttcctggatgaggttctgttcattgagctgcagcgggaggaagcggacaagctagtgaggcagtacaacgaggaaggccgcaaggctgggccaccccctgaaaagcgctttgacaaccgaggtggtggtggcttccggggccgcgggggtggtggtggcttccagcgctatgaaaaccgaggaccccctggaggcaaccgtggcggcttccagaaccgagggggaggcagcggtggaggaggcaactaccgaggaggtttcaaccgcagcggaggtggtggctatagccagaaccgctggggtaacaacaaccgggataacaacaactccaacaacagaggcagctacaaccgggctccccagcaacagccgccaccacagcagcctccgccaccacagccaccaccccagcagccaccgccaccacccagctacagccctgctcggaaccccccaggggccagcacctacaataagaacagcaacatccctggctcaagcgccaataccagcacccccaccgtcagcagctacagccctccacagccgagttacagccagccaccctacaaccagggaggttacagccagggctacacagccccaccgcctccacctccaccaccacctgcctacaactatgggagctacggcggttacaacccggccccctataccccaccgccaccccccactgcacagacctaccctcagcccagctataaccagtatcagcagtatgcccagcagtggaaccagtactatcagaaccagggccagtggccgccatactacgggaactacgactacgggagctactccgggaacacacagggtggcacaagtacacagtagccagtgtgacccagaggctcccggaggcccctgccggcttcctccaccagcgcctgcctcggcccctcctctgcccccgccagatcccgtggtgctggggatggggtcatcccagggctgcctccctccagcccactgcctcccctctgaggggcttccttcccctccatagggccaggcatttttttctggattcaaacaggcaacaatgaccttttattttctgtttgtccccacctccccagccttccacctcctgttcttcctaccttcttcctttttgactaaataatccccacctcccttgatcatacagtgaggctacagtgactgaggggagaatcccctcctgttcactctcccaaccctgctccagcccctcagcttcccagaccctcatgcagttggttgtaaattctcccaggagctgttttactgtctacttttcaggattaaaaaaaaaatcaaaacttaaaaaaaaaaaagtttaaaaagcaaaatggggagggggaggaagcagtgacttttttttggtaattatgcgcttttttttaatttttagaatttgtctttttactgtgggtgggctgttgatatttcatcaagataagcatttctttcctgagttcaggtgactgaggaagagccacaaaacaaaacacaacaaaaccaaaccacagaatcatctttaacccaactttttatacgatgccccagttccccataactttgcacacaagcttctgtgttcagttgaattgtaactgctttttgtatttggagagagtgactattgaacttgaaaccttttattccgggcgtcttggtagtttctggtgggattcagtgggtgagagggaagaaggggaggttggggggctccttcccttcagaacttgaagtttctcccactgcctcctctccagtggtctcccaggtgccagacccaaaagcttttcctacagtgataccctttatttttacttccccttgactcatatgttttaacatgattttaacaaactgcacttattaagaaatgtgtttgccctgttttgtttggtttcgttttgttttctttgaataaatgacatggcacctcctagcaggaaggaagcagggttgaaaccctgaagtgttactgcagttggccgttaattggggtgggggcctctttaaagggaaattatttactcattcattaaacaacttaactgagggattcatgtgcctggccccgattttggtgctaaaaatgcacgcttaaacaagggtccctggtttaaaatccactagttcatttttaaagtgcttctcttgttctctacctctcacagtcta

SEQ ID NO: 13562 - DNA, 3596 bp, Homo sapiens
  source 1..3596: mol_type = unassigned DNA
cctggctcaaaactctaccacaacctgacactgggcaagatggcccacctgtggcatcccaggttcctgccctgtaaagaggagtctgggtgtatatccagatggactgtgagcacagcctgagtttgccctgtcgaggtgctgaggcctgggagattgggattgacaagtatctctatgccatgcggctctccgatgaaactctcatagatatcatgactcgcttcaggaaggagatgaagaatggcctctcccgggattttaatccaacagccacagtcaagatgttgccaacattcgtaaggtccattcctgatggctctgaaaagggagatttcattgccctggatcttggtgggtcttcctttcgaattctgcgggtgcaagtgaatcatgagaaaaaccagaatgttcacatggagtccgaggtttatgacaccccagagaacatcgtgcacggcagtggaagccagctttttgatcatgttgctgagtgcctgggagatttcatggagaaaaggaagatcaaggacaagaagttacctgtgggattcacgttttcttttccttgccaacaatccaaaatagatgaggccatcctgatcacctggacaaagcgatttaaagcgagcggagtggaaggagcagatgtggtcaaactgcttaacaaagccatcaaaaagcgaggggactatgatgccaacatcgtagctgtggtgaatgacacagtgggcaccatgatgacctgtggctatgacgaccagcactgtgaagtcggcctgatcatcggcactggcaccaatgcttgctacatggaggaactgaggcacattgatctggtggaaggagacgaggggaggatgtgtatcaatacagaatggggagcctttggagacgatggatcattagaagacatccggacagagtttgacagggagatagaccggggatccctcaaccctggaaaacagctgtttgagaagatggtcagtggcatgtacttgggagagctggttcgactgatcctagtcaagatggccaaggagggcctcttatttgaagggcggatcaccccggagctgctcacccgagggaagtttaacaccagtgatgtgtcagccatcgaaaagaataaggaaggcctccacaatgccaaagaaatcctgacccgcctgggagtggagccgtccgatgatgactgtgtctcagtccagcacgtttgcaccattgtctcatttcgctcagccaacttggtggctgccacactgggcgccatcttgaaccgcctgcgtgataacaagggcacacccaggctgcggaccacggttggtgtcgacggatctctttacaagacgcacccacagtattcccggcgtttccacaagactctaaggcgcttggtgccagactccgatgtgcgcttcctcctctcggagagtggcagcggcaagggggctgccatggtgacggcggtggcctaccgcttggccgagcagcaccggcagatagaggagaccctggctcatttccacctcaccaaggacatgctgctggaggtgaagaagaggatgcgggccgagatggagctggggctgaggaagcagacgcacaacaatgccgtggttaagatgctgccctccttcgtccggagaactcccgacgggaccgagaatggtgacttcttggccctggatcttggaggaaccaatttccgtgtgctgctggtgaaaatccgtagtgggaaaaagagaacggtggaaatgcacaacaagatctacgccattcctattgaaatcatgcagggcactggggaagagctgtttgatcacattgtctcctgcatctctgacttcttggactacatggggatcaaaggccccaggatgcctctgggcttcacgttctcatttccctgccagcagacgagtctggacgcgggaatcttgatcacgtggacaaagggttttaaggcaacagactgcgtgggccacgatgtagtcaccttactaagggatgcgataaaaaggagagaggaatttgacctggacgtggtggctgtggtcaacgacacagtgggcaccatgatgacctgtgcttatgaggagcccacctgtgaggttggactcattgttgggaccggcagcaatgcctgctacatggaggagatgaagaacgtggagatggtggagggggaccaggggcagatgtgcatcaacatggagtggggggcctttggggacaacgggtgtctggatgatatcaggacacactacgacagactggtggacgaatattccctaaatgctgggaaacaaaggtatgagaagatgatcagtggtatgtacctgggtgaaatcgtccgcaacatcttaatcgacttcaccaagaagggattcctcttccgagggcagatctctgagacgctgaagacccggggcatctttgagaccaagtttctctctcagatcgagagtgaccgattagcactgctccaggtccgggctatcctccagcagctaggtctgaatagcacctgcgatgacagtatcctcgtcaagacagtgtgcggggtggtgtccaggagggccgcacagctgtgtggcgcaggcatggctgcggttgtggataagatccgcgagaacagaggactggaccgtctgaatgtgactgtgggagtggacgggacactctacaagcttcatccacacttctccagaatcatgcaccagacggtgaaggaactgtcaccaaaatgtaacgtgtccttcctcctgtctgaggatggcagcggcaagggggccgccctcatcacggccgtgggcgtgcggttacgcacagaggcaagcagctaagagtccgggatccccagcctactgcctctccagcacttctctcttcaagcggcgaccccctaccctcccagcgagttgcgctgggagacgctggcgccagggcctgccggcgcggggaggaaagcaaaatccaactaatggtatatattgtagggtacagaatagagcgtgtgctgttgataatatctctcacccggatccctcctcacttgccctgccactttgcatggtttgattttgacctggtcccccacgtgtgaagtgtagtggcatccatttctaatgtatgcattcatccaacagagttatttattggctggagatggaaaatcacaccacctgacaggccttctgggcctccaaagcccatccttggggttccccctccctgtgtgaaatgtattatcaccagcagacactgccgggcctccctcccgggggcactgcctgaaggcgagtgtgggcatagcattagctgcttcctcccctcctggcacccactgtggcctggcatcgcatcgtggtgtgtcaatgccacaaaatcgtgtgtccgtggaaccagtcctagccgcgtgtgacagtcttgcattctgtttgtctcgtggggggaggtggacagtcctgcggaaatgtgtcttgtctccatttggataaaaggaaccaaccaacaaacaatgccatcactggaatttcccaccgctttgtgagccgtgtcgtatgacctagtaaactttgtaccaattc

SEQ ID NO: 13563 - DNA, 3605 bp, Homo sapiens
  source 1..3605: mol_type = unassigned DNA
gaggaggaggagccgccgagcagccgccggaggaccacggctcgccagggctgcggaggaccgaccgtccccacgcctgccgccccgcgaccccgaccgccagcatgatcgccgcgcagctcctggcctattacttcacggagctgaaggatgaccaggtcaaaaagattgacaagtatctctatgccatgcggctctccgatgaaactctcatagatatcatgactcgcttcaggaaggagatgaagaatggcctctcccgggattttaatccaacagccacagtcaagatgttgccaacattcgtaaggtccattcctgatggctctgaaaagggagatttcattgccctggatcttggtgggtcttcctttcgaattctgcgggtgcaagtgaatcatgagaaaaaccagaatgttcacatggagtccgaggtttatgacaccccagagaacatcgtgcacggcagtggaagccagctttttgatcatgttgctgagtgcctgggagatttcatggagaaaaggaagatcaaggacaagaagttacctgtgggattcacgttttcttttccttgccaacaatccaaaatagatgaggccatcctgatcacctggacaaagcgatttaaagcgagcggagtggaaggagcagatgtggtcaaactgcttaacaaagccatcaaaaagcgaggggactatgatgccaacatcgtagctgtggtgaatgacacagtgggcaccatgatgacctgtggctatgacgaccagcactgtgaagtcggcctgatcatcggcactggcaccaatgcttgctacatggaggaactgaggcacattgatctggtggaaggagacgaggggaggatgtgtatcaatacagaatggggagcctttggagacgatggatcattagaagacatccggacagagtttgacagggagatagaccggggatccctcaaccctggaaaacagctgtttgagaagatggtcagtggcatgtacttgggagagctggttcgactgatcctagtcaagatggccaaggagggcctcttatttgaagggcggatcaccccggagctgctcacccgagggaagtttaacaccagtgatgtgtcagccatcgaaaagaataaggaaggcctccacaatgccaaagaaatcctgacccgcctgggagtggagccgtccgatgatgactgtgtctcagtccagcacgtttgcaccattgtctcatttcgctcagccaacttggtggctgccacactgggcgccatcttgaaccgcctgcgtgataacaagggcacacccaggctgcggaccacggttggtgtcgacggatctctttacaagacgcacccacagtattcccggcgtttccacaagactctaaggcgcttggtgccagactccgatgtgcgcttcctcctctcggagagtggcagcggcaagggggctgccatggtgacggcggtggcctaccgcttggccgagcagcaccggcagatagaggagaccctggctcatttccacctcaccaaggacatgctgctggaggtgaagaagaggatgcgggccgagatggagctggggctgaggaagcagacgcacaacaatgccgtggttaagatgctgccctccttcgtccggagaactcccgacgggaccgagaatggtgacttcttggccctggatcttggaggaaccaatttccgtgtgctgctggtgaaaatccgtagtgggaaaaagagaacggtggaaatgcacaacaagatctacgccattcctattgaaatcatgcagggcactggggaagagctgtttgatcacattgtctcctgcatctctgacttcttggactacatggggatcaaaggccccaggatgcctctgggcttcacgttctcatttccctgccagcagacgagtctggacgcgggaatcttgatcacgtggacaaagggttttaaggcaacagactgcgtgggccacgatgtagtcaccttactaagggatgcgataaaaaggagagaggaatttgacctggacgtggtggctgtggtcaacgacacagtgggcaccatgatgacctgtgcttatgaggagcccacctgtgaggttggactcattgttgggaccggcagcaatgcctgctacatggaggagatgaagaacgtggagatggtggagggggaccaggggcagatgtgcatcaacatggagtggggggcctttggggacaacgggtgtctggatgatatcaggacacactacgacagactggtggacgaatattccctaaatgctgggaaacaaaggtatgagaagatgatcagtggtatgtacctgggtgaaatcgtccgcaacatcttaatcgacttcaccaagaagggattcctcttccgagggcagatctctgagacgctgaagacccggggcatctttgagaccaagtttctctctcagatcgagagtgaccgattagcactgctccaggtccgggctatcctccagcagctaggtctgaatagcacctgcgatgacagtatcctcgtcaagacagtgtgcggggtggtgtccaggagggccgcacagctgtgtggcgcaggcatggctgcggttgtggataagatccgcgagaacagaggactggaccgtctgaatgtgactgtgggagtggacgggacactctacaagcttcatccacacttctccagaatcatgcaccagacggtgaaggaactgtcaccaaaatgtaacgtgtccttcctcctgtctgaggatggcagcggcaagggggccgccctcatcacggccgtgggcgtgcggttacgcacagaggcaagcagctaagagtccgggatccccagcctactgcctctccagcacttctctcttcaagcggcgaccccctaccctcccagcgagttgcgctgggagacgctggcgccagggcctgccggcgcggggaggaaagcaaaatccaactaatggtatatattgtagggtacagaatagagcgtgtgctgttgataatatctctcacccggatccctcctcacttgccctgccactttgcatggtttgattttgacctggtcccccacgtgtgaagtgtagtggcatccatttctaatgtatgcattcatccaacagagttatttattggctggagatggaaaatcacaccacctgacaggccttctgggcctccaaagcccatccttggggttccccctccctgtgtgaaatgtattatcaccagcagacactgccgggcctccctcccgggggcactgcctgaaggcgagtgtgggcatagcattagctgcttcctcccctcctggcacccactgtggcctggcatcgcatcgtggtgtgtcaatgccacaaaatcgtgtgtccgtggaaccagtcctagccgcgtgtgacagtcttgcattctgtttgtctcgtggggggaggtggacagtcctgcggaaatgtgtcttgtctccatttggataaaaggaaccaaccaacaaacaatgccatcactggaatttcccaccgctttgtgagccgtgtcgtatgacctagtaaactttgtaccaattcaaa

SEQ ID NO: 13564 - DNA, 3961 bp, Homo sapiens
  source 1..3961: mol_type = unassigned DNA
aaaacatctatcttgctgtgtttggacaggccagcccctgaaacatcttgggcaatggagggttaacttctcaaagtttaataggcaagaccagcaaccatgcaacaaggacttcaactaaccaactaaagaactgttccccagagcattgttcctgagaaggaaaagagtccaaacacctacccacacctgctttgtgccaagaatccacagttggattgcaaggacagtgtatgttgtccttttggaaaaatgagagtgagcccaaatgaagaacaagcaaaggcgttcaagacccagctgttgagagtagaaaagcagaagaaaggacccgaggtcagcaagtgccctccccacaatggggcagatctgccagcgagaatcggctacagcagctgaaaaaccaaaacttcatctacttgctgaaagtgagcattgttgatgctcttgagagcatcagccaggacattaatgtgcaccactgtggtggcgtggaaagatggcaaaaagagccctgcatgattttattgacaagtatctctatgccatgcggctctccgatgaaactctcatagatatcatgactcgcttcaggaaggagatgaagaatggcctctcccgggattttaatccaacagccacagtcaagatgttgccaacattcgtaaggtccattcctgatggctctgaaaagggagatttcattgccctggatcttggtgggtcttcctttcgaattctgcgggtgcaagtgaatcatgagaaaaaccagaatgttcacatggagtccgaggtttatgacaccccagagaacatcgtgcacggcagtggaagccagctttttgatcatgttgctgagtgcctgggagatttcatggagaaaaggaagatcaaggacaagaagttacctgtgggattcacgttttcttttccttgccaacaatccaaaatagatgaggccatcctgatcacctggacaaagcgatttaaagcgagcggagtggaaggagcagatgtggtcaaactgcttaacaaagccatcaaaaagcgaggggactatgatgccaacatcgtagctgtggtgaatgacacagtgggcaccatgatgacctgtggctatgacgaccagcactgtgaagtcggcctgatcatcggcactggcaccaatgcttgctacatggaggaactgaggcacattgatctggtggaaggagacgaggggaggatgtgtatcaatacagaatggggagcctttggagacgatggatcattagaagacatccggacagagtttgacagggagatagaccggggatccctcaaccctggaaaacagctgtttgagaagatggtcagtggcatgtacttgggagagctggttcgactgatcctagtcaagatggccaaggagggcctcttatttgaagggcggatcaccccggagctgctcacccgagggaagtttaacaccagtgatgtgtcagccatcgaaaagaataaggaaggcctccacaatgccaaagaaatcctgacccgcctgggagtggagccgtccgatgatgactgtgtctcagtccagcacgtttgcaccattgtctcatttcgctcagccaacttggtggctgccacactgggcgccatcttgaaccgcctgcgtgataacaagggcacacccaggctgcggaccacggttggtgtcgacggatctctttacaagacgcacccacagtattcccggcgtttccacaagactctaaggcgcttggtgccagactccgatgtgcgcttcctcctctcggagagtggcagcggcaagggggctgccatggtgacggcggtggcctaccgcttggccgagcagcaccggcagatagaggagaccctggctcatttccacctcaccaaggacatgctgctggaggtgaagaagaggatgcgggccgagatggagctggggctgaggaagcagacgcacaacaatgccgtggttaagatgctgccctccttcgtccggagaactcccgacgggaccgagaatggtgacttcttggccctggatcttggaggaaccaatttccgtgtgctgctggtgaaaatccgtagtgggaaaaagagaacggtggaaatgcacaacaagatctacgccattcctattgaaatcatgcagggcactggggaagagctgtttgatcacattgtctcctgcatctctgacttcttggactacatggggatcaaaggccccaggatgcctctgggcttcacgttctcatttccctgccagcagacgagtctggacgcgggaatcttgatcacgtggacaaagggttttaaggcaacagactgcgtgggccacgatgtagtcaccttactaagggatgcgataaaaaggagagaggaatttgacctggacgtggtggctgtggtcaacgacacagtgggcaccatgatgacctgtgcttatgaggagcccacctgtgaggttggactcattgttgggaccggcagcaatgcctgctacatggaggagatgaagaacgtggagatggtggagggggaccaggggcagatgtgcatcaacatggagtggggggcctttggggacaacgggtgtctggatgatatcaggacacactacgacagactggtggacgaatattccctaaatgctgggaaacaaaggtatgagaagatgatcagtggtatgtacctgggtgaaatcgtccgcaacatcttaatcgacttcaccaagaagggattcctcttccgagggcagatctctgagacgctgaagacccggggcatctttgagaccaagtttctctctcagatcgagagtgaccgattagcactgctccaggtccgggctatcctccagcagctaggtctgaatagcacctgcgatgacagtatcctcgtcaagacagtgtgcggggtggtgtccaggagggccgcacagctgtgtggcgcaggcatggctgcggttgtggataagatccgcgagaacagaggactggaccgtctgaatgtgactgtgggagtggacgggacactctacaagcttcatccacacttctccagaatcatgcaccagacggtgaaggaactgtcaccaaaatgtaacgtgtccttcctcctgtctgaggatggcagcggcaagggggccgccctcatcacggccgtgggcgtgcggttacgcacagaggcaagcagctaagagtccgggatccccagcctactgcctctccagcacttctctcttcaagcggcgaccccctaccctcccagcgagttgcgctgggagacgctggcgccagggcctgccggcgcggggaggaaagcaaaatccaactaatggtatatattgtagggtacagaatagagcgtgtgctgttgataatatctctcacccggatccctcctcacttgccctgccactttgcatggtttgattttgacctggtcccccacgtgtgaagtgtagtggcatccatttctaatgtatgcattcatccaacagagttatttattggctggagatggaaaatcacaccacctgacaggccttctgggcctccaaagcccatccttggggttccccctccctgtgtgaaatgtattatcaccagcagacactgccgggcctccctcccgggggcactgcctgaaggcgagtgtgggcatagcattagctgcttcctcccctcctggcacccactgtggcctggcatcgcatcgtggtgtgtcaatgccacaaaatcgtgtgtccgtggaaccagtcctagccgcgtgtgacagtcttgcattctgtttgtctcgtggggggaggtggacagtcctgcggaaatgtgtcttgtctccatttggataaaaggaaccaaccaacaaacaatgccatcactggaatttcccaccgctttgtgagccgtgtcgtatgacctagtaaactttgtaccaattc

SEQ ID NO: 13565 - DNA, 2766 bp, Homo sapiens
  source 1..2766: mol_type = unassigned DNA
atggggcagatctgccagcgagaatcggctacagcagctgaaaaaccaaaacttcatctacttgctgaaagtgagattgacaagtatctctatgccatgcggctctccgatgaaactctcatagatatcatgactcgcttcaggaaggagatgaagaatggcctctcccgggattttaatccaacagccacagtcaagatgttgccaacattcgtaaggtccattcctgatggctctgaaaagggagatttcattgccctggatcttggtgggtcttcctttcgaattctgcgggtgcaagtgaatcatgagaaaaaccagaatgttcacatggagtccgaggtttatgacaccccagagaacatcgtgcacggcagtggaagccagctttttgatcatgttgctgagtgcctgggagatttcatggagaaaaggaagatcaaggacaagaagttacctgtgggattcacgttttcttttccttgccaacaatccaaaatagatgaggccatcctgatcacctggacaaagcgatttaaagcgagcggagtggaaggagcagatgtggtcaaactgcttaacaaagccatcaaaaagcgaggggactatgatgccaacatcgtagctgtggtgaatgacacagtgggcaccatgatgacctgtggctatgacgaccagcactgtgaagtcggcctgatcatcggcactggcaccaatgcttgctacatggaggaactgaggcacattgatctggtggaaggagacgaggggaggatgtgtatcaatacagaatggggagcctttggagacgatggatcattagaagacatccggacagagtttgacagggagatagaccggggatccctcaaccctggaaaacagctgtttgagaagatggtcagtggcatgtacttgggagagctggttcgactgatcctagtcaagatggccaaggagggcctcttatttgaagggcggatcaccccggagctgctcacccgagggaagtttaacaccagtgatgtgtcagccatcgaaaagaataaggaaggcctccacaatgccaaagaaatcctgacccgcctgggagtggagccgtccgatgatgactgtgtctcagtccagcacgtttgcaccattgtctcatttcgctcagccaacttggtggctgccacactgggcgccatcttgaaccgcctgcgtgataacaagggcacacccaggctgcggaccacggttggtgtcgacggatctctttacaagacgcacccacagtattcccggcgtttccacaagactctaaggcgcttggtgccagactccgatgtgcgcttcctcctctcggagagtggcagcggcaagggggctgccatggtgacggcggtggcctaccgcttggccgagcagcaccggcagatagaggagaccctggctcatttccacctcaccaaggacatgctgctggaggtgaagaagaggatgcgggccgagatggagctggggctgaggaagcagacgcacaacaatgccgtggttaagatgctgccctccttcgtccggagaactcccgacgggaccgagaatggtgacttcttggccctggatcttggaggaaccaatttccgtgtgctgctggtgaaaatccgtagtgggaaaaagagaacggtggaaatgcacaacaagatctacgccattcctattgaaatcatgcagggcactggggaagagctgtttgatcacattgtctcctgcatctctgacttcttggactacatggggatcaaaggccccaggatgcctctgggcttcacgttctcatttccctgccagcagacgagtctggacgcgggaatcttgatcacgtggacaaagggttttaaggcaacagactgcgtgggccacgatgtagtcaccttactaagggatgcgataaaaaggagagaggaatttgacctggacgtggtggctgtggtcaacgacacagtgggcaccatgatgacctgtgcttatgaggagcccacctgtgaggttggactcattgttgggaccggcagcaatgcctgctacatggaggagatgaagaacgtggagatggtggagggggaccaggggcagatgtgcatcaacatggagtggggggcctttggggacaacgggtgtctggatgatatcaggacacactacgacagactggtggacgaatattccctaaatgctgggaaacaaaggtatgagaagatgatcagtggtatgtacctgggtgaaatcgtccgcaacatcttaatcgacttcaccaagaagggattcctcttccgagggcagatctctgagacgctgaagacccggggcatctttgagaccaagtttctctctcagatcgagagtgaccgattagcactgctccaggtccgggctatcctccagcagctaggtctgaatagcacctgcgatgacagtatcctcgtcaagacagtgtgcggggtggtgtccaggagggccgcacagctgtgtggcgcaggcatggctgcggttgtggataagatccgcgagaacagaggactggaccgtctgaatgtgactgtgggagtggacgggacactctacaagcttcatccacacttctccagaatcatgcaccagacggtgaaggaactgtcaccaaaatgtaacgtgtccttcctcctgtctgaggatggcagcggcaagggggccgccctcatcacggccgtgggcgtgcggttacgcacagaggcaagcagctaa

SEQ ID NO: 13566 - DNA, 2980 bp, Homo sapiens
  source 1..2980: mol_type = unassigned DNA
gaggagccgccgagcagccgccggaggaccacggctcgccagggctgcggaggaccgaccgtccccacgcctgccgccccgcgaccccgaccgccagcatgatcgccgcgcagctcctggcctattacttcacggagctgaaggatgaccaggtcaaaaagattgacaagtatctctatgccatgcggctctccgatgaaactctcatagatatcatgactcgcttcaggaaggagatgaagaatggcctctcccgggattttaatccaacagccacagtcaagatgttgccaacattcgtaaggtccattcctgatggctctgaaaagggagatttcattgccctggatcttggtgggtcttcctttcgaattctgcgggtgcaagtgaatcatgagaaaaaccagaatgttcacatggagtccgaggtttatgacaccccagagaacatcgtgcacggcagtggaagccagctttttgatcatgttgctgagtgcctgggagatttcatggagaaaaggaagatcaaggacaagaagttacctgtgggattcacgttttcttttccttgccaacaatccaaaatagatgaggccatcctgatcacctggacaaagcgatttaaagcgagcggagtggaaggagcagatgtggtcaaactgcttaacaaagccatcaaaaagcgaggggactatgatgccaacatcgtagctgtggtgaatgacacagtgggcaccatgatgacctgtggctatgacgaccagcactgtgaagtcggcctgatcatcggcactggcaccaatgcttgctacatggaggaactgaggcacattgatctggtggaaggagacgaggggaggatgtgtatcaatacagaatggggagcctttggagacgatggatcattagaagacatccggacagagtttgacagggagatagaccggggatccctcaaccctggaaaacagctgtttgagaagatggtcagtggcatgtacttgggagagctggttcgactgatcctagtcaagatggccaaggagggcctcttatttgaagggcggatcaccccggagctgctcacccgagggaagtttaacaccagtgatgtgtcagccatcgaaaagaataaggaaggcctccacaatgccaaagaaatcctgacccgcctgggagtggagccgtccgatgatgactgtgtctcagtccagcacgtttgcaccattgtctcatttcgctcagccaacttggtggctgccacactgggcgccatcttgaaccgcctgcgtgataacaagggcacacccaggctgcggaccacggttggtgtcgacggatctctttacaagacgcacccacagtattcccggcgtttccacaagactctaaggcgcttggtgccagactccgatgtgcgcttcctcctctcggagagtggcagcggcaagggggctgccatggtgacggcggtggcctaccgcttggccgagcagcaccggcagatagaggagaccctggctcatttccacctcaccaaggacatgctgctggaggtgaagaagaggatgcgggccgagatggagctggggctgaggaagcagacgcacaacaatgccgtggttaagatgctgccctccttcgtccggagaactcccgacgggaccgagaatggtgacttcttggccctggatcttggaggaaccaatttccgtgtgctgctggtgaaaatccgtagtgggaaaaagagaacggtggaaatgcacaacaagatctacgccattcctattgaaatcatgcagggcactggggaagagctgtttgatcacattgtctcctgcatctctgacttcttggactacatggggatcaaaggccccaggatgcctctgggcttcacgttctcatttccctgccagcagacgagtctggacgcgggaatcttgatcacgtggacaaagggttttaaggcaacagactgcgtgggccacgatgtagtcaccttactaagggatgcgataaaaaggagagaggaatttgacctggacgtggtggctgtggtcaacgacacagtgggcaccatgatgacctgtgcttatgaggagcccacctgtgaggttggactcattgttgggaccggcagcaatgcctgctacatggaggagatgaagaacgtggagatggtggagggggaccaggggcagatgtgcatcaacatggagtggggggcctttggggacaacgggtgtctggatgatatcaggacacactacgacagactggtggacgaatattccctaaatgctgggaaacaaaggtatgagaagatgatcagtggtatgtacctgggtgaaatcgtccgcaacatcttaatcgacttcaccaagaagggattcctcttccgagggcagatctctgagacgctgaagacccggggcatctttgagaccaagtttctctctcagatcgagagtgaccgattagcactgctccaggtccgggctatcctccagcagctaggtctgaatagcacctgcgatgacagtatcctcgtcaagacagtgtgcggggtggtgtccaggagggccgcacagctgtgtggcgcaggcatggctgcggttgtggataagatccgcgagaacagaggactggaccgtctgaatgtgactgtgggagtggacgggacactctacaagcttcatccacacttctccagaatcatgcaccagacggtgaaggaactgtcaccaaaatgtaacgtgtccttcctcctgtctgaggatggcagcggcaagggggccgccctcatcacggccgtgggcgtgcggttacgcacagaggcatagcattagctgcttcctcccctcctggcacccactgtggcctggcatcgcatcgtggtgtgtcaatgccacaaaatcgtgtgtccgtggaaccagtcctagccgcgtgtgacagtcttgcattctgtttgtctcgt

SEQ ID NO: 13567 - DNA, 707 bp, Homo sapiens
  source 1..707: mol_type = unassigned DNA
gttccccagagcattgttcctgagaaggaaaagagtccaaacacctacccacacctgctttgtgccaagaatccacagttggattgcaaggacagtgtatgttgtccttttggaaaaatgagagtgagcccaaatgaagaacaagcaaaggcgttcaagacccagctgttgagagtagaaaagcagaagaaaggacccgaggtcagcaagtgccctccccacaatggggcagatctgccagcgagaatcggctacagcagctgaaaaaccaaaacttcatctacttgctgaaagtgagcattgttgatgctcttgagagcatcagccaggacattaatgtgcaccactgtggtggcgtggaaagatggcaaaaagagccctgcatgattttattgacaagtatctctatgccatgcggctctccgatgaaactctcatagatatcatgactcgcttcaggaaggagatgaagaatggcctctcccgggattttaatccaacagccacagtcaagatgttgccaacattcgtaaggtccattcctgatggctctgaaaagggagatttcattgccctggatcttggtgggtcttcctttcgaattctgcgggtgcaagtgaatcatgagaaaaaccagaatgttcacatggagtccgaggtttatgacaccccagagaacatcgtgcacggcagtggaagccagcttt

SEQ ID NO: 13568 - DNA, 1042 bp, Homo sapiens
  source 1..1042: mol_type = unassigned DNA
ccaggttgcatgaggggttgggggtgggatggacagagcactggctgggcatcaggactaggctggagtcctggctcaaaactctaccacaacctgacactgggcaagatggcccacctgtggcatcccaggttcctgccctgtaaagaggagtctgggtgtatatccagatggactgtgagcacagcctgagtttgccctgtcgaggtgctgaggcctgggagattgggattgacaagtatctctatgccatgcggctctccgatgaaactctcatagatatcatgactcgcttcaggaaggagatgaagaatggcctctcccgggattttaatccaacagccacagtcaagatgttgccaacattcgtaaggtccattcctgatggctctgaaaagggagatttcattgccctggatcttggtgggtcttcctttcgaattctgcgggtgcaagtgaatcatgagaaaaaccagaatgttcacatggagtccgaggtttatgacaccccagagaacatcgtgcacggcagtggaagccagctttttgatcatgttgctgagtgcctgggagatttcatggagaaaaggaagatcaaggacaagaagttacctgtgggattcacgttttcttttccttgccaacaatccaaaatagatgaggccatcctgatcacctggacaaagcgatttaaagcgagcggagtggaaggagcagatgtggtcaaactgcttaacaaagccatcaaaaagcgaggggactatgatgccaacatcgtagctgtggtgaatgacacagtgggcaccatgatgacctgtggctatgacgaccagcactgtgaagtcggcctgatcatcggcactggcaccaatgcttgctacatggaggaactgaggcacattgatctggtggaaggagacgaggggaggatgtgtatcaatacagaatggggagcctttggagacgatggatcattagaagacatccggacagagtttgacagggagatagaccggggatccctcaaccctggaaaacagct

SEQ ID NO: 13569 - DNA, 3992 bp, Homo sapiens
  source 1..3992: mol_type = unassigned DNA
atctatcttgctgtgtttggacaggccagcccctgaaacatcttgggcaatggagggttaacttctcaaagtttaataggcaagaccagcaaccatgcaacaagaagatactctataaatgatgattcaatgaatgccaagccctgttctatgcactgaagaccaaaagaaataaaagacatcattcctgctctgacttcaactaaccaactaaagaactgttccccagagcattgttcctgagaaggaaaagagtccaaacacctacccacacctgctttgtgccaagaatccacagttggattgcaaggacagtgcgttcaagacccagctgttgagagtagaaaagcagaagaaaggacccgaggtcagcaagtgccctccccacaatggggcagatctgccagcgagaatcgagacagggtcttgctatgttgcccaggctgttcttaaatccctggcgtcaagtgatcctcctgcctcagcctcctaaagtgctgggattacaggctacagcagctgaaaaaccaaaacttcatctacttgctgaaagtgagattgacaagtatctctatgccatgcggctctccgatgaaactctcatagatatcatgactcgcttcaggaaggagatgaagaatggcctctcccgggattttaatccaacagccacagtcaagatgttgccaacattcgtaaggtccattcctgatggctctgaaaagggagatttcattgccctggatcttggtgggtcttcctttcgaattctgcgggtgcaagtgaatcatgagaaaaaccagaatgttcacatggagtccgaggtttatgacaccccagagaacatcgtgcacggcagtggaagccagctttttgatcatgttgctgagtgcctgggagatttcatggagaaaaggaagatcaaggacaagaagttacctgtgggattcacgttttcttttccttgccaacaatccaaaatagatgaggccatcctgatcacctggacaaagcgatttaaagcgagcggagtggaaggagcagatgtggtcaaactgcttaacaaagccatcaaaaagcgaggggactatgatgccaacatcgtagctgtggtgaatgacacagtgggcaccatgatgacctgtggctatgacgaccagcactgtgaagtcggcctgatcatcggcactggcaccaatgcttgctacatggaggaactgaggcacattgatctggtggaaggagacgaggggaggatgtgtatcaatacagaatggggagcctttggagacgatggatcattagaagacatccggacagagtttgacagggagatagaccggggatccctcaaccctggaaaacagctgtttgagaagatggtcagtggcatgtacttgggagagctggttcgactgatcctagtcaagatggccaaggagggcctcttatttgaagggcggatcaccccggagctgctcacccgagggaagtttaacaccagtgatgtgtcagccatcgaaaagaataaggaaggcctccacaatgccaaagaaatcctgacccgcctgggagtggagccgtccgatgatgactgtgtctcagtccagcacgtttgcaccattgtctcatttcgctcagccaacttggtggctgccacactgggcgccatcttgaaccgcctgcgtgataacaagggcacacccaggctgcggaccacggttggtgtcgacggatctctttacaagacgcacccacagtattcccggcgtttccacaagactctaaggcgcttggtgccagactccgatgtgcgcttcctcctctcggagagtggcagcggcaagggggctgccatggtgacggcggtggcctaccgcttggccgagcagcaccggcagatagaggagaccctggctcatttccacctcaccaaggacatgctgctggaggtgaagaagaggatgcgggccgagatggagctggggctgaggaagcagacgcacaacaatgccgtggttaagatgctgccctccttcgtccggagaactcccgacgggaccgagaatggtgacttcttggccctggatcttggaggaaccaatttccgtgtgctgctggtgaaaatccgtagtgggaaaaagagaacggtggaaatgcacaacaagatctacgccattcctattgaaatcatgcagggcactggggaagagctgtttgatcacattgtctcctgcatctctgacttcttggactacatggggatcaaaggccccaggatgcctctgggcttcacgttctcatttccctgccagcagacgagtctggacgcgggaatcttgatcacgtggacaaagggttttaaggcaacagactgcgtgggccacgatgtagtcaccttactaagggatgcgataaaaaggagagaggaatttgacctggacgtggtggctgtggtcaacgacacagtgggcaccatgatgacctgtgcttatgaggagcccacctgtgaggttggactcattgttgggaccggcagcaatgcctgctacatggaggagatgaagaacgtggagatggtggagggggaccaggggcagatgtgcatcaacatggagtggggggcctttggggacaacgggtgtctggatgatatcaggacacactacgacagactggtggacgaatattccctaaatgctgggaaacaaaggtatgagaagatgatcagtggtatgtacctgggtgaaatcgtccgcaacatcttaatcgacttcaccaagaagggattcctcttccgagggcagatctctgagacgctgaagacccggggcatctttgagaccaagtttctctctcagatcgagagtgaccgattagcactgctccaggtccgggctatcctccagcagctaggtctgaatagcacctgcgatgacagtatcctcgtcaagacagtgtgcggggtggtgtccaggagggccgcacagctgtgtggcgcaggcatggctgcggttgtggataagatccgcgagaacagaggactggaccgtctgaatgtgactgtgggagtggacgggacactctacaagcttcatccacacttctccagaatcatgcaccagacggtgaaggaactgtcaccaaaatgtaacgtgtccttcctcctgtctgaggatggcagcggcaagggggccgccctcatcacggccgtgggcgtgcggttacgcacagaggcaagcagctaagagtccgggatccccagcctactgcctctccagcacttctctcttcaagcggcgaccccctaccctcccagcgagttgcgctgggagacgctggcgccagggcctgccggcgcggggaggaaagcaaaatccaactaatggtatatattgtagggtacagaatagagcgtgtgctgttgataatatctctcacccggatccctcctcacttgccctgccactttgcatggtttgattttgacctggtcccccacgtgtgaagtgtagtggcatccatttctaatgtatgcattcatccaacagagttatttattggctggagatggaaaatcacaccacctgacaggccttctgggcctccaaagcccatccttggggttccccctccctgtgtgaaatgtattatcaccagcagacactgccgggcctccctcccgggggcactgcctgaaggcgagtgtgggcatagcattagctgcttcctcccctcctggcacccactgtggcctggcatcgcatcgtggtgtgtcaatgccacaaaatcgtgtgtccgtggaaccagtcctagccgcgtgtgacagtcttgcattctgtttgtctcgtggggggaggtggacagtcctgcggaaatgtgtcttgtctccatttggataaaaggaaccaaccaacaaacaatgccatcactggaatttcccaccgctttgtgagccgtgtcgtatgacctagtaaactttgtaccaattc

SEQ ID NO: 13570 - DNA, 739 bp, Homo sapiens
  source 1..739: mol_type = unassigned DNA
agaactccagagagggaaaacatctatcttgctgtgtttggacaggccagcccctgaaacatcttgggcaatggagggttaacttctcaaagtttaataggcaagaccagcaaccatgcaacaaggacttcaactaaccaactaaagaactgttccccagagcattgttcctgagaaggaaaagagtccaaacacctacccacacctgctttgtgccaagaatccacagttggattgcaaggacagtgcgttcaagacccagctgttgagagtagaaaagcagaagaaaggacccgaggtcagcaagtgccctccccacaatggggcagatctgccagcgagaatcggctacagcagctgaaaaaccaaaacttcatctacttgctgaaagtgagattgacaagtatctctatgccatgcggctctccgatgaaactctcatagatatcatgactcgcttcaggaaggagatgaagaatggcctctcccgggattttaatccaacagccacagtcaagatgttgccaacattcgtaaggtccattcctgatggctctgaaaagggagatttcattgccctggatcttggtgggtcttcctttcgaattctgcgggtgcaagtgaatcatgagaaaaaccagaatgttcacatggagtccgaggtttatgacaccccagagaacatcgtgcacggcagtggaagccagctttttgatcatgttgctgagtgcctgggaga

SEQ ID NO: 13571 - DNA, 5772 bp, Homo sapiens
  source 1..5772: mol_type = unassigned DNA
cggccgcgcccgcgagccgtgagcgatgattggctgcgccacggcggcgggcggtccgtgggcgcacacaccctccccgcgcagccaatgggcgtgcgcacgtcactgatccggaggcccgcgggccggcagcccctcaataagccacattgttgcatgaaactccggcgcaggagtcccgggctgccgctggcaacatcgtgtcacccagctaagaaaatccgcgggcccgagccacgcgcctgtgaatcggagaggtcccactgcccgagtggagccgggctgagattcttctcaagttgagcctcagtgatcctgtggccgaagttagcgccttgacgtgggacaaccggacacgtcgccaggagagaactgaggcgccttctagcagttgtgacgccaaaatcacgtctccggagacccgcgccctccgccagccgggcgcaccctcgccggtagccttctttgtgcgccgtccggactcccagctcccggcccggcagccgagccccagcacaaagcagtcggaccgcgccgcccgcctcccctctcgcgtctccgcctcggtttcccaactctgcgccgtcgggccgcggcaggatgattgcctcgcatctgcttgcctacttcttcacggagctcaaccatgaccaagtgcagaaggttgaccagtatctctaccacatgcgcctctctgatgagaccctcttggagatctctaagcggttccgcaaggagatggagaaagggcttggagccaccactcaccctactgcagcagtgaagatgctgcccacctttgtgaggtccactccagatgggacagaacacggagagttcctggctctggatcttggagggaccaacttccgtgtgctttgggtgaaagtaacggacaatgggctccagaaggtggagatggagaatcagatctatgccatccctgaggacatcatgcgaggcagtggcacccagctgtttgaccacattgccgaatgcctggctaacttcatggataagctacaaatcaaagacaagaagctcccactgggttttaccttctcgttcccctgccaccagactaaactagacgagagtttcctggtctcatggaccaagggattcaagtccagtggagtggaaggcagagacgttgtggctctgatccggaaggccatccagaggagaggggactttgatatcgacattgtggctgtggtgaatgacacagttgggaccatgatgacctgtggttatgatgaccacaactgtgagattggtctcattgtgggcacgggcagcaacgcctgctacatggaagagatgcgccacatcgacatggtggaaggcgatgaggggcggatgtgtatcaatatggagtggggggccttcggggacgatggctcgctcaacgacattcgcactgagtttgaccaggagattgacatgggctcactgaacccgggaaagcaactgtttgagaagatgatcagtgggatgtacatgggggagctggtgaggcttatcctggtgaagatggccaaggaggagctgctctttggggggaagctcagcccagagcttctcaacaccggtcgctttgagaccaaagacatctcagacattgaaggggagaaggatggcatccggaaggcccgtgaggtcctgatgcggttgggcctggacccgactcaggaggactgcgtggccactcaccggatctgccagatcgtgtccacacgctccgccagcctgtgcgcagccaccctggccgccgtgctgcagcgcatcaaggagaacaaaggcgaggagcggctgcgctctactattggggtcgacggttccgtctacaagaaacacccccattttgccaagcgtctacataagaccgtgcggcggctggtgcccggctgcgatgtccgcttcctccgctccgaggatggcagtggcaaaggtgcagccatggtgacagcagtggcttaccggctggccgatcaacaccgtgcccgccagaagacattagagcatctgcagctgagccatgaccagctgctggaggtcaagaggaggatgaaggtagaaatggagcgaggtctgagcaaggagactcatgccagtgcccccgtcaagatgctgcccacctacgtgtgtgctaccccggacggcacagagaaaggggacttcttggccttggaccttggaggaacaaatttccgggtcctgctggtccgtgttcggaatgggaagtggggtggagtggagatgcacaacaagatctacgccatcccgcaggaggtcatgcacggcaccggggacgagctctttgaccacattgtccagtgcatcgcggacttcctcgagtacatgggcatgaagggcgtgtccctgcctctgggttttaccttctccttcccctgccagcagaacagcctggacgagagcatcctcctcaagtggacaaaaggcttcaaggcatctggctgcgagggcgaggacgtggtgaccctgctgaaggaagcgatccaccggcgagaggagtttgacctggatgtggttgctgtggtgaacgacacagtcggaactatgatgacctgtggctttgaagaccctcactgtgaagttggcctcattgttggcacgggcagcaatgcctgctacatggaggagatgcgcaacgtggaactggtggaaggagaagaggggcggatgtgtgtgaacatggaatggggggccttcggggacaatggatgcctagatgacttccgcacagaatttgatgtggctgtggatgagctttcactcaaccccggcaagcagaggttcgagaaaatgatcagtggaatgtacctgggtgagattgtccgtaacattctcatcgatttcaccaagcgtggactactcttccgaggccgcatctcagagcggctcaagacaaggggcatctttgaaaccaagttcttgtctcagattgagagtgactgcctggccctgctgcaagtccgagccatcctgcaacacttagggcttgagagcacctgtgacgacagcatcattgttaaggaggtgtgcactgtggtggcccggcgggcagcccagctctgtggcgcaggcatggccgctgtggtggacaggatacgagaaaaccgtgggctggacgctctcaaagtgacagtgggtgtggatgggaccctctacaagctacatcctcactttgccaaagtcatgcatgagacagtgaaggacctggctccgaaatgtgatgtgtctttcctgcagtcagaggatggcagcgggaagggggcggcgctcatcactgctgtggcctgccgcatccgtgaggctggacagcgatagaacccctgaaatcggaagggacttcctctttctctccttcttccctgttttaaattataagatgtcatccccttgtgtcagagacagaccccttggcttttgcttggcagagaggaccccactggactgggttttgtctctgcatctcattgtagagcttggtggctgagcttggccctattaagataaatagagttccaaataaggatttgttcacatgcatcataaccattcccattggttctcctaaaacatgaaaattatctcccttagtaatcccccttgccaaattccatgtccctgtataattctacaggatggggacactaatgaagatacggttgcttcaccttggagcctgaacatgacatttctaagtggggtgcatcccccagcactgatgttgttactgattctcctgtcagagatctgggaggtctccactgaggatgtgagcctgattatcctataggcagacgtggggagggtggaggggtgacagtggaggaaaatccatggatatccacgcagcagcccctctttaacctcatctacaagcatttgccctgtggattccagcatttgccattcctggaatcaaggaatcctgagtctgggcaatgaaaccaaagccaggagttgacgcatcctgcagttgggccagctgtcgcatctcagcggggcgcacatgttatccacaagcaatggacctttggggaagggggagtttttagtttgttttacaaatttttcctgcaaaagtggaatcactgtattttcattttaatttatatttgaaattttatttagttcttgagtagatctgcttcttcatcttgacatgtaatgaatggtcagttgtacgtaatgtatttatatgttaatttgttatgtatatagatgtgcaagtcttgtcagaattggcctcagtgtagttaaagggcagaaggggaagatactgactagtcatagaaatacctcattcgcctgtgggaagagaagggaagcctcttcagggtgagtgaatggcaaagcggttgcttctggctcctccttcccctgtggtcttggaagtgtgtggaaggcagggacagagatggaggccgagccaatagactgaagagaccacagcaattggctcctccatctagagattttcttggcagtattccatgggatgttaagcaaaggaaaccaaaggaatcgtttcaaatggactcatggcttagaaatctttattcttagggcagtcagtagtattctaaagctttctgacaagataaaggaagtcaccaaaatttctttttttaaattgtatctaatcctcaacaacaaaccaaaacagaacaattaaacagccaaataaaacctcagggacaacatttttggtgtatttgagccctcccagcaagtttcaccttgggtttgtattttaaatgttttacaagaattgtccatgtgcttccctaggctgagctggcattggtctgctgacctgtttttgtgtttttcttttttttatacacaacatttatttcaaactattgggagggatgagagtggcttaaaaacttccatccctacttttcaagagtgcagttgattctgaatctgaaagcccgcctctgtcctaaaatacaaacaagcacagacattaaacctggatactatatgataaagagggatgtaactattgaattggatacaaggatcagaatggaaagaaactcacgatgaaattgaacctggtttttgtatatttatcaaacttgtgctgagaatagtgtctgattatacgacttttaagcaaagttgggtgtaattaggtgaaaacagcccaggtcctcccgggagcacagaggggctaggggctggtccttctcgtttgctctagtcttgctttgctgtctggtgtagctcctctgctgctcccatctgcactaattgacccaaaacgtgggtatttcctgctacacaaaagccaaaaggtttcatgtagattttagttcactaaagggtgcccacaaaatagagattaattttaacttaaattttaagcttgaagattaggtactatctgtgaagttacacttttttttttttttttaaaggtagagatgtgtgtgtgtgtaggtattaaagatgtgttgttggtttccaaaaaggaacactggaaaataaattttgaatgtttatgttctcagaatcaggttgacagtcccttgctgacatggctttgctttgtgtaaatacagtggatctcaatcttcggggtgtgatgaatagcgaatcatctcaaatccttgagcactcagtctagtgaagatgttgtcattatgtacaatacataactagtttaattaactatgtgatgttaactattattaataaattttaacattttccaaaataatcaaa

SEQ ID NO: 13572 - DNA, 5278 bp, Homo sapiens
  source 1..5278: mol_type = unassigned DNA
acccgggaaggagtaggaaaggggcagaggaactccgcccgccgcgccccctccccggaactgtggcgcccggaactgaggctcggcgaggggcgtcccccattaacccccgcccctccaaatcagcctcgggaccgcccagcctcgtgtcctcaggatctgcctctgagttgaccagtatctctaccacatgcgcctctctgatgagaccctcttggagatctctaagcggttccgcaaggagatggagaaagggcttggagccaccactcaccctactgcagcagtgaagatgctgcccacctttgtgaggtccactccagatgggacagaacacggagagttcctggctctggatcttggagggaccaacttccgtgtgctttgggtgaaagtaacggacaatgggctccagaaggtggagatggagaatcagatctatgccatccctgaggacatcatgcgaggcagtggcacccagctgtttgaccacattgccgaatgcctggctaacttcatggataagctacaaatcaaagacaagaagctcccactgggttttaccttctcgttcccctgccaccagactaaactagacgagagtttcctggtctcatggaccaagggattcaagtccagtggagtggaaggcagagacgttgtggctctgatccggaaggccatccagaggagaggggactttgatatcgacattgtggctgtggtgaatgacacagttgggaccatgatgacctgtggttatgatgaccacaactgtgagattggtctcattgtgggcacgggcagcaacgcctgctacatggaagagatgcgccacatcgacatggtggaaggcgatgaggggcggatgtgtatcaatatggagtggggggccttcggggacgatggctcgctcaacgacattcgcactgagtttgaccaggagattgacatgggctcactgaacccgggaaagcaactgtttgagaagatgatcagtgggatgtacatgggggagctggtgaggcttatcctggtgaagatggccaaggaggagctgctctttggggggaagctcagcccagagcttctcaacaccggtcgctttgagaccaaagacatctcagacattgaaggggagaaggatggcatccggaaggcccgtgaggtcctgatgcggttgggcctggacccgactcaggaggactgcgtggccactcaccggatctgccagatcgtgtccacacgctccgccagcctgtgcgcagccaccctggccgccgtgctgcagcgcatcaaggagaacaaaggcgaggagcggctgcgctctactattggggtcgacggttccgtctacaagaaacacccccattttgccaagcgtctacataagaccgtgcggcggctggtgcccggctgcgatgtccgcttcctccgctccgaggatggcagtggcaaaggtgcagccatggtgacagcagtggcttaccggctggccgatcaacaccgtgcccgccagaagacattagagcatctgcagctgagccatgaccagctgctggaggtcaagaggaggatgaaggtagaaatggagcgaggtctgagcaaggagactcatgccagtgcccccgtcaagatgctgcccacctacgtgtgtgctaccccggacggcacagagaaaggggacttcttggccttggaccttggaggaacaaatttccgggtcctgctggtccgtgttcggaatgggaagtggggtggagtggagatgcacaacaagatctacgccatcccgcaggaggtcatgcacggcaccggggacgagctctttgaccacattgtccagtgcatcgcggacttcctcgagtacatgggcatgaagggcgtgtccctgcctctgggttttaccttctccttcccctgccagcagaacagcctggacgagagcatcctcctcaagtggacaaaaggcttcaaggcatctggctgcgagggcgaggacgtggtgaccctgctgaaggaagcgatccaccggcgagaggagtttgacctggatgtggttgctgtggtgaacgacacagtcggaactatgatgacctgtggctttgaagaccctcactgtgaagttggcctcattgttggcacgggcagcaatgcctgctacatggaggagatgcgcaacgtggaactggtggaaggagaagaggggcggatgtgtgtgaacatggaatggggggccttcggggacaatggatgcctagatgacttccgcacagaatttgatgtggctgtggatgagctttcactcaaccccggcaagcagaggttcgagaaaatgatcagtggaatgtacctgggtgagattgtccgtaacattctcatcgatttcaccaagcgtggactactcttccgaggccgcatctcagagcggctcaagacaaggggcatctttgaaaccaagttcttgtctcagattgagagtgactgcctggccctgctgcaagtccgagccatcctgcaacacttagggcttgagagcacctgtgacgacagcatcattgttaaggaggtgtgcactgtggtggcccggcgggcagcccagctctgtggcgcaggcatggccgctgtggtggacaggatacgagaaaaccgtgggctggacgctctcaaagtgacagtgggtgtggatgggaccctctacaagctacatcctcactttgccaaagtcatgcatgagacagtgaaggacctggctccgaaatgtgatgtgtctttcctgcagtcagaggatggcagcgggaagggggcggcgctcatcactgctgtggcctgccgcatccgtgaggctggacagcgatagaacccctgaaatcggaagggacttcctctttctctccttcttccctgttttaaattataagatgtcatccccttgtgtcagagacagaccccttggcttttgcttggcagagaggaccccactggactgggttttgtctctgcatctcattgtagagcttggtggctgagcttggccctattaagataaatagagttccaaataaggatttgttcacatgcatcataaccattcccattggttctcctaaaacatgaaaattatctcccttagtaatcccccttgccaaattccatgtccctgtataattctacaggatggggacactaatgaagatacggttgcttcaccttggagcctgaacatgacatttctaagtggggtgcatcccccagcactgatgttgttactgattctcctgtcagagatctgggaggtctccactgaggatgtgagcctgattatcctataggcagacgtggggagggtggaggggtgacagtggaggaaaatccatggatatccacgcagcagcccctctttaacctcatctacaagcatttgccctgtggattccagcatttgccattcctggaatcaaggaatcctgagtctgggcaatgaaaccaaagccaggagttgacgcatcctgcagttgggccagctgtcgcatctcagcggggcgcacatgttatccacaagcaatggacctttggggaagggggagtttttagtttgttttacaaatttttcctgcaaaagtggaatcactgtattttcattttaatttatatttgaaattttatttagttcttgagtagatctgcttcttcatcttgacatgtaatgaatggtcagttgtacgtaatgtatttatatgttaatttgttatgtatatagatgtgcaagtcttgtcagaattggcctcagtgtagttaaagggcagaaggggaagatactgactagtcatagaaatacctcattcgcctgtgggaagagaagggaagcctcttcagggtgagtgaatggcaaagcggttgcttctggctcctccttcccctgtggtcttggaagtgtgtggaaggcagggacagagatggaggccgagccaatagactgaagagaccacagcaattggctcctccatctagagattttcttggcagtattccatgggatgttaagcaaaggaaaccaaaggaatcgtttcaaatggactcatggcttagaaatctttattcttagggcagtcagtagtattctaaagctttctgacaagataaaggaagtcaccaaaatttctttttttaaattgtatctaatcctcaacaacaaaccaaaacagaacaattaaacagccaaataaaacctcagggacaacatttttggtgtatttgagccctcccagcaagtttcaccttgggtttgtattttaaatgttttacaagaattgtccatgtgcttccctaggctgagctggcattggtctgctgacctgtttttgtgtttttcttttttttatacacaacatttatttcaaactattgggagggatgagagtggcttaaaaacttccatccctacttttcaagagtgcagttgattctgaatctgaaagcccgcctctgtcctaaaatacaaacaagcacagacattaaacctggatactatatgataaagagggatgtaactattgaattggatacaaggatcagaatggaaagaaactcacgatgaaattgaacctggtttttgtatatttatcaaacttgtgctgagaatagtgtctgattatacgacttttaagcaaagttgggtgtaattaggtgaaaacagcccaggtcctcccgggagcacagaggggctaggggctggtccttctcgtttgctctagtcttgctttgctgtctggtgtagctcctctgctgctcccatctgcactaattgacccaaaacgtgggtatttcctgctacacaaaagccaaaaggtttcatgtagattttagttcactaaagggtgcccacaaaatagagattaattttaacttaaattttaagcttgaagattaggtactatctgtgaagttacacttttttttttttttttaaaggtagagatgtgtgtgtgtgtaggtattaaagatgtgttgttggtttccaaaaaggaacactggaaaataaattttgaatgtttatgttctcagaatcaggttgacagtcccttgctgacatggctttgctttgtgtaaatacagtggatctcaatcttcggggtgtgatgaatagcgaatcatctcaaatccttgagcactcagtctagtgaagatgttgtcattatgtacaatacataactagtttaattaactatgtgatgttaactattattaataaattttaacattttccaaaataatcaaa

SEQ ID NO: 13573 - DNA, 3493 bp, Homo sapiens
  source 1..3493: mol_type = unassigned DNA
aggagtcccgggctgccgctggcaacatcgtgtcacccagctaagaaaatccgcgggcccgagccacgcgcctgtgaatcggagaggtcccactgcccgagtggagccgggctgagattcttctcaagttgagcctcagtgatcctgtggccgaagttagcgccttgacgtgggacaaccggacacgtcgccaggagagaactgaggcgccttctagcagttgtgacgccaaaatcacgtctccggagacccgcgccctccgccagccgggcgcaccctcgccggtagccttctttgtgcgccgtccggactcccagctcccggcccggcagccgagccccagcacaaagcagtcggaccgcgccgcccgcctcccctctcgcgtctccgcctcggtttcccaactctgcgccgtcgggccgcggcaggatgattgcctcgcatctgcttgcctacttcttcacggagctcaaccatgaccaagtgcagaaggttgaccagtatctctaccacatgcgcctctctgatgagaccctcttggagatctctaagcggttccgcaaggagatggagaaagggcttggagccaccactcaccctactgcagcagtgaagatgctgcccacctttgtgaggtccactccagatgggacagaacacggagagttcctggctctggatcttggagggaccaacttccgtgtgctttgggtgaaagtaacggacaatgggctccagaaggtggagatggagaatcagatctatgccatccctgaggacatcatgcgaggcagtggcacccagctgtttgaccacattgccgaatgcctggctaacttcatggataagctacaaatcaaagacaagaagctcccactgggttttaccttctcgttcccctgccaccagactaaactagacgagagtttcctggtctcatggaccaagggattcaagtccagtggagtggaaggcagagacgttgtggctctgatccggaaggccatccagaggagaggggactttgatatcgacattgtggctgtggtgaatgacacagttgggaccatgatgacctgtggttatgatgaccacaactgtgagattggtctcattgtgggcacgggcagcaacgcctgctacatggaagagatgcgccacatcgacatggtggaaggcgatgaggggcggatgtgtatcaatatggagtggggggccttcggggacgatggctcgctcaacgacattcgcactgagtttgaccaggagattgacatgggctcactgaacccgggaaagcaactgtttgagaagatgatcagtgggatgtacatgggggagctggtgaggcttatcctggtgaagatggccaaggaggagctgctctttggggggaagctcagcccagagcttctcaacaccggtcgctttgagaccaaagacatctcagacattgaaggggagaaggatggcatccggaaggcccgtgaggtcctgatgcggttgggcctggacccgactcaggaggactgcgtggccactcaccggatctgccagatcgtgtccacacgctccgccagcctgtgcgcagccaccctggccgccgtgctgcagcgcatcaaggagaacaaaggcgaggagcggctgcgctctactattggggtcgacggttccgtctacaagaaacacccccattttgccaagcgtctacataagaccgtgcggcggctggtgcccggctgcgatgtccgcttcctccgctccgaggatggcagtggcaaaggtgcagccatggtgacagcagtggcttaccggctggccgatcaacaccgtgcccgccagaagacattagagcatctgcagctgagccatgaccagctgctggaggtcaagaggaggatgaaggtagaaatggagcgaggtctgagcaaggagactcatgccagtgcccccgtcaagatgctgcccacctacgtgtgtgctaccccggacggcacagagaaaggggacttcttggccttggaccttggaggaacaaatttccgggtcctgctggtccgtgttcggaatgggaagtggggtggagtggagatgcacaacaagatctacgccatcccgcaggaggtcatgcacggcaccggggacgagctctttgaccacattgtccagtgcatcgcggacttcctcgagtacatgggcatgaagggcgtgtccctgcctctgggttttaccttctccttcccctgccagcagaacagcctggacgagagcatcctcctcaagtggacaaaaggcttcaaggcatctggctgcgagggcgaggacgtggtgaccctgctgaaggaagcgatccaccggcgagaggagtttgacctggatgtggttgctgtggtgaacgacacagtcggaactatgatgacctgtggctttgaagaccctcactgtgaagttggcctcattgttggcacgggcagcaatgcctgctacatggaggagatgcgcaacgtggaactggtggaaggagaagaggggcggatgtgtgtgaacatggaatggggggccttcggggacaatggatgcctagatgacttccgcacagaatttgatgtggctgtggatgagctttcactcaaccccggcaagcagaggttcgagaaaatgatcagtggaatgtacctgggtgagattgtccgtaacattctcatcgatttcaccaagcgtggactactcttccgaggccgcatctcagagcggctcaagacaaggggcatctttgaaaccaagttcttgtctcagattgagagtgactgcctggccctgctgcaagtccgagccatcctgcaacacttagggcttgagagcacctgtgacgacagcatcattgttaaggaggtgtgcactgtggtggcccggcgggcagcccagctctgtggcgcaggcatggccgctgtggtggacaggatacgagaaaaccgtgggctggacgctctcaaagtgacagtgggtgtggatgggaccctctacaagctacatcctcactttgccaaagtcatgcatgagacagtgaaggacctggctccgaaatgtgatgtgtctttcctgcagtcagaggatggcagcgggaagggggcggcgctcatcactgctgtggcctgccgcatccgtgaggctggacagcgatagaacccctgaaatcggaagggacttcctctttctctccttcttccctgttttaaattataagatgtcatccccttgtgtcagagacagaccccttggcttttgcttggcagagaggaccccactggactgggttttgtctctgcatctcattgtagagcttggtggctgagcttggccctattaagataaatagagttccaaaaaggaacactggaaaataaattttgaatgtttatgttctcagaatcaggttgacagtcccttgctgacatggctttgctttgtgtaaatacagtggatctcaatcttc

SEQ ID NO: 13574 - DNA, 3066 bp, Homo sapiens
  source 1..3066: mol_type = unassigned DNA
gggtgcctcatattgccagacaagagctcagacctgaggagagtgactagcttctctgtgtcccaggtggccaccttccactgtggaagctcatggactccattgggtcttcagggttgcggcagggggaagaaaccctgagttgctctgaggagggcttgcccgggccctcagacagctcagagctggtgcaggagtgcctgcagcagttcaaggtgacaagggcacagctacagcagatccaagccagcctcttgggttccatggagcaggcgctgaggggacaggccagccctgcccctgcggtccggatgctgcctacatacgtggggtccaccccacatggcactgagcaaggagacttcgtggtgctggagctgggggccacaggggcctcactgcgtgttttgtgggtgactctaactggcattgaggggcatagggtggagcccagaagccaggagtttgtgatcccccaagaggtgatgctgggtgctggccagcagctctttgactttgctgcccactgcctgtctgagttcctggatgcgcagcctgtgaacaaacagggtctgcagcttggcttcagcttctctttcccttgtcaccagacgggcttggacaggagcaccctcatttcctggaccaaaggttttaggtgcagtggtgtggaaggccaggatgtggtccagctgctgagagatgccattcggaggcagggggcctacaacatcgacgtggttgctgtggtgaacgacacagtgggcaccatgatgggctgtgagccgggggtcaggccgtgtgaggttgggctagttgtagacacgggcaccaacgcgtgttacatggaggaggcacggcatgtggcagtgctggacgaagaccggggccgcgtctgcgtcagcgtcgagtggggctccttcagcgatgatggggcgctgggaccagtgctgaccaccttcgaccataccctggaccatgagtccctgaatcctggtgctcagaggtttgagaagatgatcggaggcctgtacctgggtgagctggtgcggctggtgctggctcacttggcccggtgtggggtcctctttggtggctgcacctcccctgccctgctgagccaaggcagcatcctcctggaacacgtggctgagatggaggacccctctactggggcagcccgtgtccatgctatcctgcaggacttgggcctgagccctggggcttcggatgttgagcttgtgcagcacgtctgtgcggccgtgtgcacgcgggctgcccagctctgtgctgccgccctggccgctgttctctcctgcctccagcacagccgggagcaacaaacactccaggttgctgtggccaccggaggccgagtgtgtgagcggcaccccaggttctgcagcgtcctgcaggggacagtgatgctcctggccccggaatgcgatgtctccttaatcccctctgtggatggtggtggccggggagtggcgatggtgactgccgtggctgcccgtctggctgcccaccggcgcctgctggaggagaccctggccccattccggttgaaccatgatcaactggctgcggttcaggcacagatgcggaaggccatggccaaggggctccgaggggaggcctcctcccttcgcatgctgcccactttcgtccgggccacccctgacggcagcgagcgaggggatttcctggccctggacctcgggggcacgaacttccgtgtcctcctggtacgtgtgaccacaggcgtgcagatcaccagcgagatctactccattcccgagactgtggcccagggttctgggcagcagctctttgaccacatcgtggactgcatcgtggacttccagcagaagcagggcctgagcgggcagagcctcccactgggttttaccttctccttcccatgtaggcagcttggcctagaccagggcatcctcctgaactggaccaagggtttcaaggcatcagactgcgagggccaagatgtcgtgagtctgttgcgggaagccatcactcgcagacaggcagtggagctgaatgtggttgccattgtcaatgacacggtggggaccatgatgtcctgtggctatgaggacccccgttgcgagataggcctcattgtcggaaccggcaccaatgcctgctacatggaggagctccggaatgtggcgggcgtgcctggggactcaggccgcatgtgcatcaacatggagtggggcgcctttggggacgatggctctctggccatgctcagcacccgctttgatgcaagtgtggaccaggcgtccatcaaccccggcaagcagaggtttgaaaagatgatcagcggcatgtacctgggggagatcgtccgccacatccttttacatttaaccagccttggcgttctcttccggggccagcagatccagcgccttcagaccagggacatcttcaagaccaagttcctctctgagatcgaaagtgacagcctggccctgcggcaggtccgagccatcctagaggatctggggctacccctgacctcagatgacgccctgatggtgctagaggtgtgccaggctgtgtcccagagggctgcccagctctgtggggcgggtgtagctgccgtggtggagaagatccgggagaaccggggcctggaagagctggcagtgtctgtgggggtggatggaacgctctacaagctgcacccgcgcttctccagcctggtggcggccacagtgcgggagctggcccctcgctgtgtggtcacgttcctgcagtcagaggatgggtccggcaaaggtgcggccctggtcaccgctgttgcctgccgccttgcgcagttgactcgtgtctgaggaaacctccaggctgaggaggtctccgccgcagccttgctggagccgggtcggggtctgcctgtttcccagccaggcccagccacccaggactcctgggacatcccatgtgtgacccctctgcggccatttggccttgctccctggctttccctgagagaagtagcactcaggttagcaatatatatatataatttattta

SEQ ID NO: 13575 - DNA, 2737 bp, Homo sapiens
  source 1..2737: mol_type = unassigned DNA
atttcacatcacaacgacttgtggttttaatcctccgtttttctgcttctgaagttacttcagcctggcaagtcctttacctccccgtaggcctggcgagctgcatcacaacattcaagattcaccctagagccatctgggaaactttcttctccaggtcgccctgcgtcctcgcctccccaccccgttcttctcgagtcgggtgagctgtctagttccatcacggccggcacggccgcaggggtggccggttatttactgctctactgggcccgtgaacagtctggcgagccgagcagttgccgacgcccggcacaatccgctgcacgtagcaggagcctcaggtccaggccggaagtgaaagggcagggtgtgggtcctcctggggtcgcaggcgcagagccgcctctggtcacgtgattcgccgataagtcacgggggcgccgctcacctgaccagggtctcacgtggccagccccctccgagaggggagaccagcgggccatgacaagctccaggctttggttttcgctgctgctggcggcagcgttcgcaggacgggcgacggccctctggccctggcctcagaacttccaaacctccgaccagcgctacgtcctttacccgaacaactttcaattccagtacgatgtcagctcggccgcgcagcccggctgctcagtcctcgacgaggccttccagcgctatcgtgacctgcttttcggttccgggtcttggccccgtccttacctcacagggaaacggcatacactggagaagaatgtgttggttgtctctgtagtcacacctggatgtaaccagcttcctactttggagtcagtggagaattataccctgaccataaatgatgaccagtgtttactcctctctgagactgtctggggagctctccgaggtctggagacttttagccagcttgtttggaaatctgctgagggcacattctttatcaacaagactgagattgaggactttccccgctttcctcaccggggcttgctgttggatacatctcgccattacctgccactctctagcatcctggacactctggatgtcatggcgtacaataaattgaacgtgttccactggcatctggtagatgatccttccttcccatatgagagcttcacttttccagagctcatgagaaaggggtcctacaaccctgtcacccacatctacacagcacaggatgtgaaggaggtcattgaatacgcacggctccggggtatccgtgtgcttgcagagtttgacactcctggccacactttgtcctggggaccaggtatccctggattactgactccttgctactctgggtctgagccctctggcacctttggaccagtgaatcccagtctcaataatacctatgagttcatgagcacattcttcttagaagtcagctctgtcttcccagatttttatcttcatcttggaggagatgaggttgatttcacctgctggaagtccaacccagagatccaggactttatgaggaagaaaggcttcggtgaggacttcaagcagctggagtccttctacatccagacgctgctggacatcgtctcttcttatggcaagggctatgtggtgtggcaggaggtgtttgataataaagtaaagattcagccagacacaatcatacaggtgtggcgagaggatattccagtgaactatatgaaggagctggaactggtcaccaaggccggcttccgggcccttctctctgccccctggtacctgaaccgtatatcctatggccctgactggaaggatttctacatagtggaacccctggcatttgaaggtacccctgagcagaaggctctggtgattggtggagaggcttgtatgtggggagaatatgtggacaacacaaacctggtccccaggctctggcccagagcaggggctgttgccgaaaggctgtggagcaacaagttgacatctgacctgacatttgcctatgaacgtttgtcacacttccgctgtgaattgctgaggcgaggtgtccaggcccaacccctcaatgtaggcttctgtgagcaggagtttgaacagacctgagccccaggcaccgaggagggtgctggctgtaggtgaatggtagtggagccaggcttccactgcatcctggccaggggacggagccccttgccttcgtgccccttgcctgcgtgcccctgtgcttggagagaaaggggccggtgctggcgctcgcattcaataaagagtaatgtggcatttttctataataaacatggattacctgtgtttaaaaaaaaaagtgtgaatggcgttagggtaagggcacagccaggctggagtcagtgtctgcccctgaggtcttttaagttgagggctgggaatgaaacctatagcctttgtgctgttctgccttgcctgtgagctatgtcactcccctcccactcctgaccatattccagacacctgccctaatcctcagcctgctcacttcacttctgcattatatctccaaggcgttggtatatggaaaaagatgtaggggcttggaggtgttctggacagtggggagggctccagacccaacctggtcacagaagagcctctcccccatgcatactcatccacctccctcccctagagctattctcctttgggtttcttgctgcttcaattttatacaaccattatttaaatattattaaacacatattgttctctaggc

SEQ ID NO: 13576 - DNA, 1397 bp, Homo sapiens
  source 1..1397: mol_type = unassigned DNA
agccccctccgagaggggagaccagcgggccatgacaagctccaggctttggttttcgctgctgctggcggcagcgttcgcaggacgggcgacggccctctggccctggcctcagaacttccaaacctccgaccagcgctacgtcctttacccgaacaactttcaattccagtacgatgtcagctcggccgcgcagcccggctgctcagtcctcgacgaggccttccagcgctatcgtgacctgcttttcggttccgggtcttggccccgtccttacctcacagggaaacggcatacactggagaagaatgtgttggttgtctctgtagtcacacctggatgtaaccagcttcctactttggagtcagtggagaattataccctgaccataaatgatgaccagtgtttactcctctctgagactgtctggggagctctccgaggatgtcatggcgtacaataaattgaacgtgttccactggcatctggtagatgatccttccttcccatatgagagcttcacttttccagagctcatgagaaaggggtcctacaaccctgtcacccacatctacacagcacaggatgtgaaggaggtcattgaatacgcacggctccggggtatccgtgtgcttgcagagtttgacactcctggccacactttgtcctggggaccaggtatccctggattactgactccttgctactctgggtctgagccctctggcacctttggaccagtgaatcccagtctcaataatacctatgagttcatgagcacattcttcttagaagtcagctctgtcttcccagatttttatcttcatcttggaggagatgaggttgatttcacctgctggaagtccaacccagagatccaggactttatgaggaagaaaggcttcggtgaggacttcaagcagctggagtccttctacatccagacgctgctggacatcgtctcttcttatggcaagggctatgtggtgtggcaggaggtgtttgataataaagtaaagattcagccagacacaatcatacaggtgtggcgagaggatattccagtgaactatatgaaggagctggaactggtcaccaaggccggcttccgggcccttctctctgccccctggtacctgaaccgtatatcctatggccctgactggaaggatttctacatagtggaacccctggcatttgaaggtacccctgagcagaaggctctggtgattggtggagaggcttgtatgtggggagaatatgtggacaacacaaacctggtccccaggctctggtaagggttttcgggggggaggtggagggttgggcctgagagcaggagttctcccttagagacccaatcccatctagccacctctggactagtacccttcttt

SEQ ID NO: 13577 - DNA, 1383 bp, Homo sapiens
  source 1..1383: mol_type = unassigned DNA
ctttcaattccagtacgatgtcagctcggccgcgcagcccggctgctcagtcctcgacgaggccttccagcgctatcgtgacctgcttttcggttccgggtcttggccccgtccttacctcacagggaaacggcatacactggagaagaatgtgttggttgtctctgtagtcacacctggatgtaaccagcttcctactttggagtcagtggagaattataccctgaccataaatgatgaccagtgtttactcctctctgagactgtctggggagctctccgaggtctggagacttttagccagcttgtttggaaatctgctgagggcacattctttatcaacaagactgagattgaggactttccccgctttcctcaccggggcttgctgttggatacatctcgccattacctgccactctctagcatcctggacactctggatgtcatggcgtacaataaattgaacgtgttccactggcatctggtagatgatccttccttcccatatgagagcttcacttttccagagctcatgagaaaggggtcctacaaccctgtcacccacatctacacagcacaggatgtgaaggaggtcattgaatacgcacggctccggggtatccgtgtgcttgcagagtttgacactcctggccacactttgtcctggggaccaggtatccctggattactgactccttgctactctgggtctgagccctctggcacctttggaccagtgaatcccagtctcaataatacctatgagttcatgagcacattcttcttagaagtcagctctgtcttcccagatttttatcttcatcttggaggagatgaggttgatttcacctgctggaagtccaacccagagatccaggactttatgaggaagaaaggcttcggtgaggacttcaagcagctggagtccttctacatccagacgtacccctgagcagaaggctctggtgattggtggagaggcttgtatgtggggagaatatgtggacaacacaaacctggtccccaggctctggcccagagcaggggctgttgccgaaaggctgtggagcaacaagttgacatctgacctgacatttgcctatgaacgtttgtcacacttccgctgtgaattgctgaggtaagcaagctgtggggccttcgcaaggcggagcaggccagatccagggctggggaaccccttagagagaggaagacaataattaacaatagctaacacttacagaggcttatagtcagccctcatccacggattcaaccaactgcgataaaaagtattcaggaaaaaaaaaatacaacaaaaaatggtacaaataaaaaatactgtataacaactatttacatagcatttatattgtatta

SEQ ID NO: 13578 - DNA, 1901 bp, Homo sapiens
  source 1..1901: mol_type = unassigned DNA
gcagtcatctgactcggtgactcacccgcggccgcgcttcctctgatccgggccgggcgggaagtcgggtcccgaggctccggctcggcagaccgggcggaaagcagccgagcggccatggagctgtgcgggctggggctgccccggccgcccatgctgctggcgctgctgttggcgacactgctggcggcgatgttggcgctgctgactcaggtggcgctggtggtgcaggtggcggaggcggctcgggccccgagcgtctcggccaagccggggccggcgctgtggcccctgccgctcttggtgaagatgaccccgaacctgctgcatctcgccccggagaacttctacatcagccacagccccaattccacggcgggcccctcctgcaccctgctggaggaagcgtttcgacgatatcatggctatatttttggtttctacaagtggcatcatgaacctgctgaattccaggctaaaacccaggttcagcaacttcttgtctcaatcacccttcagtcagagtgtgatgctttccccaacatatcttcagatgagtcttatactttacttgtgaaagaaccagtggctgtccttaaggccaacagagtttggggagcattacgaggtttagagacctttagccagttagtttatcaagattcttatggaactttcaccatcaatgaatccaccattattgattctccaaggttttctcacagaggaattttgattgatacatccagacattatctgccagttaagattattcttaaaactctggatgccatggcttttaataagtttaatgttcttcactggcacatagttgatgaccagtctttcccatatcagagcatcacttttcctgagttaagcaataaaggaagctattctttgtctcatgtttatacaccaaatgatgtccgtatggtgattgaatatgccagattacgaggaattcgagtcctgccagaatttgatacccctgggcatacactatcttggggaaaaggtcagaaagacctcctgactccatgttacagtagacaaaacaagttggactcttttggacctataaaccctactctgaatacaacatacagcttccttactacatttttcaaagaaattagtgaggtgtttccagatcaattcattcatttgggaggagatgaagtggaatttaaatgttgggaatcaaatccaaaaattcaagatttcatgaggcaaaaaggctttggcacagattttaagaaactagaatctttctacattcaaaaggttttggatattattgcaaccataaacaagggatccattgtctggcaggaggtttttgatgataaagcaaagcttgcgccgggcacaatagttgaagtatggaaagacagcgcatatcctgaggaactcagtagagtcacagcatctggcttccctgtaatcctttctgctccttggtacttagatttgattagctatggacaagattggaggaaatactataaagtggaacctcttgattttggcggtactcagaaacagaaacaacttttcattggtggagaagcttgtctatggggagaatatgtggatgcaactaacctcactccaagattatggcctcgggcaagtgctgttggtgagagactctggagttccaaagatgtcagagatatggatgacgcctatgacagactgacaaggcaccgctgcaggatggtcgaacgtggaatagctgcacaacctctttatgctggatattgtaaccatgagaacatgtaaaaaatggaggggaaaaaggccacagcaatctgtactacaatcaactttattttgaaatcatgtaaaataagatattagactgttttttgaataaaatatttttattgattgaa

SEQ ID NO: 13579 - DNA, 2021 bp, Homo sapiens
  source 1..2021: mol_type = unassigned DNA
gtatccttagctcggctcctcgcttccccagcggctcgccccagacattgcaccgcggaggggaggccggtcgacctctccggcgatgcccggcttctgcctgctgtgggagggcagcggcgggcaccgtgatctccgcaccgagaagagctccccttgccctctagtcgaagctcccgagtgctcggagcacgctcacccctcgcgaacacacccctgcagccgaagcagcccctgaagcccgcagcgcctgcaacaggtccggggcagtgggggaaacttacagcagtggcgactggccgcaacgcacaactgagttctagcgacggtcacgggcaaggaggcgacgaaccggtcgtctcagcccagggaagcggtggcgaatgccccggagaaaggagggccagccggggagaggactgcgccccgaacgatggctcgcggaccggctaccgatggcgttcgcctccgtctgtcgtccccacgccgcggacccggtgtccaggacccgcagagcgtctccggagcgcgtcacgatatcatggctatatttttggtttctacaagtggcatcatgaacctgctgaattccaggctaaaacccaggttcagcaacttcttgtctcaatcacccttcagtcagagtgtgatgctttccccaacatatcttcagatgagtcttatactttacttgtgaaagaaccagtggctgtccttaaggccaacagagtttggggagcattacgaggtttagagacctttagccagttagtttatcaagattcttatggaactttcaccatcaatgaatccaccattattgattctccaaggttttctcacagaggaattttgattgatacatccagacattatctgccagttaagattattcttaaaactctggatgccatggcttttaataagtttaatgttcttcactggcacatagttgatgaccagtctttcccatatcagagcatcacttttcctgagttaagcaataaaggaagctattctttgtctcatgtttatacaccaaatgatgtccgtatggtgattgaatatgccagattacgaggaattcgagtcctgccagaatttgatacccctgggcatacactatcttggggaaaaggtcagaaagacctcctgactccatgttacagtagacaaaacaagttggactcttttggacctataaaccctactctgaatacaacatacagcttccttactacatttttcaaagaaattagtgaggtgtttccagatcaattcattcatttgggaggagatgaagtggaatttaaatgttgggaatcaaatccaaaaattcaagatttcatgaggcaaaaaggctttggcacagattttaagaaactagaatctttctacattcaaaaggttttggatattattgcaaccataaacaagggatccattgtctggcaggaggtttttgatgataaagcaaagcttgcgccgggcacaatagttgaagtatggaaagacagcgcatatcctgaggaactcagtagagtcacagcatctggcttccctgtaatcctttctgctccttggtacttagatttgattagctatggacaagattggaggaaatactataaagtggaacctcttgattttggcggtactcagaaacagaaacaacttttcattggtggagaagcttgtctatggggagaatatgtggatgcaactaacctcactccaagattatggcctcgggcaagtgctgttggtgagagactctggagttccaaagatgtcagagatatggatgacgcctatgacagactgacaaggcaccgctgcaggatggtcgaacgtggaatagctgcacaacctctttatgctggatattgtaaccatgagaacatgtaaaaaatggaggggaaaaaggccacagcaatctgtactacaatcaactttattttgaaatcatgtaaaataagatattagactgttttttgaataaaatatttttattgattgaa

SEQ ID NO: 13580 - DNA, 9117 bp, Homo sapiens
  source 1..9117: mol_type = unassigned DNA
tgaggcctgaggcctggggcggggtggcggccgggctggccttggcctcgcgccttcccctgcggccgccgcgggctccgcgggcggtatcggagtgtcgtgcggcgcgtggccgcgtgacacgcgcacttgtcggagtgacgggccctgcggaagaggaggtgcggcccagggcgcaggggagccctcgggagcgggcccggccctcagcgccgccccggccgtgtcccggaggagcggcctgcgccgccgcgcgagaggaagcacccaggcatgtggaatatgctcatagtggcgatgtgcttggcccttctgggctgcctgcaagcccaggagctccagggacatgtctccataatcctgctgggagcaactggggacctggctaagaagtacttatggcagggactgttccagctgtacctggatgaagcggggaggggtcacagttttagcttccatggagctgctctgacagcccccaagcagggtcaagagctcatggccaaggccctggaatccctctcctgccccaaggacatggcacccagtcactgtgcagagcacaaggatcagttcctgcagctgagccagtaccgccaactgaagacggccgaggactatcaggccctgaacaaggacatcgaggcacagctccagcacgcaggcctccgggaggctggcaggatcttctacttctcagtgccacccttcgcctatgaagacattgcccgcaacatcaacagtagctgccggccaggcccgggcgcctggctgcgggttgtccttgagaaaccctttggccatgaccacttctcagcccagcagctggccacagaactcgggacctttttccaggaggaggagatgtaccgggtggaccattacttaggcaagcaggctgtggcgcagatcctgcctttccgagaccagaaccgcaaggctttggacggcctctggaaccggcaccatgtggagcgggtggagatcatcatgaaagagaccgtggatgctgaaggccgcaccagcttctatgaggagtacggtgtcattcgcgacgtcctccagaaccatctgacggaggtcctcaccctcgtggccatggagctgccccacaatgtcagcagtgcggaggctgtgctgcggcacaagcttcaggtcttccaggcgctgcggggcctgcagaggggcagtgccgtcgtgggccagtaccagtcttacagtgagcaggtgcgcagagagctgcagaagccagacagcttccacagcctgacgccgaccttcgcagccgtcctagtgcacattgacaaccttcgctgggagggcgtgcctttcatcctgatgtctggcaaagccttggacgagagagtgggctacgctcggatcttgttcaagaaccaggcctgctgtgtgcagagcgaaaagcactgggccgcggcgcagagccagtgcctgccccggcagctcgtcttccacatcggccatggcgacctgggcagccctgccgtgctggtcagcaggaacctgttcaggccctccctgccctccagctggaaggaaatggagggaccacctgggctccgccttttcggcagccctctgtccgattactacgcctacagccctgtgcgggagcgggacgcccactccgtcctcttatcccatatcttccatggccggaagaatttcttcatcaccacagagaacttgctggcctcctggaacttctggacccctctgctggagagcctggcccataaggccccacgcctctaccctggaggagctgagaatggccgtctgttggactttgagttcagtagcggccggttgttcttttcccagcagcagccggagcagctggtgccagggccagggccggccccaatgcccagtgacttccaggtcctcagggccaagtaccgagagagcccgctggtctccgcctggtccgaggagctgatctctaagctggctaatgacatcgaggccaccgctgtgcgagccgtgcggcgctttggccagttccacctggcactgtcggggggctcgagccccgtggccctgttccagcagctggccacggcgcactatggcttcccctgggcccacacgcacctgtggctggttgacgagcgctgcgtcccactctcagacccggagtccaacttccagggcctgcaggcccacctgctgcagcacgtccggatcccctactacaacatccaccccatgcctgtgcacctgcagcagcggctctgcgccgaggaggaccagggcgcccagatctatgccagggagatctcagccctggtggccaacagcagcttcgacctggtgctgctgggcatgggtgccgacgggcacacagcctccctcttcccacagtcacccactggcctggatggcgagcagctggtcgtgctgaccacgagcccctcccagccacaccgccgcatgagccttagcctgcctctcatcaaccgcgccaagaaggtggcagtcctggtcatgggcaggatgaagcgtgagatcaccacgctggtgagccgggtgggccatgagcccaagaagtggcccatctcgggtgtcctgccgcactccggccagctggtgtggtacatggactacgacgccttcctgggatgagggcgcctgtgccccttgcccgcttcgctcctgtgctttccttcgcccgtgtcttccctcccttctcggccccgccacctgcccagcgtgccctggctctccagaaccttctatcccacagtcaggccccagagagggcaggacaagccttgtcccgatgcctttgaccggcagctctgtgtattggtggatagatgcagaaacaaggaagaaatggagtctgctcctgagaagcttcaaattcaggccaggagagaagtcttaagaaaagacctccagcagttacacattcatatcaaccagcacaacacgggatggcgcccaaactccggcgttcacaagaggagacgtgacgtggtgggctgaggttaatcagggaaggtttcctgggggaggtgatccttgaactggctcccggggaacattcagagcatgattggtagacagaagggtgcagaggcgcccaggggagtacattgccccgtgcaaagcaggggcattggggactgtcttgagaccctgagggggtcaagcccctccttccccagctgcccctccttctagaacctctgcacatctagcctctggccctcctcttcactgcctccacctgctcccgcttgccatccctgtctcctccatcctggctgtgcagtaggaattccaggctcctccctgtgtctttgctgttcttcagactccatttatagagaatgagggctgataacaggaatacagtggcaaagactagactgtggaaagggttccagaaatcttttttcttttttaattaaaaaaaatatttgcagagatgagctcttgctatgttgcccaggctggtctcaaactcctgggctcaagcgatcctcccatctcagcctcccagagtgctgggattacaggtgtgagctactgcgcccagccccagaaatctcagtgctgtttggagctccatttctcatttgatgacttgctctgcgtggggaggtggggtctcattcccccaacttcctcagggaggacccctgccctccgctgctcctctgtcctgctagccttcctccaggaagcacactgggtgcagataatcaggacattccagagatccccaatttaagagggtcatttccatctcaggggactcccggatgggtgtttccgctctcaatagcccctcttgttttaccaggaaagatccagttaaatcacccactgaggtgacagctcattagcggggagagagatggagcatcgagtgacactgggccatccaggcggctctgctcccaccagacaggagctaggcctcactggcaggggggctgcccacagccttttcaggggctcgcttggcgggtgacggggccgcagccaggccttctctccctgccccttggtgaccccgtggcttcctgtctgctggcctctcctgctacttatcacttcaccacgaactctctgcctgagactggggaagtaagcgggtatcttctcagtgagcataggttggggactgtgatcttgagaagccatgggccagcaatacctgcttttctgaagcccccaaggagggctctgacattctttttaaaaacaccacaaagcaaaattcccaggacatgtgtagttttgtttgttcagtatcccacaacttaaggctgggagatggaactcttggttaaggtcgatttttctgtctggcttctccgcaccttccacttgctctctggatcaggcagatataaactttctagcgcattttgagagagggctttcttgggtgagggagcatggcaaagtcggtttctctctggactgtttacacttcaaggcggtggatttagaggaatcctggctttcattttcaatgccagtctgagacatgttcccaagccggggctcttgttcacaccacttactctggccaccaacaacaacccaggccagacagagcatctcttttttttttttttgagacagagtctctgtcgcccaggctggagcccagtggcgagatcttggctcactacaacctccacctcccgggttcaggcaattctcgtgcctaagcctcccgagtagctgcgactacaggcgccggccagcatgcctgtctaatttttgtattttagtagagacagggtttcaccatgttgcccaggctggtctcgaactcctgagctcaggcagtctacccacctcagcctcccaaagtgctgggattacaggcgtgagccaccgcgcccagccagaacatctgtttttacacccagagagcgcccctcgttaggacagaaccacggtgcccagagccaggaagccgccctcctggcgcccagcatctgagcttctacacgtgatgggcgggctcaggagaggacagggagtcgtggtggaagttccacagctggccgcgtgggggggcccttgcaccgcactgccgcctcctgactgcccctatccccgcagcccctgtgccggatttcatttccctcctctctcccagggtacctggccccagcactctcccatctgttcttcaggaaccgactcctctccagttgcaacaccagggagaaaggggcctccacatgcccaagtacccctgcaggatgaagggcaggccggcccttgatgtgccatttctgaataatagtcactgccgccgagtctaggatgtcctgttctaactcagccctgcctcggatgcaccaccgatctgtgcagagtgggtgtgggagtgtgggtgagggtcgaaatgccaaaggtctactttccagaatcaagtgccttctgcaaatcatgttggaaaagtccaaacctggagatgtccctgtgcctccgcccctacccaccccttttccttcagctgtgttaggaaggagaagttttcagaaccctctaggctggtggctttcaaacttcagaccatgatctgcagcaagaaacgtgccttccatcataaatcagtccatttgtttacaactgtgttccaagcaggtttcataaagaaattcttaaccttagaacctcggatatcctctatgttttagttttcatttttttaaaatgcttcttaaaattcactaaattgggctaggtgtggctcatgcctgtaatcccagcactatgggaggctgaggtgagaggatcacttgagcccagaaggttgaaaccagcctgggcaacatagtgagaccccatctctacaaaaagttttaaaaccaggtatggtggtgccctcctgtggtcccagctactcgggagtctgaggtgggaggatcacctgagcccaggagactgaggctgcagtaaggtgtgattgcactattgctctctagcctggaaaacagagtgagaccctatctcaaaaaaaaaaaaaaaaaaaaaggaaagagtgatgacaacagcccagggagcagccccgctcagaacccaagtcccaagttccagcactgtgttcccaggcaggctgtttgcctcttcctggtctggaagcccttgggtcctatggtggcggcagctcccacagtccaggttccctggtggggaccaatgattccatccgcatggaagcccacgtgtgcacttaggggcccataaatggcagaagggcccctcctttgggagaccttgtcagtcagcatctctagggcaaccgtgattgccatttgtagaggggaaggaatcaagggactttaagctagatcaaaatctggggacaaattctcctgctaactgcaagttaaaataggcccttcttactgaatttccctgtttgtttctctgcagacaatgctttagccctactcttgggcccccaagttagcagagtaatcaaagcttcctaccgtttggcctactattccagactagtccctcgaggggttcccttccaaaatatgcagggctcaggctcccaattccgggcctgtctgctttgcttgtgtttctcctgtccctgttctcccggagggcccaggtggaactcacgacagggagggagacgcttcccaaaaacctgcagggctatttcccagaatttggttttcaagtacaaaactttttgtcctgtaagatatatgcagcctcacagaagcagcctctgcctccactttaccagctacgtttttatcttaagcacatggggctcccttagaacttactccactgatttaaaaaaaaaaaactgcctggcagcatctcagtgtcagagtgagcacggcacaggaaaggcccgtggtgacgagggtgaggtggccacagtgaccggacgacaaatgagactctgcaaatgagactccagagggtgaagatctgcggtctccagacatcataggccatgtgacccactaggggccgcttacccctggccgtccgctggctgaactgaacgcattccctctctccgcaactctcccgtgaggctgcacccgtgtgggtagcactggaagcggcactgtttgcattgtacataggaaggaaggaagttcttccagcctcaccagcacctggcagcgagtcagagcctgtgagggcatccgaagcagtgatgcagtgtcaacctcccagctggtgccactctgccctcgggggctccaagcattgtaactcagtcatgggagctgcctctttggaagtgcagatttattcctgtaataatcctgcctgcttttacctctcgtccactgaccagcaagtgtgagtcccggtgtcagtcggcacagtccagtgtccatctgcatttgctcatgcagagggggtgagttgggcactccctgttgttggttttccttttgcagcacactgggcagtctccctataaaacaaaaaccccaccttctgtgccttctgctttagagcagagctccccctcccatttcctcagtcttccctgcaaaatctgtccaccggggaaggcagcaggaaccctgggcagcgggtgttctgggaaggctagtgacagcagatgtcatccaggaacagccacacacggttctccaggccgccgtcagcagctcaaggtggggtatgagtgagaagctgaggatctcgcagcttgttgctgagcaaggtgcaaccgggctcatgctgtcatcagcacaagacgggatggcaagggctttcagacgcatttccaagagtccagcaagccagggggaagatgatccctttgccgaagtgtaccctctagccaacttttgggagcgcttctgtttgcaaagcgctggggatgtgcctgtctctgtgtgacccacgaacgggaagggagagcactggagtaatgacacttctgctgctgctttgattctcaaggctgatctttaaaaccctcgccttgctgacaggtgctttaaaggcagtctgcatcttttcttcccttggtgtgggagaggtaaacactttgatttgctgaaagctgtatggagtatatttgaacagctagtagttagctttgaaagtggaagtgtgaacagacactacttgtgtcgctttgggtccttcactttacccccacagaagtctagaggcgtctgttataaagcgttacggggcgcctgcatgcaggaggaaggacctgtattagctggaaatcatcaggaacccagcttgcctccatctctctgagatgtgctgggtacagcctgcccctcctagttctgtccaccgggaagagccggctggcggcagatccccaggggcagagcccctgctggatcctgggagctcatctttacctgtgccggagtgggaactgtgattccagccgggcaggtcagagtggagcagtgctaagaggctgttgcaggagaactagacgggcggggcctgctgcatctggatcatgtttctgtgctctgccccgcgctagggactcagggtctgggcttctgccaggtgaggagcagagagactgttcccttgggtggagaggtgtgggcatgagagccacccattgccaagcagcaagaatgttcgtgcttttttccagagaggggaaccccactggtttttgtggaaacaatggaaacttacagatgcctgcctgggatgatgaggcacattcagaacaaatgcttttttttttttgagacagagtctcgctctgacgcccaggctggagtgcagtggcgcgatctcggctcactgcaaactttgcctcccaggttcaagtgattctcctacctcagcctcccgagtagctgggattacaccaccatgcccagcaaatttttgtgtttttagtagagacggagtttcaccatgttggccaggctggtctcgaactcctgacctcaggtgatccatccgccttggcctcccaaagtgctgggattacaggcgggagccaccatgcctggccagaacaaatgcctttttaaaccttttaagaacatttttaaaatgtctttttctatgtcaaatgtaacgtttatttttttaaacaataaaattgatttgccaaaa

SEQ ID NO: 13581 - DNA, 2148 bp, Homo sapiens
  source 1..2148: mol_type = unassigned DNA
ggcccgcctgacgtgggaggcagccagggttaatcatttccacgaagccttgaccccacctgccttggccgctctgctcccgcctcccactgcccctcaggccagctcaggagccatggggcgctgggcctgggtccccagcccctggcccccaccggggctgggccccttcctcctcctcctcctgctgctgctgctgctgccacgggggttccagccccagcctggcgggaaccgtacggagtccccagaacctaatgccacagcgacccctgcgatccccactatcctggtgacctctgtgacctctgagaccccagcaacaagtgctccagaggcagagggaccccaaagtggggggctcccgcccccgcccagggcagttccctcgagcagtagcccccaggcccaagcactcaccgaggacgggaggccctgcaggttccccttccgctacgggggccgcatgctgcatgcctgcacttcggagggcagtgcacacaggaagtggtgtgccacaactcacaactacgaccgggacagggcctggggctactgtgtggaggccaccccgcctccagggggcccagctgccctggatccctgtgcctccggcccctgcctcaatggaggctcctgctccaatacccaggacccccagtcctatcactgcagctgcccccgggccttcaccggcaaggactgcggcacagagaaatgctttgatgagacccgctacgagtacctggaggggggcgaccgctgggcccgcgtgcgccagggccacgtggaacagtgcgagtgcttcgggggccggacctggtgcgaaggcacccgacatacagcttgtctgagcagcccttgcctgaacgggggcacctgccacctgatcgtggccaccgggaccaccgtgtgtgcctgcccaccaggcttcgctggacggctctgcaacatcgagcctgatgagcgctgcttcttggggaacggcactgggtaccgtggcgtggccagcacctcagcctcgggcctcagctgcctggcctggaactccgatctgctctaccaggagctgcacgtggactccgtgggcgccgcggccctgctgggcctgggcccccatgcctactgccggaatccggacaatgacgagaggccctggtgctacgtggtgaaggacagcgcgctctcctgggagtactgccgcctggaggcctgcgaatccctcaccagagtccaactgtcaccggatctcctggcgaccctgcctgagccagcctccccggggcgccaggcctgcggcaggaggcacaagaagaggacgttcctgcggccacgtatcatcggcggctcctcctcgctgcccggctcgcacccctggctggccgccatctacatcggggacagcttctgcgccgggagcctggtccacacctgctgggtggtgtcggccgcccactgcttctcccacagcccccccagggacagcgtctccgtggtgctgggccagcacttcttcaaccgcacgacggacgtgacgcagaccttcggcatcgagaagtacatcccgtacaccctgtactcggtgttcaaccccagcgaccacgacctcgtcctgatccggctgaagaagaaaggggaccgctgtgccacacgctcgcagttcgtgcagcccatctgcctgcccgagcccggcagcaccttccccgcaggacacaagtgccagattgcgggctggggccacttggatgagaacgtgagcggctactccagctccctgcgggaggccctggtccccctggtcgccgaccacaagtgcagcagccctgaggtctacggcgccgacatcagccccaacatgctctgtgccggctacttcgactgcaagtccgacgcctgccagggggactcaggggggcccctggcctgcgagaagaacggcgtggcttacctctacggcatcatcagctggggtgacggctgcgggcggctccacaagccgggggtctacacccgcgtggccaactatgtggactggatcaacgaccggatacggcctcccaggcggcttgtggctccctcctgaccctccagcgggacaccctggttcccaccattccctgccttgctgacaataaagatatttccaag

SEQ ID NO: 13582 - DNA, 4571 bp, Homo sapiens
  source 1..4571: mol_type = unassigned DNA
tttgccaactgcttcctggctcagtgcgacctggccttcttcccctcccccatgcggccggcttccgagtgcgcaagcccagagtcgtccgcgttgtccgcctctgcgcaagcgccgtgctcctcccacggcagttggccatatagaggctgggggtggggggggaggtcaagcgtagcctcttctcctttaccaagatggcggcttgtccctgtttcgccacagttcctaccttatgagctcggttttcttatgcttataagagtggaacagcaaaagctggcaggctgacagaggcggcctcaggacggaccttctggctactgaccgttttgctgtggttttcccggattgtgtgtaggtgtgagatcaaccatgagttccgttgcagttttgacccaagagagttttgctgaacaccgaagtgggctggttccgcaacaaatcaaagttgccactctaaattcagaagaggagagcgaccctccaacctacaaggatgccttccctccacttcctgagaaagctgcttgcctggaaagtgcccaggaaccctctggagcctgggggaacaagatccgacccatcaaggcttctgtcatcactcaggtgttccatgtacccctggaggagagaaaatacaaggatatgaaccagtttggagaaggtgaacaagcaaaaatctgccttgagatcatgcagagaactggtgctcacttggagctgtctttggccaaagaccaaggcctctccatcatggtgtcaggaaagctggatgctgtcatgaaagctcggaaggacattgttgctagactgcagactcaggcctcagcaactgttgccattcccaaagaacaccatcgctttgttattggcaaaaatggagagaaactgcaagacttggagctaaaaactgcaaccaaaatccagatcccacgcccagatgaccccagcaatcagatcaagatcactggcaccaaagagggcatcgagaaagctcgccatgaagtcttactcatctctgccgagcaggacaaacgtgctgtggagaggctagaagtagaaaaggcattccaccccttcatcgctgggccgtataatagactggttggcgagatcatgcaggagacaggcacgcgcatcaacatccccccacccagcgtgaaccggacagagattgtcttcactggagagaaggaacagttggctcaggctgtggctcgcatcaagaagatttatgaggagaagaaaaagaagactacaaccattgcagtggaagtgaagaaatcccaacacaagtatgtcattgggcccaagggcaattcattgcaggagatccttgagagaactggagtttccgttgagatcccaccctcagacagcatctctgagactgtaatacttcgaggcgaacctgaaaagttaggtcaggcgttgactgaagtctatgccaaggccaatagcttcaccgtctcctctgtcgccgccccttcctggcttcaccgtttcatcattggcaagaaagggcagaacctggccaaaatcactcagcagatgccaaaggttcacatcgagttcacagagggcgaagacaagatcaccctggagggccctacagaggatgtcaatgtggcccaggaacagatagaaggcatggtcaaagatttgattaaccggatggactatgtggagatcaacatcgaccacaagttccacaggcacctcattgggaagagcggtgccaacataaacagaatcaaagaccagtacaaggtgtccgtgcgcatccctcctgacagtgagaagagcaatttgatccgcatcgagggggacccacagggcgtgcagcaggccaagcgagagctgctggagcttgcatctcgcatggaaaatgagcgtaccaaggatctaatcattgagcaaagatttcatcgcacaatcattgggcagaagggtgaacggatccgtgaaattcgtgacaaattcccagaggtcatcattaactttccagacccagcacaaaaaagtgacattgtccagctcagaggacctaagaatgaggtggaaaaatgcacaaaatacatgcagaagatggtggcagatctggtggaaaatagctattcaatttctgttccgatcttcaaacagtttcacaagaatatcattgggaaaggaggcgcaaacattaaaaagattcgtgaagaaagcaacaccaaaatcgaccttccagcagagaatagcaattcagagaccattatcatcacaggcaagcgagccaactgcgaagctgcccggagcaggattctgtctattcagaaagacctggccaacatagccgaggtagaggtctccatccctgccaagctgcacaactccctcattggcaccaagggccgtctgatccgctccatcatggaggagtgcggcggggtccacattcactttcccgtggaaggttcaggaagcgacaccgttgttatcaggggcccttcctcggatgtggagaaggccaagaagcagctcctgcatctggcggaggagaagcaaaccaagagtttcactgttgacatccgcgccaagccagaataccacaaattcctcatcggcaaggggggcggcaaaattcgcaaggtgcgcgacagcactggagcacgtgtcatcttccctgcggctgaggacaaggaccaggacctgatcaccatcattggaaaggaggacgccgtccgagaggcacagaaggagctggaggccttgatccaaaacctggataatgtggtggaagactccatgctggtggaccccaagcaccaccgccacttcgtcatccgcagaggccaggtcttgcgggagattgctgaagagtatggcggggtgatggtcagcttcccacgctctggcacacagagcgacaaagtcaccctcaagggcgccaaggactgtgtggaggcagccaagaaacgcattcaggagatcattgaggacctggaagctcaggtgacattagaatgtgctataccccagaaattccatcgatctgtcatgggccccaaaggttccagaatccagcagattactcgggatttcagtgttcaaattaaattcccagacagagaggagaacgcagttcacagtacagagccagttgtccaggagaatggggacgaagctggggaggggagagaggctaaagattgtgaccccggctctccaaggaggtgtgacatcatcatcatctctggccggaaagaaaagtgtgaggctgccaaggaagctctggaggcattggttcctgtcaccattgaagtagaggtgccctttgaccttcaccgttacgttattgggcagaaaggaagtgggatccgcaagatgatggatgagtttgaggtgaacatacatgtcccggcacctgagctgcagtctgacatcatcgccatcacgggcctcgctgcaaatttggaccgggccaaggctggactgctggagcgtgtgaaggagctacaggccgagcaggaggaccgggctttaaggagttttaagctgagtgtcactgtagaccccaaataccatcccaagattatcgggagaaagggggcagtaattacccaaatccggttggagcatgacgtgaacatccagtttcctgataaggacgatgggaaccagccccaggaccaaattaccatcacagggtacgaaaagaacacagaagctgccagggatgctatactgagaattgtgggtgaacttgagcagatggtttctgaggacgtcccgctggaccaccgcgttcacgcccgcatcattggtgcccgcggcaaagccattcgcaaaatcatggacgaattcaaggtggacattcgcttcccacagagcggagccccagaccccaactgcgtcactgtgacggggctcccagagaatgtggaggaagccatcgaccacatcctcaatctggaggaggaatacctagctgacgtggtggacagtgaggcgctgcaggtatacatgaaacccccagcacacgaagaggccaaggcaccttccagaggctttgtggtgcgggacgcaccctggaccgccagcagcagtgagaaggctcctgacatgagcagctctgaggaatttcccagctttggggctcaggtggctcccaagaccctcccttggggccccaaacgataatgatcaaaaagaacagaaccctctccagcctgctgacccaaacccaaccacacaatggtttgtctcaatctgacccagcggctggaccctccgtaaattgttgacgctcttcccccttcccgaggtcccgcagggagcctagcgcctggctgtgtgtgcggccgctcctccaggcctggccgtgcccgctcaggacctgctccactgtttaacactaaaccaaggtcatgagcattcgtgctaagataacagactccagctcctggtccacccggcatgtcagtcagcactctggccttcatcacgagagctccgcagccgtggctaggattccacttcctgtgtcatgacctcaggaaataaacgtccttgactttataaaagccaaa

SEQ ID NO: 13583 - DNA, 6372 bp, Homo sapiens
  source 1..6372: mol_type = unassigned DNA
aggcgggattgggccgccgccctatatagcagccggggcccgggcgccgcgcctcggagcgtcccggcttctcccgcgcggggggcgagtaagccagcggcaggaccagcgggcgggggcccacgacaaaagctggcaggctgacagaggcggcctcaggacggaccttctggctactgaccgttttgctgtggttttcccggattgtgtgtaggtgtgagatcaaccatgagttccgttgcagttttgacccaagagagttttgctgaacaccgaagtgggctggttccgcaacaaatcaaagttgccactctaaattcagaagaggagagcgaccctccaacctacaaggatgccttccctccacttcctgagaaagctgcttgcctggaaagtgcccaggaaccctctggagcctgggggaacaagatccgacccatcaaggcttctgtcatcactcaggtgttccatgtacccctggaggagagaaaatacaaggatatgaaccagtttggagaaggtgaacaagcaaaaatctgccttgagatcatgcagagaactggtgctcacttggagctgtctttggccaaagaccaaggcctctccatcatggtgtcaggaaagctggatgctgtcatgaaagctcggaaggacattgttgctagactgcagactcaggcctcagcaactgttgccattcccaaagaacaccatcgctttgttattggcaaaaatggagagaaactgcaagacttggagctaaaaactgcaaccaaaatccagatcccacgcccagatgaccccagcaatcagatcaagatcactggcaccaaagagggcatcgagaaagctcgccatgaagtcttactcatctctgccgagcaggacaaacgtgctgtggagaggctagaagtagaaaaggcattccaccccttcatcgctgggccgtataatagactggttggcgagatcatgcaggagacaggcacgcgcatcaacatccccccacccagcgtgaaccggacagagattgtcttcactggagagaaggaacagttggctcaggctgtggctcgcatcaagaagatttatgaggagaagaaaaagaagactacaaccattgcagtggaagtgaagaaatcccaacacaagtatgtcattgggcccaagggcaattcattgcaggagatccttgagagaactggagtttccgttgagatcccaccctcagacagcatctctgagactgtaatacttcgaggcgaacctgaaaagttaggtcaggcgttgactgaagtctatgccaaggccaatagcttcaccgtctcctctgtcgccgccccttcctggcttcaccgtttcatcattggcaagaaagggcagaacctggccaaaatcactcagcagatgccaaaggttcacatcgagttcacagagggcgaagacaagatcaccctggagggccctacagaggatgtcaatgtggcccaggaacagatagaaggcatggtcaaagatttgattaaccggatggactatgtggagatcaacatcgaccacaagttccacaggcacctcattgggaagagcggtgccaacataaacagaatcaaagaccagtacaaggtgtccgtgcgcatccctcctgacagtgagaagagcaatttgatccgcatcgagggggacccacagggcgtgcagcaggccaagcgagagctgctggagcttgcatctcgcatggaaaatgagcgtaccaaggatctaatcattgagcaaagatttcatcgcacaatcattgggcagaagggtgaacggatccgtgaaattcgtgacaaattcccagaggtcatcattaactttccagacccagcacaaaaaagtgacattgtccagctcagaggacctaagaatgaggtggaaaaatgcacaaaatacatgcagaagatggtggcagatctggtggaaaatagctattcaatttctgttccgatcttcaaacagtttcacaagaatatcattgggaaaggaggcgcaaacattaaaaagattcgtgaagaaagcaacaccaaaatcgaccttccagcagagaatagcaattcagagaccattatcatcacaggcaagcgagccaactgcgaagctgcccggagcaggattctgtctattcagaaagacctggccaacatagccgaggtagaggtctccatccctgccaagctgcacaactccctcattggcaccaagggccgtctgatccgctccatcatggaggagtgcggcggggtccacattcactttcccgtggaaggttcaggaagcgacaccgttgttatcaggggcccttcctcggatgtggagaaggccaagaagcagctcctgcatctggcggaggagaagcaaaccaagagtttcactgttgacatccgcgccaagccagaataccacaaattcctcatcggcaaggggggcggcaaaattcgcaaggtgcgcgacagcactggagcacgtgtcatcttccctgcggctgaggacaaggaccaggacctgatcaccatcattggaaaggaggacgccgtccgagaggcacagaaggagctggaggccttgatccaaaacctggataatgtggtggaagactccatgctggtggaccccaagcaccaccgccacttcgtcatccgcagaggccaggtcttgcgggagattgctgaagagtatggcggggtgatggtcagcttcccacgctctggcacacagagcgacaaagtcaccctcaagggcgccaaggactgtgtggaggcagccaagaaacgcattcaggagatcattgaggacctggaagctcaggtgacattagaatgtgctataccccagaaattccatcgatctgtcatgggccccaaaggttccagaatccagcagattactcgggatttcagtgttcaaattaaattcccagacagagaggagaacgcagttcacagtacagagccagttgtccaggagaatggggacgaagctggggaggggagagaggctaaagattgtgaccccggctctccaaggaggtgtgacatcatcatcatctctggccggaaagaaaagtgtgaggctgccaaggaagctctggaggcattggttcctgtcaccattgaagtagaggtgccctttgaccttcaccgttacgttattgggcagaaaggaagtgggatccgcaagatgatggatgagtttgaggtgaacatacatgtcccggcacctgagctgcagtctgacatcatcgccatcacgggcctcgctgcaaatttggaccgggccaaggctggactgctggagcgtgtgaaggagctacaggccgagcaggaggaccgggctttaaggagttttaagctgagtgtcactgtagaccccaaataccatcccaagattatcgggagaaagggggcagtaattacccaaatccggttggagcatgacgtgaacatccagtttcctgataaggacgatgggaaccagccccaggaccaaattaccatcacagggtacgaaaagaacacagaagctgccagggatgctatactgagaattgtgggtgaacttgagcagatggtttctgaggacgtcccgctggaccaccgcgttcacgcccgcatcattggtgcccgcggcaaagccattcgcaaaatcatggacgaattcaaggtggacattcgcttcccacagagcggagccccagaccccaactgcgtcactgtgacggggctcccagagaatgtggaggaagccatcgaccacatcctcaatctggaggaggaatacctagctgacgtggtggacagtgaggcgctgcaggtatacatgaaacccccagcacacgaagaggccaaggcaccttccagaggctttgtggtgcgggacgcaccctggaccgccagcagcagtgagaaggctcctgacatgagcagctctgaggaatttcccagctttggggctcaggtggctcccaagaccctcccttggggccccaaacgataatgatcaaaaagaacagaaccctctccagcctgctgacccaaacccaaccacacaatggtttgtctcaatctgacccagcggctggaccctccgtaaattgttgacgctcttcccccttcccgaggtcccgcagggagcctagcgcctggctgtgtgtgcggccgctcctccaggcctggccgtgcccgctcaggacctgctccactgtttaacactaaaccaaggtcatgagcattcgtgctaagataacagactccagctcctggtccacccggcatgtcagtcagcactctggccttcatcacgagagctccgcagccgtggctaggattccacttcctgtgtcatgacctcaggaaataaacgtccttgactttataaaagccaaacgtttgccctcttcctttcccacctccctcctgccagtttcccttggtccagacagtcctgtttgtggagtgcaatcagcctcctccagctgccagagcgcctcagcacaggtgtcagggtgcaaggaagacctggcaatggacagcaggaggcaggttcctggagctggggggtgacctgagaggcagagggtgacgggttctcaggcagtcctgattttacctgccgtggggtctgaaagcaccaagggtccctgcccctacctccactgccagaccctcagcctgaggtctggtgagtggagcctggaggcaaggtggtaggcaccatctgggtcccctgtggccgtcacagtgtctgctgtgattgagatgcgcacaggttgggggaggtagggccttacgcttgtcctcagtgggggcagtttgccttagatgacagctgggctcttcttcacaccacctgcagcccctccctgcccctgccctagctgctgtgtgttcagttgccttctttctacctcagccggcgtggagtggtctctgtgcagttagtgccaccccacacacccgtctcttgattgagatgtttctggtggttatgggtttcccgtggagctgggggtgggcgccgtgtacctaagctggaggctggcgctctccctcagcacaggtgggtcagtggccagcaggcccatctggagtgggagtgggcacttccaccccgcccacaggccatccggctgtgcaggccagcccctaggagcaggtcccgggtgactggcagttttcacggtctagggccgagacgatggcatggggcctagagcatgaggtagagcagaatgcagaccacgccgctggatgccgagagaccctgctctccgagggaggcatctgtgtcatgctgtgagggctgaggacggggccctagtctctggttttctggtcttaacatccttatctgtgtccgccacggaggtgactgagctgctagcgagttgtcctgtcccaggtacttgagttttggaaaagctgactcacgcccatccatctcacagcccttccctggggacagtcgcttccgccttgacacctcactctcagttgaataactcaagcttggtcatcttcagactcgaattcttgagtagacccagacggcttagcccaagtctagttgcagctgcctcggcaagtccccatttgctcaggcagccctgaatgggcctgtttacaggaatggtaaattgggattggaaggaatatagcttccagcttcataggctagggtgaccacggcttaggaaacagggaaagaaagcaaggcccttttcctgcctttcccgggatctgtctactccacctccacgggggaggccagtggggaagggctgtcacctcttccccatctgcatgagttctggaactctgtcctgttggctgcttgcttccagctccccccaatctccatcgcagcgggttcctcctgtcttttctacagtgtcataaaacatcctgcccctaccctctcccaaaggtcaattttaattctcaccaagttttgcacatctctgtatgtcgcttgatgtcttagacgcgagccctttcctaaactgttcagcgctctcttttcctttgggtggttgttgcaagggtgatgacatgactgtccccaggcctgtctccctgaagcgtctgtgctgtcaggacagccctgggcagagatgaggcaggggtgaggcgtgcgtgtgcttttcctccttgttggatgtcttccatatcatctgtttccatagctacaatccatcccttggccttaactttggaatttggagattatatgcaaacatgtgtaaaggctcatgaatatggatgacactggaattttataaattctaaaataaaacccgaaaccagatgtagcatgctgggactcattttgtca

SEQ ID NO: 13584 - DNA, 4489 bp, Homo sapiens
  source 1..4489: mol_type = unassigned DNA
gatcggggggcctctctgggattggctgcgcgcacgtcacgtggggccgacgggccctgcgcagaccatcgagtcgggcgtccctccccggggacgtggccttcctgtgcccgggctggggcccgccgccccgcgggggagggcggagctggcgcggcccctagctttctccttctggtgtggggcccgagcaaaagctggcaggctgacagaggcggcctcaggacggaccttctggctactgaccgttttgctgtggttttcccggattgtgtgtaggtgtgagatcaaccatgagttccgttgcagttttgacccaagagagttttgctgaacaccgaagtgggctggttccgcaacaaatcaaagttgccactctaaattcagaagaggagagcgaccctccaacctacaaggatgccttccctccacttcctgagaaagctgcttgcctggaaagtgcccaggaaccctctggagcctgggggaacaagatccgacccatcaaggcttctgtcatcactcaggtgttccatgtacccctggaggagagaaaatacaaggatatgaaccagtttggagaaggtgaacaagcaaaaatctgccttgagatcatgcagagaactggtgctcacttggagctgtctttggccaaagaccaaggcctctccatcatggtgtcaggaaagctggatgctgtcatgaaagctcggaaggacattgttgctagactgcagactcaggcctcagcaactgttgccattcccaaagaacaccatcgctttgttattggcaaaaatggagagaaactgcaagacttggagctaaaaactgcaaccaaaatccagatcccacgcccagatgaccccagcaatcagatcaagatcactggcaccaaagagggcatcgagaaagctcgccatgaagtcttactcatctctgccgagcaggacaaacgtgctgtggagaggctagaagtagaaaaggcattccaccccttcatcgctgggccgtataatagactggttggcgagatcatgcaggagacaggcacgcgcatcaacatccccccacccagcgtgaaccggacagagattgtcttcactggagagaaggaacagttggctcaggctgtggctcgcatcaagaagatttatgaggagaagaaaaagaagactacaaccattgcagtggaagtgaagaaatcccaacacaagtatgtcattgggcccaagggcaattcattgcaggagatccttgagagaactggagtttccgttgagatcccaccctcagacagcatctctgagactgtaatacttcgaggcgaacctgaaaagttaggtcaggcgttgactgaagtctatgccaaggccaatagcttcaccgtctcctctgtcgccgccccttcctggcttcaccgtttcatcattggcaagaaagggcagaacctggccaaaatcactcagcagatgccaaaggttcacatcgagttcacagagggcgaagacaagatcaccctggagggccctacagaggatgtcaatgtggcccaggaacagatagaaggcatggtcaaagatttgattaaccggatggactatgtggagatcaacatcgaccacaagttccacaggcacctcattgggaagagcggtgccaacataaacagaatcaaagaccagtacaaggtgtccgtgcgcatccctcctgacagtgagaagagcaatttgatccgcatcgagggggacccacagggcgtgcagcaggccaagcgagagctgctggagcttgcatctcgcatggaaaatgagcgtaccaaggatctaatcattgagcaaagatttcatcgcacaatcattgggcagaagggtgaacggatccgtgaaattcgtgacaaattcccagaggtcatcattaactttccagacccagcacaaaaaagtgacattgtccagctcagaggacctaagaatgaggtggaaaaatgcacaaaatacatgcagaagatggtggcagatctggtggaaaatagctattcaatttctgttccgatcttcaaacagtttcacaagaatatcattgggaaaggaggcgcaaacattaaaaagattcgtgaagaaagcaacaccaaaatcgaccttccagcagagaatagcaattcagagaccattatcatcacaggcaagcgagccaactgcgaagctgcccggagcaggattctgtctattcagaaagacctggccaacatagccgaggtagaggtctccatccctgccaagctgcacaactccctcattggcaccaagggccgtctgatccgctccatcatggaggagtgcggcggggtccacattcactttcccgtggaaggttcaggaagcgacaccgttgttatcaggggcccttcctcggatgtggagaaggccaagaagcagctcctgcatctggcggaggagaagcaaaccaagagtttcactgttgacatccgcgccaagccagaataccacaaattcctcatcggcaaggggggcggcaaaattcgcaaggtgcgcgacagcactggagcacgtgtcatcttccctgcggctgaggacaaggaccaggacctgatcaccatcattggaaaggaggacgccgtccgagaggcacagaaggagctggaggccttgatccaaaacctggataatgtggtggaagactccatgctggtggaccccaagcaccaccgccacttcgtcatccgcagaggccaggtcttgcgggagattgctgaagagtatggcggggtgatggtcagcttcccacgctctggcacacagagcgacaaagtcaccctcaagggcgccaaggactgtgtggaggcagccaagaaacgcattcaggagatcattgaggacctggaagctcaggtgacattagaatgtgctataccccagaaattccatcgatctgtcatgggccccaaaggttccagaatccagcagattactcgggatttcagtgttcaaattaaattcccagacagagaggagaacgcagttcacagtacagagccagttgtccaggagaatggggacgaagctggggaggggagagaggctaaagattgtgaccccggctctccaaggaggtgtgacatcatcatcatctctggccggaaagaaaagtgtgaggctgccaaggaagctctggaggcattggttcctgtcaccattgaagtagaggtgccctttgaccttcaccgttacgttattgggcagaaaggaagtgggatccgcaagatgatggatgagtttgaggtgaacatacatgtcccggcacctgagctgcagtctgacatcatcgccatcacgggcctcgctgcaaatttggaccgggccaaggctggactgctggagcgtgtgaaggagctacaggccgagcaggaggaccgggctttaaggagttttaagctgagtgtcactgtagaccccaaataccatcccaagattatcgggagaaagggggcagtaattacccaaatccggttggagcatgacgtgaacatccagtttcctgataaggacgatgggaaccagccccaggaccaaattaccatcacagggtacgaaaagaacacagaagctgccagggatgctatactgagaattgtgggtgaacttgagcagatggtttctgaggacgtcccgctggaccaccgcgttcacgcccgcatcattggtgcccgcggcaaagccattcgcaaaatcatggacgaattcaaggtggacattcgcttcccacagagcggagccccagaccccaactgcgtcactgtgacggggctcccagagaatgtggaggaagccatcgaccacatcctcaatctggaggaggaatacctagctgacgtggtggacagtgaggcgctgcaggtatacatgaaacccccagcacacgaagaggccaaggcaccttccagaggctttgtggtgcgggacgcaccctggaccgccagcagcagtgagaaggctcctgacatgagcagctctgaggaatttcccagctttggggctcaggtggctcccaagaccctcccttggggccccaaacgataatgatcaaaaagaacagaaccctctccagcctgctgacccaaacccaaccacacaatggtttgtctcaatctgacccagcggctggaccctccgtaaattgttgacgctcttcccccttcccgaggtcccgcagggagcctagcgcctggctgtgtgtgcggccgctcctccaggcctggccgtgcccgctcaggacctgctccactgtttaacactaaaccaaggtcatgagcattcgtgctaagataacagactccagctcctggtccacccggcatgtcagtcagcactctggccttcatcacgagagctccgcagccgtggctaggattccacttcctgtgtcatgacctcaggaaataaacgtccttgactttataaaagccaaa

SEQ ID NO: 13585 - DNA, 581 bp, Homo sapiens
  source 1..581: mol_type = unassigned DNA
aagcgtagcctcttctcctttaccaagatggcggcttgtccctgtttcgccacagttcctaccttatgagctcggttttcttatgcttataagagtggaacagcaaaagctggcaggctgacagaggcggcctcaggacggaccttctggctactgaccgttttgctgctaccacttataaccacctggttaagtcgagatttggaggtggtttagtttggggcctggatgcaccttgcagagagagaccgctggctttttgtagcaactgtcatgatgcattttgtaagcattaagagtggttttcccggattgtgtgtaggtgtgagatcaaccatgagttccgttgcagttttgacccaagagagttttgctgaacaccgaagtgggctggttccgcaacaaatcaaagttgccactctaaattcagaagaggagagcgaccctccaacctacaaggatgccttccctccacttcctgagaaagctgcttgcctggaaagtgcccaggaaccctctggagcctgggggaacaagatccgacccatcaaggcttctgtcatcactcaggtgttccatgt

SEQ ID NO: 13586 - DNA, 525 bp, Homo sapiens
  source 1..525: mol_type = unassigned DNA
atatagaggctgggggtggggggggaggtcaagcgtagcctcttctcctttaccaagatggcggcttgtccctgtttcgccacagttcctaccttatgagctcggttttcttatgcttataagagtggaacagacacatgcctcactcctgtcagcagttccaccttttcatggttgaggagcacatgtggtcgccagcctcccatctccagagtcccctaaggcaagatccccagtggattagaaaggactgaaggacttttacaggctaacagcaagaagaacaaagtaactgcaaaatagacggagaattcttgaagacggtagctcttggtcaccataagcgctgcagagaccccgaggtccacattctgttgtagcaaaagctggcaggctgacagaggcggcctcaggacggaccttctggctactgaccgttttgctgtggttttcccggattgtgtgtaggtgtgagatcaaccatgagttccgttgcagttttgacccaagagagttttgctgaac

SEQ ID NO: 13587 - DNA, 559 bp, Homo sapiens
  source 1..559: mol_type = unassigned DNA
atatagaggctgggggtggggggggaggtcaagcgtagcctcttctcctttaccaagatggcggcttgtccctgtttcgccacagttcctaccttatgagctcggttttcttatgcttataagagtggaacagcaaaagctggcaggctgacagaggcggcctcaggacggaccttctggctactgaccgttttgctgctaccacttataaccacctggttaagtcgagatttggaggtggtttagtttggggcctggatgcaccttgcagagagagaccgctggctttttgtagcaactgtcatgatgcatttttggttttcccggattgtgtgtaggtgtgagatcaaccatgagttccgttgcagttttgacccaagagagttttgctgaacaccgaagtgggctggttccgcaacaaatcaaagttgccactctaaattcagaagaggagagcgaccctccaacctacaaggatgccttccctccacttcctgagaaagctgcttgcctggaaagtgcccaggaaccctctggagcctgggggaacaagatccga

SEQ ID NO: 13588 - DNA, 578 bp, Homo sapiens
  source 1..578: mol_type = unassigned DNA
tcggagcgtcccggcttctcccgcgcggggggcgagtaagccagcggcaggaccagcgggcgggggcccacgaacacatgcctcactcctgtcagcagttccaccttttcatggttgaggagcacatgtggtcgccagcctcccatctccagagtcccctaagatccccagtggattagaaaggactgaaggacttttacaggctaacagcaagaagaacaaagtaactgcaaaatagacggagaattcttgaagacggtagctcttggtcaccataagcgctgcagagaccccgaggtccacattctgttgtagcaaaagctggcaggctgacagaggcggcctcaggacggaccttctggctactgaccgttttgctgtggttttcccggattgtgtgtaggtgtgagatcaaccatgagttccgttgcagttttgacccaagagagttttgctgaacaccgaagtgggctggttccgcaacaaatcaaagttgccactctaaattcagaagaggagagcgaccctccaacctacaaggatgccttccctccacttcctgagaaagctgcttgcct

SEQ ID NO: 13589 - DNA, 929 bp, Homo sapiens
  source 1..929: mol_type = unassigned DNA
agaaacttgcctgagtattggtgttagtaaccaaagcataaatatcttgaccttttctgattttgaggtaaaaagatctgagttgtaaaatgtagataagtaacttttctctggtttcctctctctcctctcccacttcccatcccataccagcaaaagctggcaggctgacagaggcggcctcaggacggaccttctggctactgaccgttttgctgtggttttcccggattgtgtgtaggtgtgagatcaaccatgagttccgttgcagttttgacccaagagagttttgctgaacaccgaagtgggctggttccgcaacaaatcaaagttgccactctaaattcagaagaggagagcgaccctccaacctacaaggatgccttccctccacttcctgagaaagctgcttgcctggaaagtgcccaggaaccctctggagcctgggggaacaagatccgacccatcaaggcttctgtcatcactcaggtgttccatgtacccctggaggagagaaaatacaaggatatgaaccagtttggagaaggtgaacaagcaaaaatctgccttgagatcatgcagagaactggtgctcacttggagctgtctttggccaaagaccaaggcctctccatcatggtgtcaggaaagctggatgctgtcatgaaagctcggaaggacattgttgctagactgcagactcaggcctcagcaactgttgccattcccaaagaacaccatcgctttgttattggcaaaaatggagagaaactgcaagacttggagctaaaaactgcaaccaaaatccagatcccacgcccagatgaccccagcaatcagatcaagatcactggcaccaaagagggcatcgagaaagctcgccatgaagtcttactcatctctgccgagcaggacaaacgtgctgtgga

SEQ ID NO: 13590 - DNA, 544 bp, Homo sapiens
  source 1..544: mol_type = unassigned DNA
aagcgtagcctcttctcctttaccaagatggcggcttgtccctgtttcgccacagttcctaccttatgagctcggttttcttatgcttataagagtggaacagacacatgcctcactcctgtcagcagttccaccttttcatggttgaggagcacatgtggtcgccagcctcccatctccagagtcccctaaggcaagcaaaagctggcaggctgacagaggcggcctcaggacggaccttctggctactgaccgttttgctgtggttttcccggattgtgtgtaggtgtgagatcaaccatgagttccgttgcagttttgacccaagagagttttgctgaacaccgaagtgggctggttccgcaacaaatcaaagttgccactctaaattcagaagaggagagcgaccctccaacctacaaggatgccttccctccacttcctgagaaagctgcttgcctggaaagtgcccaggaaccctctggagcctgggggaacaagatccgacccatcaaggcttctgtcatcactcaggtgttccatg

SEQ ID NO: 13591 - DNA, 530 bp, Homo sapiens
  source 1..530: mol_type = unassigned DNA
gattcaaaaagtatttgagaacctactaggtgctagacaccaaccgaggcaatgagtatgggtgacaacatgtgccctgccctcacagcaccaatagtccactggacaaataccatctggaacatcaggtaaacacctaagcctgtctggaggaaatctaatttgggcggaatcccacaagcacagactagcaaaagctggcaggctgacagaggcggcctcaggacggaccttctggctactgaccgttttgctgtggttttcccggattgtgtgtaggtgtgagatcaaccatgagttccgttgcagttttgacccaagagagttttgctgaacaccgaagtgggctggttccgcaacaaatcaaagttgccactctaaattcagaagaggagagcgaccctccaacctacaaggatgccttccctccacttcctgagaaagctgcttgcctggaaagtgcccaggaaccctctggagcctgggggaacaagatccgacccatcaaggcttctgtcatcactcaggtg

SEQ ID NO: 13592 - DNA, 594 bp, Homo sapiens
  source 1..594: mol_type = unassigned DNA
ggagcgtcccggcttctcccgcgcggggggcgagtaagccagcggcaggaccagcgggcgggggcccacgacaaaagctggcaggctgacagaggcggcctcaggacggaccttctggctactgaccgttttgctgctaccacttataaccacctggttaagtcgagatttggaggtggtttagtttggggcctggatgcaccttgcagagagagaccgctggctttttgtagcaactgtcatgatgcattttgtaagcattaagagtggttttcccggattgtgtgtaggtgtgagatcaaccatgagttccgttgcagttttgacccaagagagttttgctgaacaccgaagtgggctggttccgcaacaaatcaaagttgccactctaaattcagaagaggagagcgaccctccaacctacaaggatgccttccctccacttcctgagaaagctgcttgcctggaaagtgcccaggaaccctctggagcctgggggaacaagatccgacccatcaaggcttctgtcatcactcaggtgttccatgtacccctggaggagagaaaatacaaggatatgaaccagtttggaga

SEQ ID NO: 13593 - DNA, 459 bp, Homo sapiens
  source 1..459: mol_type = unassigned DNA
cgcgcggggggcgagtaagccagcggcaggaccagcgggcgggggcccacgaacacatgcctcactcctgtcagcagttccaccttttcatggttgaggagcacatgtggtcgccagcctcccatctccagagtcccctaaggcaagatccccagtggattagaaaggactgaaggacttttacaggctaacagcaagaagaacaaagtaactgcaaaatagacggagaattcttgaagacggtagctcttggtcaccataagcgctgcagagaccccgaggtccacattctgttgtagcaaaagctggcaggctgacagaggcggcctcaggacggaccttctggctactgaccgttttgctgtggttttcccggattgtgtgtaggtgtgagatcaaccatgagttccgttgcagttttgacccaagagagttttgctgaacaccgaagtgggctgg

SEQ ID NO: 13594 - DNA, 4283 bp, Homo sapiens
  source 1..4283: mol_type = unassigned DNA
ggagcgtcccggcttctcccgcgcggggggcgagtaagccagcggcaggaccagcgggcgggggcccacgacaaaagctggcaggctgacagaggcggcctcaggacggaccttctggctactgaccgttttgctgctaccacttataaccacctggttaagtcgagatttggaggtggtttagtttggggcctggatgcaccttgcagagagagaccgctggctttttgtagcaactgtcatgatgcattttgtaagcattaagagtggttttcccggattgtgtgtaggtgtgagatcaaccatgagttccgttgcagttttgacccaagagagttttgctgaacaccgaagtgggctggttccgcaacaaatcaaagttgccactctaaattcagaagaggagagcgaccctccaacctacaaggatgccttccctccacttcctgagaaagctgcttgcctggaaagtgcccaggaaccctctggagcctgggggaacaagatccgacccatcaaggcttctgtcatcactcaggtgttccatgtacccctggaggagagaaaatacaaggatatgaaccagtttggagaaggtgaacaagcaaaaatctgccttgagatcatgcagagaactggtgctcacttggagctgtctttggccaaagaccaaggcctctccatcatggtgtcaggaaagctggatgctgtcatgaaagctcggaaggacattgttgctagactgcagactcaggcctcagcaactgttgccattcccaaagaacaccatcgctttgttattggcaaaaatggagagaaactgcaagacttggagctaaaaactgcaaccaaaatccagatcccacgcccagatgaccccagcaatcagatcaagatcactggcaccaaagagggcatcgagaaagctcgccatgaagtcttactcatctctgccgagcaggacaaacgtgctgtggagaggctagaagtagaaaaggcattccaccccttcatcgctgggccgtataatagactggttggcgagatcatgcaggagacaggcacgcgcatcaacatccccccacccagcgtgaaccggacagagattgtcttcactggagagaaggaacagttggctcaggctgtggctcgcatcaagaagatttatgaggagaaggccaatagcttcaccgtctcctctgtcgccgccccttcctggcttcaccgtttcatcattggcaagaaagggcagaacctggccaaaatcactcagcagatgccaaaggttcacatcgagttcacagagggcgaagacaagatcaccctggagggccctacagaggatgtcaatgtggcccaggaacagatagaaggcatggtcaaagatttgattaaccggatggactatgtggagatcaacatcgaccacaagttccacaggcacctcattgggaagagcggtgccaacataaacagaatcaaagaccagtacaaggtgtccgtgcgcatccctcctgacagtgagaagagcaatttgatccgcatcgagggggacccacagggcgtgcagcaggccaagcgagagctgctggagcttgcatctcgcatggaaaatgagcgtaccaaggatctaatcattgagcaaagatttcatcgcacaatcattgggcagaagggtgaacggatccgtgaaattcgtgacaaattcccagaggtcatcattaactttccagacccagcacaaaaaagtgacattgtccagctcagaggacctaagaatgaggtggaaaaatgcacaaaatacatgcagaagatggtggcagatctggtggaaaatagctattcaatttctgttccgatcttcaaacagtttcacaagaatatcattgggaaaggaggcgcaaacattaaaaagattcgtgaagaaagcaacaccaaaatcgaccttccagcagagaatagcaattcagagaccattatcatcacaggcaagcgagccaactgcgaagctgcccggagcaggattctgtctattcagaaagacctggccaacatagccgaggtagaggtctccatccctgccaagctgcacaactccctcattggcaccaagggccgtctgatccgctccatcatggaggagtgcggcggggtccacattcactttcccgtggaaggttcaggaagcgacaccgttgttatcaggggcccttcctcggatgtggagaaggccaagaagcagctcctgcatctggcggaggagaagcaaaccaagagtttcactgttgacatccgcgccaagccagaataccacaaattcctcatcggcaaggggggcggcaaaattcgcaaggtgcgcgacagcactggagcacgtgtcatcttccctgcggctgaggacaaggaccaggacctgatcaccatcattggaaaggaggacgccgtccgagaggcacagaaggagctggaggccttgatccaaaacctggataatgtggtggaagactccatgctggtggaccccaagcaccaccgccacttcgtcatccgcagaggccaggtcttgcgggagattgctgaagagtatggcggggtgatggtcagcttcccacgctctggcacacagagcgacaaagtcaccctcaagggcgccaaggactgtgtggaggcagccaagaaacgcattcaggagatcattgaggacctggaagctcaggtgacattagaatgtgctataccccagaaattccatcgatctgtcatgggccccaaaggttccagaatccagcagattactcgggatttcagtgttcaaattaaattcccagacagagaggagaacgcagttcacagtacagagccagttgtccaggagaatggggacgaagctggggaggggagagaggctaaagattgtgaccccggctctccaaggaggtgtgacatcatcatcatctctggccggaaagaaaagtgtgaggctgccaaggaagctctggaggcattggttcctgtcaccattgaagtagaggtgccctttgaccttcaccgttacgttattgggcagaaaggaagtgggatccgcaagatgatggatgagtttgaggtgaacatacatgtcccggcacctgagctgcagtctgacatcatcgccatcacgggcctcgctgcaaatttggaccgggccaaggctggactgctggagcgtgtgaaggagctacaggccgagcaggaggaccgggctttaaggagttttaagctgagtgtcactgtagaccccaaataccatcccaagattatcgggagaaagggggcagtaattacccaaatccggttggagcatgacgtgaacatccagtttcctgataaggacgatgggaaccagccccaggaccaaattaccatcacagggtacgaaaagaacacagaagctgccagggatgctatactgagaattgtgggtgaacttgagcagatggtttctgaggacgtcccgctggaccaccgcgttcacgcccgcatcattggtgcccgcggcaaagccattcgcaaaatcatggacgaattcaaggtggacattcgcttcccacagagcggagccccagaccccaactgcgtcactgtgacggggctcccagagaatgtggaggaagccatcgaccacatcctcaatctggaggaggaatacctagctgacgtggtggacagtgaggcgctgcaggtatacatgaaacccccagcacacgaagaggccaaggcaccttccagaggctttgtggtgcgggacgcaccctggaccgccagcagcagtgagaaggctcctgacatgagcagctctgaggaatttcccagctttggggctcaggtggctcccaagaccctcccttggggccccaaacgataatgatcaaaaagaacagaaccctctccagcctgctgacccaaacccaaccacacaatggtttgtctcaatctgacccagcggctggaccctccgtaaattgttgacgctcttcccccttcccgaggtcccgcagggagcctagcgcctggctgtgtgtgcggccgctcctccaggcctggccgtgcccgctcaggacctgctccactgtttaacactaaaccaaggtcatgagcattcgtgctaagataacagactccagctcctggtccacccggcatgtcagtcagcactctggccttcatcacgagagctccgcagccgtggctaggattccacttcctgtgtcatgacctcaggaaataaacgtccttgactttat

SEQ ID NO: 13595 - DNA, 1096 bp, Homo sapiens
  source 1..1096: mol_type = unassigned DNA
gtcaagcgtagcctcttctcctttaccaagatggcggcttgtccctgtttcgccacagttcctaccttatgagctcggttttcttatgcttataagagtggaacagcagttccaccttttcatggttgaggagcacatgtggtcgccagcctcccatctccagagtcccctaaggcaagatccccagtggattagaaaggactgaaggacttttacaggctaacagcaagaagaacaaagtaactgcaaaatagacggagaattcttgaagacggtagctcttggtcaccataagcgctgcagagaccccgaggtccacattctgttgtagcaaaagctggcaggctgacagaggcggcctcaggacggaccttctggctactgaccgttttgctgtggttttcccggattgtgtgtaggtgtgagatcaaccatgagttccgttgcagttttgacccaagagagttttgctgaacaccgaagtgggctggttccgcaacaaatcaaagttgccactctaaattcagaagaggagagcgaccctccaacctacaaggatgccttccctccacttcctgagaaagctgcttgcctggaaagtgcccaggaaccctctggagcctgggggaacaagatccgacccatcaaggcttctgtcatcactcaggtgttccatgtacccctggaggagagaaaatacaaggatatgaaccagtttggagaaggtgaacaagcaaaaatctgccttgagatcatgcagagaactggtgctcacttggagctgtctttggccaaagaccaaggcctctccatcatggtgtcaggaaagctggatgctgtcatgaaagctcggaaggacattgttgctagactgcagactcaggcctcagcaactgttgccattcccaaagaacaccatcgctttgttattggcaaaaatggagagaaactgcaagacttggagctaaaaactgcaaccaaaatccagatcccacgcccagatgaccccagcaatcagatcaagatcactggcaccaaagagggcatcgagaaagctcgccatgaagtcttactcatctctgccgagcaggacaaa

SEQ ID NO: 13596 - DNA, 612 bp, Homo sapiens
  source 1..612: mol_type = unassigned DNA
acaacagacagccttaggggaaatggggaaactggagaaaagggctcttatcccaaaaggaccagatccattggaacagatagagcaaaagctggcaggctgacagaggcggcctcaggacggaccttctggctactgaccgttttgctgtggttttcccggattgtgtgtaggtgtgagatcaaccatgagttccgttgcagttttgacccaagagagttttgctgaacaccgaagtgggctggttccgcaacaaatcaaagttgccactctaaattcagaagaggagagcgaccctccaacctacaaggatgccttccctccacttcctgagaaagctgcttgcctggaaagtgcccaggaaccctctggagcctgggggaacaagatccgacccatcaaggcttctgtcatcactcaggtgttccatgtacccctggaggagagaaaatacaaggatatgaaccagtttggagaaggtgaacaagcaaaaatctgccttgagatcatgcagagaactggtgctcacttggagctgtctttggccaaagaccaaggcctctccatcatggtgtcaggaaagctggatgctgtcatgaaagctcggaagga

SEQ ID NO: 13597 - DNA, 708 bp, Homo sapiens
  source 1..708: mol_type = unassigned DNA
ggggacgtggccttcctgtgcccgggctggggcccgccgccccgcgggggagggcggagctggcgcggcccctagctttctccttctggtgtggggcccgaggtcagagcccagcacaacaacccttcttctggttcagccgcccagcggttatgtggggtacgggaaagatgatccagccatgcaggagagcaccagtggttctgtgaggattttacttcaaaatacaaaagctggcaggctgacagaggcggcctcaggacggaccttctggctactgaccgttttgctgtggttttcccggattgtgtgtaggtgtgagatcaaccatgagttccgttgcagttttgacccaagagagttttgctgaacaccgaagtgggctggttccgcaacaaatcaaagttgccactctaaattcagaagaggagagcgaccctccaacctacaaggatgccttccctccacttcctgagaaagctgcttgcctggaaagtgcccaggaaccctctggagcctgggggaacaagatccgacccatcaaggcttctgtcatcactcaggtgttccatgtacccctggaggagagaaaatacaaggatatgaaccagtttggagaaggtgaacaagcaaaaatctgccttgagatcatgcagagaactggtgctcacttggagctgtctttggccaaagaccaaggcctctcca

SEQ ID NO: 13598 - DNA, 598 bp, Homo sapiens
  source 1..598: mol_type = unassigned DNA
ggtggcatctgcgaaagttcctccatgcaggatgggtgccgacttccagaacttgcaaaagctggcaggctgacagaggcggcctcaggacggaccttctggctactgaccgttttgctgtggttttcccggattgtgtgtaggtgtgagatcaaccatgagttccgttgcagttttgacccaagagagttttgctgaacaccgaagtgggctggttccgcaacaaatcaaagttgccactctaaattcagaagaggagagcgaccctccaacctacaaggatgccttccctccacttcctgagaaagctgcttgcctggaaagtgcccaggaaccctctggagcctgggggaacaagatccgacccatcaaggcttctgtcatcactcaggtgttccatgtacccctggaggagagaaaatacaaggatatgaaccagtttggagaaggtgaacaagcaaaaatctgccttgagatcatgcagagaactggtgctcacttggagctgtctttggccaaagaccaaggcctctccatcatggtgtcaggaaagctggatgctgtcatgaaagctcggaaggacattgttgctagactg

SEQ ID NO: 13599 - DNA, 566 bp, Homo sapiens
  source 1..566: mol_type = unassigned DNA
ctcggagcgtcccggcttctcccgcgcggggggcgagtaagccagcggcaggaccagcgggcgggggcccacgaacacatgcctcactcctgtcagcagttccaccttttcatggttgaggagcacatgtggtcgccagcctcccatctccagagtcccctaaggcaaggtgactcaccctcctacttcacagagttcttggtcctccccagacagcctttgaaggttcctttcaatcctgcgatttcatgacctggtttctagatccccagtggattagaaaggactgaaggacttttacaggctaacagcaagaagaacaaagtaactgcaaaatagacggagaattcttgaagacggtagctcttggtcaccataagcgctgcagagaccccgaggtccacattctgttcaaaagctggcaggctgacagaggcggcctcaggacggaccttctggctactgaccgttttgctgtggttttcccggattgtgtgtaggtgtgagatcaaccatgagttccgttgcagttttgacccaagagagttttgctgaacaccgaagtg

SEQ ID NO: 13600 - DNA, 996 bp, Homo sapiens
  source 1..996: mol_type = unassigned DNA
gcttctcccgcgcggggggcgagtaagccagcggcaggaccagcgggcgggggcccacgaacacatgcctcactcctgtcagcagttccaccttttcatggttgaggagcacatgtggtcgccagcctcccatctccagagtcccctaaggcaaggtgactcaccctcctacttcacagagttcttggtcctccccagacagcctttgaaggttcctttcaatcctgcgatttcatgacctggtttctagatccccagtggattagaaaggactgaaggacttttacaggctaacagcaagaagaacaaagtaactgcaaaatagacggagaattcttgaagacggtagctcttggtcaccataagcgctgcagagaccccgaggtccacattctgttgtagcaaaagctggcaggctgacagaggcggcctcaggacggaccttctggctactgaccgttttgctgtggttttcccggattgtgtgtaggtgtgagatcaaccatgagttccgttgcagttttgacccaagagagttttgctgaacaccgaagtgggctggttccgcaacaaatcaaagttgccactctaaattcagaagaggagagcgaccctccaacctacaaggatgccttccctccacttcctgagaaagctgcttgcctggaaagtgcccaggaaccctctggagcctgggggaacaagatccgacccatcaaggcttctgtcatcactcaggtgttccatgtacccctggaggagagaaaatacaaggatatgaaccagtttggagaaggtgaacaagcaaaaatctgccttgagatcatgcagagaactggtgctcacttggagctgtctttggccaaagaccaaggcctctccatcatggtgtcaggaaagctggatgctgtcatgaaagctcggaaggacattgttgctagactgcagactcaggcctcagcaactgttgccattcccaaagaacaccatcgcttt

SEQ ID NO: 13601 - DNA, 420 bp, Homo sapiens
  source 1..420: mol_type = unassigned DNA
ccgcgcggggggcgagtaagccagcggcaggaccagcgggcgggggcccacgagtcagagcccagcacaacaacccttcttctggttcagccgcccagcggttatgtggggtacgggaaagatgatccagccatgcaggagagcaccagtggttctgtgaggattttacttcaaaatacaaaagctggcaggctgacagaggcggcctcaggacggaccttctggctactgaccgttttgctgtggttttcccggattgtgtgtaggtgtgagatcaaccatgagttccgttgcagttttgacccaagagagttttgctgaacaccgaagtgggctggttccgcaacaaatcaaagttgccactctaaattcagaagaggagagcgaccctccaacctacaaggatgccttccctccact

SEQ ID NO: 13602 - DNA, 4046 bp, Homo sapiens
  source 1..4046: mol_type = unassigned DNA
aaacctccacgaaaataaggctcaccttgcgtaaccacgtagtccttcgccgcattggggcaaaataatcccttcatttttgtgaaggtaccgtggaaaatatttcatttttcttctcaccggagcaattgtaaatgctatgcggtaagaggagttacctgtggaaaggtggttaagagattaggtaaagaaaaggaaaggacaccaaaataaagtgctgcggaagaatttttgtccagctgtgagacgacgagtgcgtgaagtgaaggcgattgagaggggctgagggaattgtcctctgtggaagggactttcttttggccctaggccccttcctgcccctgtcgtcagcagagagatggaaaacttgatgactagctccaccctaccgcccctttttgcagatgaagacggttccaaggagagtaatgatctggctaccactgggttaaatcacccagaggttccatacagtagtggcgccacatcatccaccaacaatccagaatttgtggaggatctctctcaaggtcagttgcttcagagtgagtcttcaaatgcagcagaaggcaatgaacagaggcatgaagatgagcaacgaagtaaacgaggaggttggtccaaaggaagaaagaggaagaaacctcttcgagacagcaatgcacccaaatccccccttacaggatatgttcggttcatgaatgagcgtcgagaacaacttcgagcaaagagaccagaagtcccatttccagaaatcacaaggatgttaggcaatgaatggagtaaactgcctcctgaggaaaaacagcgctaccttgatgaagcagacagagataaggagcgttacatgaaggaactggaacagtatcagaaaacagaggcctacaaggtcttcagtaggaaaacccaggaccgtcagaaaggcaaatctcataggcaagatgcagcccggcaggccactcatgatcatgagaaagaaacagaggtaaaggaacggtctgtttttgacatccctatatttacagaggaattcttgaaccatagcaaagctcgggaagcagagctccgccagcttcgcaaatccaacatggagtttgaggagaggaatgcagccctgcaaaagcacgtggagagcatgcgcacagcagtggagaagctggaggtggatgtgatccaggagcggagccgcaacacagtcttacagcagcacctggagaccctgcggcaggtgctgaccagcagctttgccagcatgcccttgcctggaagtggagagacacctacagtggacaccattgactcatatatgaacagactgcacagtattattttagctaatccccaagacaatgaaaacttcatagctacagttcgagaagttgtgaacagactcgatcgttagggaatggtcttagaactccaagatgttccataagtgtttttacttgtgaggaatgagaagccatccatggaaatttgaactgagtgggggcagagaaagagtgcagatccctttgcttgtgaaagaattatcagtgagtgaaaggccatcaccccaggaagccaaatgagggagcagcaacatgtatatgagcttcctatggaattgtccttatgtgaagctttgaaggtgtacagccactctcccgggtcttcaggttcctaccatttccatttctgttaaagtggatctgcatatcttcagcttactaggtgacccggatgctgacatctgctgctgcagaaaggaagacttttcattgtaatttcgcttagacccttttatcagtggagctccagttttcttacctagctgtcacttttttaaatgcctctgggggttatttttgctttccttggcccccaccaatttatacatctccattttctgacctctggactaactggttgctcagcaaggttctgaaggagagtttcttgcattggacaggcccagtcttctcccatcattgccctgctgtgactccaaagaaaggagcttcttgctgacagtgccctgtggagcaaggctgtgtttcctaccccacacggtgctcagtgggtgccagccctcagtgtggctttgtgattgctgccctaaaggagaatgctctttccttcctcactggtactgcctgctgttttctaagcattgctcctgcacagacatggagtcccagccccagcaaggctcttctgttcccatctgttgacaatgtcttgtggagcatttttgctgaggaaaaggtcacttgtaaacagaggagaaagggaaagagtacaaagccctaagtttattgtaagtgaaaactgagggaattcctgtcttctttaggagtaatgattcatagatctagataggtggaaatatcattcaaaatagtcacttgagctcacaaaaaaagcaaggaagaattctcatgtcctttgtcttccttctgtagccattaactgctgaatccatgtgaggaagacaggcttcccttccttccccctccttagtgattttttctttaacagcataagtaaagaggactttctggttcatttttgtttgttttgttttgttttgttttgtttacagatgaggtcttcctgtgttgcccaggctggagtgcggtggctattcacagatgctatcatagcacactacagcctacaactcttgggctcaagcatcacgcctagcagtttctggttcctttaacagcaaaaggaaagagaggttctgattcttacctcagggttttttggttgttcattgtttttgtttttgtttttgttttgacactgcagagcacaaggctaaaggttacagctgagatctttggaaccaaaggcagagcaagcagagcccgttgtctgggccccacaccactgcaggcaggtggatagaagtgcggcccctctcatagtatgcccataagtcagggcatagggcagaactacctgtcatgttgctacaccatcctgtcttctcagcatctccttgcctgttttctttattagtccaaaggaaaacaacagcaacaaaatctgtttttaaaatgtcttatatgaacatatatcaaatatccatgcgctgaaacccacataccatcacttggcaattttttagaataagaccccattattatctattgctataaacctagccagttctcttgctcttctgtattttcctatttccctgccatcatctgctatttctgccacttctcttagactccttgtctgcaaagcccaagctagaactcactgtctatggcagaaggacatccagagcccattctggagttttgttttttccttctgccagatgctttgtgtcctgtcttccttcctcctcatatttctgtttctcatttgtgttcagttttgtgcagcattgctagcactgcttttgtgaccagaaaaggccataacatggtccaggatcatcattcttctgactctagatgggacacttgacagtgacttgaaacatttgcatattcaggaatgcatgagatttcaagagagcctacagtatgaaatcattttcacaaaataagcagcttgcttctgaaatgctgtctttcccagtagctactcacctgcctctggtggctgggattcagatgccacaaaactgtcagtatctatagaccaggtctgtgccacctcctctctcctctgtgctcagtgaggaggcagtaaatgaagttacaggctagcacaatacctaactcatgtttcccagtacacctgtagatattactgtacttttatgttctcaagaaataagttgttgcctattcagtgttacagatttctttgtttctttttaattaaaatacaagaagcagctgaggaaagggagacaaggtattttatttctgactgattttagaaaaaacttgtgtacatgtgtttggaactgttgaaatgccaagttttctgtataagtgtttttgtaattaaactttcagattttctttgttttttaagaagttgatgtgcttgtttgacatttgtctcattaaaacttttctacgttgaattca

SEQ ID NO: 13603 - DNA, 4112 bp, Homo sapiens
  source 1..4112: mol_type = unassigned DNA
accttgcgtaaccacgtagtccttcgccgcattggggcaaaataatcccttcatttttgtgaaggtaccgtggaaaatatttcatttttcttctcaccggagcaattgtaaatgctatgcggtaagaggagttacctgtggaaaggtggttaagagattaggtaaagaaaaggaaaggacaccaaaataaagtgctgcggaagaatttttgtccagctgtgagacgacgagtgcgtgaagtgaaggcgattgagaggggctgagggaattgtcctctgtggaagggactttcttttggccctaggccccttcctgcccctgtcgtcagcagagtctctacaaggaagataacggactgtaaaattctataaagcaaagctacacatcacttgacaccatacaccatcttggttacataatgaagagagatggaaaacttgatgactagctccaccctaccgcccctttttgcagatgaagacggttccaaggagagtaatgatctggctaccactgggttaaatcacccagaggttccatacagtagtggcgccacatcatccaccaacaatccagaatttgtggaggatctctctcaaggtcagttgcttcagagtgagtcttcaaatgcagcagaaggcaatgaacagaggcatgaagatgagcaacgaagtaaacgaggaggttggtccaaaggaagaaagaggaagaaacctcttcgagacagcaatgcacccaaatccccccttacaggatatgttcggttcatgaatgagcgtcgagaacaacttcgagcaaagagaccagaagtcccatttccagaaatcacaaggatgttaggcaatgaatggagtaaactgcctcctgaggaaaaacagcgctaccttgatgaagcagacagagataaggagcgttacatgaaggaactggaacagtatcagaaaacagaggcctacaaggtcttcagtaggaaaacccaggaccgtcagaaaggcaaatctcataggcaagatgcagcccggcaggccactcatgatcatgagaaagaaacagaggtaaaggaacggtctgtttttgacatccctatatttacagaggaattcttgaaccatagcaaagctcgggaagcagagctccgccagcttcgcaaatccaacatggagtttgaggagaggaatgcagccctgcaaaagcacgtggagagcatgcgcacagcagtggagaagctggaggtggatgtgatccaggagcggagccgcaacacagtcttacagcagcacctggagaccctgcggcaggtgctgaccagcagctttgccagcatgcccttgcctggaagtggagagacacctacagtggacaccattgactcatatatgaacagactgcacagtattattttagctaatccccaagacaatgaaaacttcatagctacagttcgagaagttgtgaacagactcgatcgttagggaatggtcttagaactccaagatgttccataagtgtttttacttgtgaggaatgagaagccatccatggaaatttgaactgagtgggggcagagaaagagtgcagatccctttgcttgtgaaagaattatcagtgagtgaaaggccatcaccccaggaagccaaatgagggagcagcaacatgtatatgagcttcctatggaattgtccttatgtgaagctttgaaggtgtacagccactctcccgggtcttcaggttcctaccatttccatttctgttaaagtggatctgcatatcttcagcttactaggtgacccggatgctgacatctgctgctgcagaaaggaagacttttcattgtaatttcgcttagacccttttatcagtggagctccagttttcttacctagctgtcacttttttaaatgcctctgggggttatttttgctttccttggcccccaccaatttatacatctccattttctgacctctggactaactggttgctcagcaaggttctgaaggagagtttcttgcattggacaggcccagtcttctcccatcattgccctgctgtgactccaaagaaaggagcttcttgctgacagtgccctgtggagcaaggctgtgtttcctaccccacacggtgctcagtgggtgccagccctcagtgtggctttgtgattgctgccctaaaggagaatgctctttccttcctcactggtactgcctgctgttttctaagcattgctcctgcacagacatggagtcccagccccagcaaggctcttctgttcccatctgttgacaatgtcttgtggagcatttttgctgaggaaaaggtcacttgtaaacagaggagaaagggaaagagtacaaagccctaagtttattgtaagtgaaaactgagggaattcctgtcttctttaggagtaatgattcatagatctagataggtggaaatatcattcaaaatagtcacttgagctcacaaaaaaagcaaggaagaattctcatgtcctttgtcttccttctgtagccattaactgctgaatccatgtgaggaagacaggcttcccttccttccccctccttagtgattttttctttaacagcataagtaaagaggactttctggttcatttttgtttgttttgttttgttttgttttgtttacagatgaggtcttcctgtgttgcccaggctggagtgcggtggctattcacagatgctatcatagcacactacagcctacaactcttgggctcaagcatcacgcctagcagtttctggttcctttaacagcaaaaggaaagagaggttctgattcttacctcagggttttttggttgttcattgtttttgtttttgtttttgttttgacactgcagagcacaaggctaaaggttacagctgagatctttggaaccaaaggcagagcaagcagagcccgttgtctgggccccacaccactgcaggcaggtggatagaagtgcggcccctctcatagtatgcccataagtcagggcatagggcagaactacctgtcatgttgctacaccatcctgtcttctcagcatctccttgcctgttttctttattagtccaaaggaaaacaacagcaacaaaatctgtttttaaaatgtcttatatgaacatatatcaaatatccatgcgctgaaacccacataccatcacttggcaattttttagaataagaccccattattatctattgctataaacctagccagttctcttgctcttctgtattttcctatttccctgccatcatctgctatttctgccacttctcttagactccttgtctgcaaagcccaagctagaactcactgtctatggcagaaggacatccagagcccattctggagttttgttttttccttctgccagatgctttgtgtcctgtcttccttcctcctcatatttctgtttctcatttgtgttcagttttgtgcagcattgctagcactgcttttgtgaccagaaaaggccataacatggtccaggatcatcattcttctgactctagatgggacacttgacagtgacttgaaacatttgcatattcaggaatgcatgagatttcaagagagcctacagtatgaaatcattttcacaaaataagcagcttgcttctgaaatgctgtctttcccagtagctactcacctgcctctggtggctgggattcagatgccacaaaactgtcagtatctatagaccaggtctgtgccacctcctctctcctctgtgctcagtgaggaggcagtaaatgaagttacaggctagcacaatacctaactcatgtttcccagtacacctgtagatattactgtacttttatgttctcaagaaataagttgttgcctattcagtgttacagatttctttgtttctttttaattaaaatacaagaagcagctgaggaaagggagacaaggtattttatttctgactgattttagaaaaaacttgtgtacatgtgtttggaactgttgaaatgccaagttttctgtataagtgtttttgtaattaaactttcagattttctttgttttttaagaagttgatgtgcttgtttgacatttgtctcattaaaacttttctacgttgaa

SEQ ID NO: 13604 - DNA, 558 bp, Homo sapiens
  source 1..558: mol_type = unassigned DNA
aagcaaggcgagcttgggggtggccccagtcgagatgcccttcaccccttgaagatcacccctcttttggtggtggtggtactgagagatggaaaacttgatgactagctccaccctaccgcccctttttgcagatgaagacggttccaaggagagtaatgatctggctaccactgggttaaatcacccagaggttccatacagtagtggcgccacatcatccaccaacaatccagaatttgtggaggatctctctcaaggtcagttgcttcagagtgagtcttcaaatgcagcagaaggcaatgaacagaggcatgaagatgagcaacgaagtaaacgaggaggttggtccaaaggaagaaagaggaagaaacctcttcgagacagcaatgcacccaaatccccccttacaggatatgttcggttcatgaatgagcgtcgagaacaacttcgagcaaagagaccagaagtcccatttccagaaatcacaaggatgttaggcaatgaatggagtaaactgcctcctgaggaaaaacagcgctaccttgatgaagcaga

SEQ ID NO: 13605 - DNA, 631 bp, Homo sapiens
  source 1..631: mol_type = unassigned DNA
gacaaggggcggggctgccgagaccttgggcccgcgtgagggaaaatttgggttcgattaagccgcagaggaaaagaccaggggagtctgggcccatttgggcgtcggggcccgctaggtcagccgtcatcgaatacagaatatgttttcgaggacgctaatatgtagtcatgaccaatttcagttcttctactttctgcgggccttcgcaataaaaaaaaaaaaactacatctcccagaaacctccacgaaaataaggctcaccttgcgtaaccacgtagtccttcgccgcattggggcaaaataatcccttcatttttgtgaagagagatggaaaacttgatgactagctccaccctaccgcccctttttgcagatgaagacggttccaaggagagtaatgatctggctaccactgggttaaatcacccagaggttccatacagtagtggcgccacatcatccaccaacaatccagaatttgtggaggatctctctcaaggtcagttgcttcagagtgagtcttcaaatgcagcagaaggcaatgaacagaggcatgaagatgagcaacgaagtaaacgaggaggttggtccaaaggaagaaagaggaagaaacctcttcgagacagca

SEQ ID NO: 13606 - DNA, 559 bp, Homo sapiens
  source 1..559: mol_type = unassigned DNA
aaggttaaaaggcccatttaccatacagtttaaattgatgtgtccaagtcaagaaaataaatatttagagagatggaaaacttgatgactagctccaccctaccgcccctttttgcagatgaagacggttccaaggagagtaatgatctggctaccactgggttaaatcacccagaggttccatacagtagtggcgccacatcatccaccaacaatccagaatttgtggaggatctctctcaaggtcagttgcttcagagtgagtcttcaaatgcagcagaaggcaatgaacagaggcatgaagatgagcaacgaagtaaacgaggaggttggtccaaaggaagaaagaggaagaaacctcttcgagacagcaatgcacccaaatccccccttacaggatatgttcggttcatgaatgagcgtcgagaacaacttcgagcaaagagaccagaagtcccatttccagaaatcacaaggatgttaggcaatgaatggagtaaactgcctcctgaggaaaaacagcgctaccttgatgaagcagacagagataaggagcgtt

SEQ ID NO: 13607 - DNA, 1596 bp, Homo sapiens
  source 1..1596: mol_type = unassigned DNA
gcgggcggttggttggagcgtcgcgcagtcgggaggtccgggaaagtttctttggaggtccggcccggagcggccatgtcccacggccccaagcagcccggcgcggccgccgcgccggcgggcggcaaggctccgggccagcatgggggcttcgtggtgactgtcaagcaagagcgcggcgagggtccacgcgcgggcgagaaggggtcccacgaggaggagccggtgaagaaacgcggctggcccaagggcaagaagcggaagaagattctgccgaatgggcccaaggcaccggtcacgggctacgtgcgcttcctgaacgagcggcgcgagcagatccgcacgcgccacccggatctgccctttcccgagatcaccaagatgctgggcgccgagtggagcaagctgcagccaacggaaaagcagcggtacctggatgaggccgagagagagaagcagcagtacatgaaggagctgcgggcgtaccagcagtctgaagcctataagatgtgcacggagaagatccaggagaagaagatcaagaaagaagactcgagctctgggctcatgaacactctcctgaatggacacaagggtggggactgcgatggcttctccaccttcgatgttcccatcttcactgaagagttcttggaccaaaacaaagcgcgtgaggcggagcttcggcgcttgcggaagatgaatgtggccttcgaggagcagaacgcggtactgcagaggcacacgcagagcatgagcagcgcgcgcgagcgtctggagcaggagctggcgctggaggagcggaggacgctggcgctgcagcagcagctccaggccgtgcgccaggcgctcaccgccagcttcgcctcactgccggtgccgggcacgggcgaaacgcccacgctgggcactctggacttctacatggcccggcttcacggagccatcgagcgcgaccccgcccagcacgagaagctcatcgtccgcatcaaggaaatcctggcccaggtcgccagcgagcacctgtgaggagtgggcgggcccacgatgcagaggagaagctgtgggcgcggccctgccacaccccaccccgtggacgagaggctgggggtccaccctttggggcctggtcccatcctgcaccttgggggctccagcccccctaaaattaaatttctgcagcatccctttagctttcaatctccccagccccctgaacccggaaaaagcactcgctgcgcgatacacccagaagaacctcacagccgagggtgcccctcctcggaggacagccacgcgctacactggctctccgggccacccccaggacacagggcagacgaaacccacccccagcacacggcaggaccccccaaattactcactacggggggctgtgccataggccacacaggaagctgccttgtggggacttacctggggtgtcccccgcatgcctgtaccccagatgggtgggggccggctttgcccatcctgctctcctccagccgagggaccctggtgggggtggctccttctcactgctggatccggactttttaaataaaaacaagtaaaatttgtgttttaagcttg

SEQ ID NO: 13608 - DNA, 1460 bp, Homo sapiens
  source 1..1460: mol_type = unassigned DNA
aaagtttctttggaggtccggcccggagcggccatgtcccacggccccaagcagcccggcgcggccgccgcgccggcgggcggcaaggctccgggccagcatgggggcttcgtggtgactgtcaagcaagagcgcggcgagggtccacgcgcgggcgagaaggggtcccacgaggaggagccggtgaagaaacgcggctggcccaagggcaagaagcggaagaagattctgccgaatgggcccaaggcaccggtcacgggctacgtgcgcttcctgaacgagtggagcaagctgcagccaacggaaaagcagcggtacctggatgaggccgagagagagaagcagcagtacatgaaggagctgcgggcgtaccagcagtctgaagcctataagatgtgcacggagaagatccaggagaagaagatcaagaaagaagactcgagctctgggctcatgaacactctcctgaatggacacaagggtggggactgcgatggcttctccaccttcgatgttcccatcttcactgaagagttcttggaccaaaacaaagcgcgtgaggcggagcttcggcgctgaagatgaatgtggccttcgaggagcagaacgcggtactgcagaggcacacgcagagcatgagcagcgcgcgcgagcgtctggagcaggagctggcgctggaggagcggaggacgctggcgctgcagcagcagctccaggccgtgcgccaggcgctcaccgccagcttcgcctcactgccggtgccgggcacgggcgaaacgcccacgctgggcactctggacttctacatggcccggcttcacggagccatcgagcgcgaccccgcccagcacgagaagctcatcgtccgcatcaaggaaatcctggcccaggtcgccagcgagcacctgtgaggagtgggcgggcccacgatgcagaggagaagctgtgggcgcggccctgccacaccccaccccgtggacgagaggctgggggtccacccgggcctggtcccatcctgcaccttgggggctccagcccccctaaaattaaatttctgcagcatccctttagctttcaatctccccagccccctgaacccggaaaaagcactcgcgatacacccagaagaacctcacagccgagggtgcccctcctcggaggacagacgcgctacactggctctccgggccacccccaggacacagggcagacgaaacccacccccagcacacggcaggaccccccaaattactcactacggggggctgtgccataggccacacaggaagctgccttgtggggacttacctggggtgtcccccgcatgcctgtaccccagatgggtgggggccggctttgcccatcctgctctcctccagccgagggaccctggtgggggtggctccttctcactgctggatccggactttttaaataaaaacaagtaaaatttgtgtttt

SEQ ID NO: 13609 - DNA, 711 bp, Homo sapiens
  source 1..711: mol_type = unassigned DNA
cgcgactcagcaacctccccaaccaatcgccggccggcgcgccgatcggtccggcccggagcggccatgtcccacggccccaagcagcccggcgcggccgccgcgccggcgggcggcaaggctccgggccagcatgggggcttcgtggtgactgtcaagcaagagcgcggcgagggtccacgcgcgggcgagaaggggtcccacgaggaggagccggtgaagaaacgcggctggcccaagggcaagaagcggaagaagattctgccgaatgggcccaaggcaccggtcacgggctacgtgcgcttcctgaacgagcggcgcgagcagatccgcacgcgccacccggatctgccctttcccgagatcaccaagatgctgggcgccgagtggagcaagctgcagccaacggaaaagcagcggtacctggatgaggccgagagagagaagcagcagtacatgaaggagctgcgggcgtaccagcagtctgaagcctataagatgtgcacggagaagatccaggagaagaagatcaagaaagaagactcgagctctgggctcatgaacactctcctgaatggacacaagggtggggactgcgatggcttctccaccttcgatgttcccatcttcactgaagagttcttggaccaaaacaaagcgcgtgaggcggagcttcggcgcttgcggaagatgaatgtggccttcgaggag

SEQ ID NO: 13610 - DNA, 759 bp, Homo sapiens
  source 1..759: mol_type = unassigned DNA
gggaaagtttctttggaggtgaaaacagccgcggaactccgggccctgagagggggcgggggtgcaggggtcccagggccgggccggggtctttcctggcccgggggaaaccggcccaggcctcccggggggggcaatcgcccaacaaaggattcttggggcgcccgccctcgaggacttccctgcccctggatccggcccccccagcgctccgggcccggcatcccggggctctccatcgcggggtaccccagttcgcggtctgccatcgggcagcccgggcgctactcacctccgcccgcgtccgtgttccaggtccggcccggagcggccatgtcccacggccccaagcagcccggcgcggccgccgcgccggcgggcggcaaggctccgggccagcatgggggcttcgtggtgactgtcaagcaagagcgcggcgagggtccacgcgcgggcgagaaggggtcccacgaggaggagccggtgaagaaacgcggctggcccaagggcaagaagcggaagaagattctgccgaatgggcccaaggcaccggtcacgggctacgtgcgcttcctgaacgagcggcgcgagcagatccgcacgcgccacccggatctgccctttcccgagatcaccaagatgctgggcgccgagtggagcaagctgcagccaacggaaaagcagcggtacctggatgaggccgagagagagaagcagcagtacatgaaggagctgcgggcgtaccagcagtctgaagcc

SEQ ID NO: 13611 - DNA, 1992 bp, Homo sapiens
  source 1..1992: mol_type = unassigned DNA
catttgcatggccccgccccctgagtgacacggctggcgcgggcgggcccgtcccccctgcccctgggtcgctctttttaagctcccctgagccggtgctgcgctcctctaattgggactccgagccggggctatttctggcgctggcgcggctccaagaaggcatccgcatttgctaccagcggcggccgcggcggagccaggccggtcctcagcgcccagcaccgccgctcccggcaacccggagcgcgcaccgcaggccggcggccgagctcgcgcatcccagccatcactcttccacctgctccttagagaagggaagatgagtgagtcgagctcgaagtccagccagcccttggcctccaagcaggaaaaggacggcactgagaagcggggccggggcaggccgcgcaagcagcctccggtgagtcccgggacagcgctggtagggagtcagaaggagcccagcgaagtgccaacacctaagagacctcggggccgaccaaagggaagcaaaaacaagggtgctgccaagacccggaaaaccaccacaactccaggaaggaaaccaaggggcagacccaaaaaactggagaaggaggaagaggagggcatctcgcaggagtcctcggaggaggagcagtgacccatgcgtgccgcctgctcctcactggaggagcagcttccttctgggactggacagctttgctccgctcccaccgcccccaccccttccccaggcccaccatcaccaccgcctctggccgccacccccatcttccacctgtgccctcaccaccacactacacagcacaccagccgctgcagggctcccatgggctgagtggggagcagttttcccctggcctcagttcccagctccccccgcccacccacgcatacacacatgccctcctggacaaggctaacatcccacttagccgcaccctgcacctgctgcgtccccactcccttggtggtggggacattgctctctgggcttttggtttgggggcgccctctctgctccttcactgttccctctggcttcccatagtggggcctgggagggttcccctggccttaaaaggggcccaagccccatctcatcctggcacgccctactccactgccctggcagcagcaggtgtggccaatggaggggggtgctggcccccaggattcccccagccaaactgtctttgtcaccacgtggggctcacttttcatccttccccaacttccctagtccccgtactaggttggacagcccccttcggttacaggaaggcaggaggggtgagtcccctactccctcttcactgtggccacagcccccttgccctccgcctgggatctgagtacatattgtggtgatggagatgcagtcacttattgtccaggtgaggcccaagagccctgtggccgccacctgaggtgggctggggctgctcccctaaccctactttgcttccgccactcagccatttccccctcctcagatggggcaccaataacaaggagctcaccctgcccgctcccaacccccctcctgctcctccctgccccccaaggttctggttccatttttcctctgttcacaaactacctctggacagttgtgttgttttttgttcaatgttccattcttcgacatccgtcattgctgctgctaccagcgccaaatgttcatcctcattgcctcctgttctgcccacgatcccctcccccaagatactctttgtggggaagaggggctggggcatggcaggctgggtgaccgactaccccagtcccagggaaggtggggccctgcccctaggatgctgcagcagagtgagcaagggggcccaaatcgaccataaagggtgtaggggccacctcctccccctgttctgttggggaggggtagccatgatttgtcccagcctggggctccctctctggtttcctatttgcagttacttgaataaaaaaaatatccttttctgg

SEQ ID NO: 13612 - DNA, 1948 bp, Homo sapiens
  source 1..1948: mol_type = unassigned DNA
ctttttaagctcccctgagccggtgctgcgctcctctaattgggactccgagccggggctatttctggcgctggcgcggctccaagaaggccgcgagttgtgcacccggcggagcccggaggagcccggcgcacctcgcgcggcggccgctcccgctggagccggagcccgagcccgagcccgggcccgggtgaggggcggggagagacacgggctgcggcgcggcaggagagtggggggtcgggcgccccccgcagctcagggaacatcccagccatcactcttccacctgctccttagagaagggaagatgagtgagtcgagctcgaagtccagccagcccttggcctccaagcaggaaaaggacggcactgagaagcggggccggggcaggccgcgcaagcagcctccgaaggagcccagcgaagtgccaacacctaagagacctcggggccgaccaaagggaagcaaaaacaagggtgctgccaagacccggaaaaccaccacaactccaggaaggaaaccaaggggcagacccaaaaaactggagaaggaggaagaggagggcatctcgcaggagtcctcggaggaggagcagtgacccatgcgtgccgcctgctcctcactggaggagcagcttccttctgggactggacagctttgctccgctcccaccgcccccaccccttccccaggcccaccatcaccaccgcctctggccgccacccccatcttccacctgtgccctcaccaccacactacacagcacaccagccgctgcagggctcccatgggctgagtggggagcagttttcccctggcctcagttcccagctccccccgcccacccacgcatacacacatgccctcctggacaaggctaacatcccacttagccgcaccctgcacctgctgcgtccccactcccttggtggtggggacattgctctctgggcttttggtttgggggcgccctctctgctccttcactgttccctctggcttcccatagtggggcctgggagggttcccctggccttaaaaggggcccaagccccatctcatcctggcacgccctactccactgccctggcagcagcaggtgtggccaatggaggggggtgctggcccccaggattcccccagccaaactgtctttgtcaccacgtggggctcacttttcatccttccccaacttccctagtccccgtactaggttggacagcccccttcggttacaggaaggcaggaggggtgagtcccctactccctcttcactgtggccacagcccccttgccctccgcctgggatctgagtacatattgtggtgatggagatgcagtcacttattgtccaggtgaggcccaagagccctgtggccgccacctgaggtgggctggggctgctcccctaaccctactttgcttccgccactcagccatttccccctcctcagatggggcaccaataacaaggagctcaccctgcccgctcccaacccccctcctgctcctccctgccccccaaggttctggttccatttttcctctgttcacaaactacctctggacagttgtgttgttttttgttcaatgttccattcttcgacatccgtcattgctgctgctaccagcgccaaatgttcatcctcattgcctcctgttctgcccacgatcccctcccccaagatactctttgtggggaagaggggctggggcatggcaggctgggtgaccgactaccccagtcccagggaaggtggggccctgcccctaggatgctgcagcagagtgagcaagggggcccaaatcgaccataaagggtgtaggggccacctcctccccctgttctgttggggaggggtagccatgatttgtcccagcctggggctccctctctggtttcctatttgcagttacttgaataaaaaaaatatccttttctgga

SEQ ID NO: 13613 - DNA, 1773 bp, Homo sapiens
  source 1..1773: mol_type = unassigned DNA
ctttttaagctcccctgagccggtgctgcgctcctctaattgggactccgagccggggctatttctggcgctggcgcggctccaagaaggccatcccagccatcactcttccacctgctccttagagaagggaagatgagtgagtcgagctcgaagtccagccagcccttggcctccaagcaggaaaaggacggcactgagaagcggggccggggcaggccgcgcaagcagcctccgaaggagcccagcgaagtgccaacacctaagagacctcggggccgaccaaagggaagcaaaaacaagggtgctgccaagacccggaaaaccaccacaactccaggaaggaaaccaaggggcagacccaaaaaactggagaaggaggaagaggagggcatctcgcaggagtcctcggaggaggagcagtgacccatgcgtgccgcctgctcctcactggaggagcagcttccttctgggactggacagctttgctccgctcccaccgcccccaccccttccccaggcccaccatcaccaccgcctctggccgccacccccatcttccacctgtgccctcaccaccacactacacagcacaccagccgctgcagggctcccatgggctgagtggggagcagttttcccctggcctcagttcccagctccccccgcccacccacgcatacacacatgccctcctggacaaggctaacatcccacttagccgcaccctgcacctgctgcgtccccactcccttggtggtggggacattgctctctgggcttttggtttgggggcgccctctctgctccttcactgttccctctggcttcccatagtggggcctgggagggttcccctggccttaaaaggggcccaagccccatctcatcctggcacgccctactccactgccctggcagcagcaggtgtggccaatggaggggggtgctggcccccaggattcccccagccaaactgtctttgtcaccacgtggggctcacttttcatccttccccaacttccctagtccccgtactaggttggacagcccccttcggttacaggaaggcaggaggggtgagtcccctactccctcttcactgtggccacagcccccttgccctccgcctgggatctgagtacatattgtggtgatggagatgcagtcacttattgtccaggtgaggcccaagagccctgtggccgccacctgaggtgggctggggctgctcccctaaccctactttgcttccgccactcagccatttccccctcctcagatggggcaccaataacaaggagctcaccctgcccgctcccaacccccctcctgctcctccctgccccccaaggttctggttccatttttcctctgttcacaaactacctctggacagttgtgttgttttttgttcaatgttccattcttcgacatccgtcattgctgctgctaccagcgccaaatgttcatcctcattgcctcctgttctgcccacgatcccctcccccaagatactctttgtggggaagaggggctggggcatggcaggctgggtgaccgactaccccagtcccagggaaggtggggccctgcccctaggatgctgcagcagagtgagcaagggggcccaaatcgaccataaagggtgtaggggccacctcctccccctgttctgttggggaggggtagccatgatttgtcccagcctggggctccctctctggtttcctatttgcagttacttgaataaaaaaaatatccttttctgga

SEQ ID NO: 13614 - DNA, 1981 bp, Homo sapiens
  source 1..1981: mol_type = unassigned DNA
ctttttaagctcccctgagccggtgctgcgctcctctaattgggactccgagccggggctatttctggcgctggcgcggctccaagaaggccgcgagttgtgcacccggcggagcccggaggagcccggcgcacctcgcgcggcggccgctcccgctggagccggagcccgagcccgagcccgggcccgggtgaggggcggggagagacacgggctgcggcgcggcaggagagtggggggtcgggcgccccccgcagctcagggaacatcccagccatcactcttccacctgctccttagagaagggaagatgagtgagtcgagctcgaagtccagccagcccttggcctccaagcaggaaaaggacggcactgagaagcggggccggggcaggccgcgcaagcagcctccggtgagtcccgggacagcgctggtagggagtcagaaggagcccagcgaagtgccaacacctaagagacctcggggccgaccaaagggaagcaaaaacaagggtgctgccaagacccggaaaaccaccacaactccaggaaggaaaccaaggggcagacccaaaaaactggagaaggaggaagaggagggcatctcgcaggagtcctcggaggaggagcagtgacccatgcgtgccgcctgctcctcactggaggagcagcttccttctgggactggacagctttgctccgctcccaccgcccccaccccttccccaggcccaccatcaccaccgcctctggccgccacccccatcttccacctgtgccctcaccaccacactacacagcacaccagccgctgcagggctcccatgggctgagtggggagcagttttcccctggcctcagttcccagctccccccgcccacccacgcatacacacatgccctcctggacaaggctaacatcccacttagccgcaccctgcacctgctgcgtccccactcccttggtggtggggacattgctctctgggcttttggtttgggggcgccctctctgctccttcactgttccctctggcttcccatagtggggcctgggagggttcccctggccttaaaaggggcccaagccccatctcatcctggcacgccctactccactgccctggcagcagcaggtgtggccaatggaggggggtgctggcccccaggattcccccagccaaactgtctttgtcaccacgtggggctcacttttcatccttccccaacttccctagtccccgtactaggttggacagcccccttcggttacaggaaggcaggaggggtgagtcccctactccctcttcactgtggccacagcccccttgccctccgcctgggatctgagtacatattgtggtgatggagatgcagtcacttattgtccaggtgaggcccaagagccctgtggccgccacctgaggtgggctggggctgctcccctaaccctactttgcttccgccactcagccatttccccctcctcagatggggcaccaataacaaggagctcaccctgcccgctcccaacccccctcctgctcctccctgccccccaaggttctggttccatttttcctctgttcacaaactacctctggacagttgtgttgttttttgttcaatgttccattcttcgacatccgtcattgctgctgctaccagcgccaaatgttcatcctcattgcctcctgttctgcccacgatcccctcccccaagatactctttgtggggaagaggggctggggcatggcaggctgggtgaccgactaccccagtcccagggaaggtggggccctgcccctaggatgctgcagcagagtgagcaagggggcccaaatcgaccataaagggtgtaggggccacctcctccccctgttctgttggggaggggtagccatgatttgtcccagcctggggctccctctctggtttcctatttgcagttacttgaataaaaaaaatatccttttctgga

SEQ ID NO: 13615 - DNA, 1848 bp, Homo sapiens
  source 1..1848: mol_type = unassigned DNA
ggtccccagcagcaagaggtggggggaggcaccagatggtatgagagcttccagggagacccgccaagatctccaggcaggccgggccaggctctctgggattccggactggcttcgcccaactggaaccccctcgatgagggggccccaggcagaccttatatgagcatcccagccatcactcttccacctgctccttagagaagggaagatgagtgagtcgagctcgaagtccagccagcccttggcctccaagcaggaaaaggacggcactgagaagcggggccggggcaggccgcgcaagcagcctccgaaggagcccagcgaagtgccaacacctaagagacctcggggccgaccaaagggaagcaaaaacaagggtgctgccaagacccggaaaaccaccacaactccaggaaggaaaccaaggggcagacccaaaaaactggagaaggaggaagaggagggcatctcgcaggagtcctcggaggaggagcagtgacccatgcgtgccgcctgctcctcactggaggagcagcttccttctgggactggacagctttgctccgctcccaccgcccccaccccttccccaggcccaccatcaccaccgcctctggccgccacccccatcttccacctgtgccctcaccaccacactacacagcacaccagccgctgcagggctcccatgggctgagtggggagcagttttcccctggcctcagttcccagctccccccgcccacccacgcatacacacatgccctcctggacaaggctaacatcccacttagccgcaccctgcacctgctgcgtccccactcccttggtggtggggacattgctctctgggcttttggtttgggggcgccctctctgctccttcactgttccctctggcttcccatagtggggcctgggagggttcccctggccttaaaaggggcccaagccccatctcatcctggcacgccctactccactgccctggcagcagcaggtgtggccaatggaggggggtgctggcccccaggattcccccagccaaactgtctttgtcaccacgtggggctcacttttcatccttccccaacttccctagtccccgtactaggttggacagcccccttcggttacaggaaggcaggaggggtgagtcccctactccctcttcactgtggccacagcccccttgccctccgcctgggatctgagtacatattgtggtgatggagatgcagtcacttattgtccaggtgaggcccaagagccctgtggccgccacctgaggtgggctggggctgctcccctaaccctactttgcttccgccactcagccatttccccctcctcagatggggcaccaataacaaggagctcaccctgcccgctcccaacccccctcctgctcctccctgccccccaaggttctggttccatttttcctctgttcacaaactacctctggacagttgtgttgttttttgttcaatgttccattcttcgacatccgtcattgctgctgctaccagcgccaaatgttcatcctcattgcctcctgttctgcccacgatcccctcccccaagatactctttgtggggaagaggggctggggcatggcaggctgggtgaccgactaccccagtcccagggaaggtggggccctgcccctaggatgctgcagcagagtgagcaagggggcccaaatcgaccataaagggtgtaggggccacctcctccccctgttctgttggggaggggtagccatgatttgtcccagcctggggctccctctctggtttcctatttgcagttacttgaataaaaaaaatatccttttctgg

SEQ ID NO: 13616 - DNA, 1726 bp, Homo sapiens
  source 1..1726: mol_type = unassigned DNA
aagctcccctgagccggtgctgcgctcctctaattgggactccgagccggggctatttctggcgctggcgcggctccaagaaggcatccgcatttgctaccagcggcggccgcggcggagccaggccggtcctcagcgcccagcaccgccgctcccggcaacccggagcgcgcaccgcaggccggcggccgagctcgcgcatcccagccatcactcttccacctgctccttagagaagggaagatgagtgagtcgagctcgaagtccagccagcccttggcctccaagcaggaaaaggacggcactgagaagcggggccggggcaggccgcgcaagcagcctccggtgagtcccgggacagcgctggtagggagtcagaaggagcccagcgaagtgccaacacctaagagacctcggggccgaccaaagggaagcaaaaacaagggagaaggaggaagaggagggcatctcgcaggagtcctcggaggaggagcagtgacccatgcgtgccgcctgctcctcactggaggagcagcttccttctgggactggacagctttgctccgctcccaccgcccccaccccttccccaggcccaccatcaccaccgcctctggccgccacccccatcttccacctgtgccctcaccaccacactacacagcacaccagccgctgcagggctcccatgggctgagtggggagcagttttcccctggcctcagttcccagctccccccgcccacccacgcatacacacatgccctcctggacaaggctaacatcccacttagccgcaccctgcacctgctgcgtccccactcccttggtggtggggacattgctctctgggcttttggtttgggggcgccctctctgctccttcactgttccctctggcttcccatagtggggcctgggagggttcccctggccttaaaaggggcccaagccccatctcatcctggcacgccctactccactgccctggcagcagcaggtgtggccaatggaggggggtgctggcccccaggattcccccagccaaactgtctttgtcaccacgtggggctcacttttcatccttccccaacttccctagtccccgtactaggttggacagcccccttcggttacaggaaggcaggaggggtgagtcccctactccctcttcactgtggccacagcccccttgccctccgcctgggatctgagtacatattgtggtgatggagatgcagtcacttattgtccaggtgaggcccaagagccctgtggccgccacctgaggtgggctggggctgctcccctaaccctactttgcttccgccactcagccatttccccctcctcagatggggcaccaataacaaggagctcaccctgcccgctcccaacccccctcctgctcctccctgccccccaaggttctggttccatttttcctctgttcacaaactacctctggacagttgtgttgttttttgttcaatgttccattcttcgacatccgtcattgctgctgctaccagcgccaaatgttcatcctcattgcctcctgttctgcccacgatcccctcccccaagatactctttgtggggaagaggggctggggcatggcaggctgggtgaccgactaccccagtcccagggaaggtggggccctgcccctaggatgctgcagcagagtgagcaagggggcccaaatcgaccataaagggtgta

SEQ ID NO: 13617 - DNA, 1959 bp, Homo sapiens
  source 1..1959: mol_type = unassigned DNA
catttgcatggccccgccccctgagtgacacggctggcgcgggcgggcccgtcccccctgcccctgggtcgctctttttaagctcccctgagccggtgctgcgctcctctaattgggactccgagccggggctatttctggcgctggcgcggctccaagaaggcatccgcatttgctaccagcggcggccgcggcggagccaggccggtcctcagcgcccagcaccgccgctcccggcaacccggagcgcgcaccgcaggccggcggccgagctcgcgcatcccagccatcactcttccacctgctccttagagaagggaagatgagtgagtcgagctcgaagtccagccagcccttggcctccaagcaggaaaaggacggcactgagaagcggggccggggcaggccgcgcaagcagcctccgaaggagcccagcgaagtgccaacacctaagagacctcggggccgaccaaagggaagcaaaaacaagggtgctgccaagacccggaaaaccaccacaactccaggaaggaaaccaaggggcagacccaaaaaactggagaaggaggaagaggagggcatctcgcaggagtcctcggaggaggagcagtgacccatgcgtgccgcctgctcctcactggaggagcagcttccttctgggactggacagctttgctccgctcccaccgcccccaccccttccccaggcccaccatcaccaccgcctctggccgccacccccatcttccacctgtgccctcaccaccacactacacagcacaccagccgctgcagggctcccatgggctgagtggggagcagttttcccctggcctcagttcccagctccccccgcccacccacgcatacacacatgccctcctggacaaggctaacatcccacttagccgcaccctgcacctgctgcgtccccactcccttggtggtggggacattgctctctgggcttttggtttgggggcgccctctctgctccttcactgttccctctggcttcccatagtggggcctgggagggttcccctggccttaaaaggggcccaagccccatctcatcctggcacgccctactccactgccctggcagcagcaggtgtggccaatggaggggggtgctggcccccaggattcccccagccaaactgtctttgtcaccacgtggggctcacttttcatccttccccaacttccctagtccccgtactaggttggacagcccccttcggttacaggaaggcaggaggggtgagtcccctactccctcttcactgtggccacagcccccttgccctccgcctgggatctgagtacatattgtggtgatggagatgcagtcacttattgtccaggtgaggcccaagagccctgtggccgccacctgaggtgggctggggctgctcccctaaccctactttgcttccgccactcagccatttccccctcctcagatggggcaccaataacaaggagctcaccctgcccgctcccaacccccctcctgctcctccctgccccccaaggttctggttccatttttcctctgttcacaaactacctctggacagttgtgttgttttttgttcaatgttccattcttcgacatccgtcattgctgctgctaccagcgccaaatgttcatcctcattgcctcctgttctgcccacgatcccctcccccaagatactctttgtggggaagaggggctggggcatggcaggctgggtgaccgactaccccagtcccagggaaggtggggccctgcccctaggatgctgcagcagagtgagcaagggggcccaaatcgaccataaagggtgtaggggccacctcctccccctgttctgttggggaggggtagccatgatttgtcccagcctggggctccctctctggtttcctatttgcagttacttgaataaaaaaaatatccttttctgg

SEQ ID NO: 13618 - DNA, 2159 bp, Homo sapiens
  source 1..2159: mol_type = unassigned DNA
ctttttaagctcccctgagccggtgctgcgctcctctaattgggactccgagccggggctatttctggcgctggcgcggctccaagaaggcgtgagttcgcggccgctccggtggcttcttttttttatatctataatttaattaaattatttatttattgaggccgcgcacgggccgtgcccagcttcctgcccctcgccatccttcgggggagggggaatatttttgtccccccgcctggctgtgacacataaataccccgcgggggcctgggcggcgagcacgcggcggcggcggtctctgagcgcctctgctctctcccggtttcagatccgcatttgctaccagcggcggccgcggcggagccaggccggtcctcagcgcccagcaccgccgctcccggcaacccggagcgcgcaccgcaggccggcggccgagctcgcgcatcccagccatcactcttccacctgctccttagagaagggaagatgagtgagtcgagctcgaagtccagccagcccttggcctccaagcaggaaaaggacggcactgagaagcggggccggggcaggccgcgcaagcagcctccggtgagtcccgggacagcgctggtagggagtcagaaggagcccagcgaagtgccaacacctaagagacctcggggccgaccaaagggaagcaaaaacaagggtgctgccaagacccggaaaaccaccacaactccaggaaggaaaccaaggggcagacccaaaaaactggagaaggaggaagaggagggcatctcgcaggagtcctcggaggaggagcagtgacccatgcgtgccgcctgctcctcactggaggagcagcttccttctgggactggacagctttgctccgctcccaccgcccccaccccttccccaggcccaccatcaccaccgcctctggccgccacccccatcttccacctgtgccctcaccaccacactacacagcacaccagccgctgcagggctcccatgggctgagtggggagcagttttcccctggcctcagttcccagctccccccgcccacccacgcatacacacatgccctcctggacaaggctaacatcccacttagccgcaccctgcacctgctgcgtccccactcccttggtggtggggacattgctctctgggcttttggtttgggggcgccctctctgctccttcactgttccctctggcttcccatagtggggcctgggagggttcccctggccttaaaaggggcccaagccccatctcatcctggcacgccctactccactgccctggcagcagcaggtgtggccaatggaggggggtgctggcccccaggattcccccagccaaactgtctttgtcaccacgtggggctcacttttcatccttccccaacttccctagtccccgtactaggttggacagcccccttcggttacaggaaggcaggaggggtgagtcccctactccctcttcactgtggccacagcccccttgccctccgcctgggatctgagtacatattgtggtgatggagatgcagtcacttattgtccaggtgaggcccaagagccctgtggccgccacctgaggtgggctggggctgctcccctaaccctactttgcttccgccactcagccatttccccctcctcagatggggcaccaataacaaggagctcaccctgcccgctcccaacccccctcctgctcctccctgccccccaaggttctggttccatttttcctctgttcacaaactacctctggacagttgtgttgttttttgttcaatgttccattcttcgacatccgtcattgctgctgctaccagcgccaaatgttcatcctcattgcctcctgttctgcccacgatcccctcccccaagatactctttgtggggaagaggggctggggcatggcaggctgggtgaccgactaccccagtcccagggaaggtggggccctgcccctaggatgctgcagcagagtgagcaagggggcccaaatcgaccataaagggtgtaggggccacctcctccccctgttctgttggggaggggtagccatgatttgtcccagcctggggctccctctctggtttcctatttgcagttacttgaataaaaaaaatatccttttctgg

SEQ ID NO: 13619 - DNA, 1529 bp, Homo sapiens
  source 1..1529: mol_type = unassigned DNA
cttgaatcttggggcaggaactcagaaaacttccagcccgggcagcgcgcgcttggtgcaagactcaggagctagcagcccgtccccctccgactctccggtgccgccgctgcctgctcccgccaccctaggaggcgcggtgccacccactactctgtcctctgcctgtgctccgtgcccgaccctatcccggcggagtctccccatcctcctttgctttccgactgcccaaggcactttcaatctcaatctcttctctctctctctctctctctctctctctctctctctctctctctctctctctctcgcagggtggggggaagaggaggaggaattctttccccgcctaacatttcaagggacacaattcactccaagtctcttccctttccaagccgcttccgaagtgctcccggtgcccgcaactcctgatcccaacccgcgagaggagcctctgcgacctcaaagcctctcttccttctccctcgcttccctcctcctcttgctacctccacctccaccgccacctccacctccggcacccacccaccgccgccgccgccaccggcagcgcctcctcctctcctcctcctcctcccctcttctctttttggcagccgctggacgtccggtgttgatggtggcagcggcggcagcctaagcaacagcagccctcgcagcccgccagctcgcgctcgccccgccggcgtccccagccctatcacctcatctcccgaaaggtgctgggcagctccggggcggtcgaggcgaagcggctgcagcggcggtagcggcggcgggaggcaggatgagcgcacgcggtgagggcgcggggcagccgtccacttcagcccagggacaacctgccgccccagcgcctcagaagagaggacgcggccgccccaggaagcagcagcaagaaccaaccggtgagccctctcctaagagacccaggggaagacccaaaggcagcaaaaacaagagtccctctaaagcagctcaaaagaaagcagaagccactggagaaaaacggccaagaggcagacctaggaaatgggacaatctactaccaagaaccagctccaagaagaaaacatctctgggaaacagtaccaaaaggagtcactgaattgtcattggaggagtccaggatagctcttcatgttattttcaccttgaggaattgtccattacatctatgagccttatgtgtggctttctccgatatagaaacctatcaggtgtcttttagatcatttcaaaacactggcttattctttcttatgtttccaactgaagtctgcatcccaagatgtagtttcactgctaccccatatggcacccttgtacgaatttgaaaaaagtactcactctaggcacatgcagagccatgcctgcggggacagcttagagagtagagggtgggctgaactccagttactctcgtacagggatccacctttttgcagaaatcacagtgtggctatggtgtggtttgatttcataaaacagatgcttaaaaagta

SEQ ID NO: 13620 - DNA, 611 bp, Homo sapiens
  source 1..611: mol_type = unassigned DNA
agcaacagcagccctcgcagcccgccagctcgcgctcgccccgccggcgtccccagccctatcacctcatctcccgaaaggtgctgggcagctccggggcggtcgaggcgaagcggctgcagcggcggtagcggcggcgggaggcaggatgagcgcacgcggtgagggcgcggggcagccgtccacttcagcccagggacaacctgccgccccagcgcctcagaagagaggacgcggccgccccaggaagcagcagcaagaaccaaccggtgagccctctcctaagagacccaggggaagacccaaaggcagcaaaaacaagagtccctctaaagcagctcaaaagaaagcagaagccactggagaaaaacggccaagaggcagacctaggaaatggccacaacaagttgttcagaagaagcctgctcaggtcaatgttgccttgcctgggaaggaccacccgggcaatcttatatatctactgttctctaaaaatgccacttagaagagaattgaaacttccaaacacatgaaaggatccaaggaaagtgtcttcaaacaattacatatgagctttaagtggaataaaaacagagttaccatgaaaaaaa

SEQ ID NO: 13621 - DNA, 1398 bp, Homo sapiens
  source 1..1398: mol_type = unassigned DNA
cttgaatcttggggcaggaactcagaaaacttccagcccgggcagcgcgcgcttggtgcaagactcaggagctagcagcccgtccccctccgactctccggtgccgccgctgcctgctcccgccaccctaggaggcgcggtgccacccactactctgtcctctgcctgtgctccgtgcccgaccctatcccggcggagtctccccatcctcctttgctttccgactgcccaaggcactttcaatctcaatctcttctctctctctctctctctctctctctctctctctctctctctctctctctctctcgcagggtggggggaagaggaggaggaattctttccccgcctaacatttcaagggacacaattcactccaagtctcttccctttccaagccgcttccgaagtgctcccggtgcccgcaactcctgatcccaacccgcgagaggagcctctgcgacctcaaagcctctcttccttctccctcgcttccctcctcctcttgctacctccacctccaccgccacctccacctccggcacccacccaccgccgccgccgccaccggcagcgcctcctcctctcctcctcctcctcccctcttctctttttggcagccgctggacgtccggtgttgatggtggcagcggcggcagcctaagcaacagcagccctcgcagcccgccagctcgcgctcgccccgccggcgtccccagccctatcacctcatctcccgaaaggtgctgggcagctccggggcggtcgaggcgaagcggctgcagcggcggtagcggcggcgggaggcaggatgagcgcacgcggtgagggcgcggggcagccgtccacttcagcccagggacaacctgccgccccagcgcctcagaagagaggacgcggccgccccaggaagcagcagcaagaaccaaccggtgagccctctcctaagagacccaggggaagacccaaaggcagcaaaaacaagagtccctctaaagcagctcaaaagaaagcagaagccactggagaaaaacggccaagaggcagacctaggaaatgggaggagttttacattgcagcttagaagcctttcttccaatagcagagatttggtgtcatgtggtgttcatcagtttgaaaagaagtatttctgctgtttgcctcaagatgtacatacagagatgtgctgattctcagaacttctatagaattccattagccagtcctgccaattgaaatttggcatttaattatttgcatttttctattcttgcctaggaaaggagctcgtcacatacctagtttagtgatggaaagtatttggagaaagttttagagagtggggctcaggctcaagaatacaatgaagtaataaagttgttaacctcatgtataaaa

SEQ ID NO: 13622 - DNA, 4473 bp, Homo sapiens
  source 1..4473: mol_type = unassigned DNA
cagcccgggatccccggcctgtccctttaaccccgccgccgggcgggagcacgtgagcggggctccgggtggcacccgggcgccgccgccgccgaggcagttgtatttcgaacgctgcctctggctagcagccaggcgccttggctcggcggtccgcctggcctccctcctcctcatacttttcttcctgcgcaaccccctcccctttatccgcccacgattagaggtgggcactccccccaccaccaccccctccccaagcgcaagcgcgtgcacgcacacacaccacacacactcacactcacacacactcacacacactcatcccacttgaatcttggggcaggaactcagaaaacttccagcccgggcagcgcgcgcttggtgcaagactcaggagctagcagcccgtccccctccgactctccggtgccgccgctgcctgctcccgccaccctaggaggcgcggtgccacccactactctgtcctctgcctgtgctccgtgcccgaccctatcccggcggagtctccccatcctcctttgctttccgactgcccaaggcactttcaatctcaatctcttctctctctctctctctctctctctctctctctctctctctctctctctctctctcgcagggtggggggaagaggaggaggaattctttccccgcctaacatttcaagggacacaattcactccaagtctcttccctttccaagccgcttccgaagtgctcccggtgcccgcaactcctgatcccaacccgcgagaggagcctctgcgacctcaaagcctctcttccttctccctcgcttccctcctcctcttgctacctccacctccaccgccacctccacctccggcacccacccaccgccgccgccgccaccggcagcgcctcctcctctcctcctcctcctcccctcttctctttttggcagccgctggacgtccggtgttgatggtggcagcggcggcagcctaagcaacagcagccctcgcagcccgccagctcgcgctcgccccgccggcgtccccagccctatcacctcatctcccgaaaggtgctgggcagctccggggcggtcgaggcgaagcggctgcagcggcggtagcggcggcgggaggcaggatgagcgcacgcggtgagggcgcggggcagccgtccacttcagcccagggacaacctgccgccccagcgcctcagaagagaggacgcggccgccccaggaagcagcagcaagaaccaaccggtgagccctctcctaagagacccaggggaagacccaaaggcagcaaaaacaagagtccctctaaagcagctcaaaagaaagcagaagccactggagaaaaacggccaagaggcagacctaggaaatggccacaacaagttgttcagaagaagcctgctcaggaggaaactgaagagacatcctcacaagagtctgccgaagaggactagggggcgccaacgttcgatttctacctcagcagcagttggatcttttgaagggagaagacactgcagtgaccacttattctgtattgccatggtctttccactttcatctggggtggggtggggtggggtgggggaggggggggtggggtggggagaaatcacataaccttaaaaaggactatattaatcaccttctttgtaatcccttcacagtcccaggtttagtgaaaaactgctgtaaacacaggggacacagcttaacaatgcaacttttaattactgttttcttttttcttaacctactaatagtttgttgatctgataagcaagagtgggcgggtgagaaaaaccgaattgggtttagtcaatcactgcactgcatgcaaacaagaaacgtgtcacacttgtgacgtcgggcattcatataggaagaacgcggtgtgtaacactgtgtacacctcaaataccaccccaacccactccctgtagtgaatcctctgtttagaacaccaaagataaggactagatactactttctctttttcgtataatcttgtagacacttacttgatgatttttaactttttatttctaaatgagacgaaatgctgatgtatcctttcattcagctaacaaactagaaaaggttatgttcatttttcaaaaagggaagtaagcaaacaaatattgccaactcttctatttatggatatcacacatatcagcaggagtaataaatttactcacagcacttgttttcaggacaacacttcattttcaggaaatctacttcctacagagccaaaatgccatttagcaataaataacacttgtcagcctcagagcatttaaggaaactagacaagtaaaattatcctctttgtaatttaatgaaaaggtacaacagaataatgcatgatgaactcacctaattatgaggtgggaggagcgaaatctaaatttcttttgctatagttatacatcaatttaaaaagcaaaaaaaaaaaaggggggggcaatctctctctgtgtctttctctctctctcttcctctccctctctcttttcattgtgtatcagtttccatgaaagacctgaataccacttacctcaaattaagcatatgtgttacttcaagtaatacgttttgacataagatggttgaccaaggtgcttttcttcggcttgagttcaccatctcttcattcaaactgcacttttagccagagatgcaatatatccccactactcaatactacctctgaatgttacaacgaatttacagtctagtacttattacatgctgctatacacaagcaatgcaagaaaaaaacttactgggtaggtgattctaatcatctgcagttctttttgtacacttaattacagttaaagaagcaatctccttactgtgtttcagcatgactatgtatttttctatgtttttttaattaaaaatttttaaaatacttgtttcagcttctctgctagatttctacattaacttgaaaattttttaaccaagtcgctcctaggttcttaaggataattttcctcaatcacactacacatcacacaagatttgactgtaatatttaaatattaccctccaagtctgtacctcaaatgaattctttaaggagatggactaattgacttgcaaagacctacctccagacttcaaaaggaatgaacttgttacttgcagcattcatttgttttttcaatgtttgaaatagttcaaactgcagctaaccctagtcaaaactatttttgtaaaagacatttgatagaaaggaacacgtttttacatacttttgcaaaataagtaaataataaataaaataaaagccaaccttcaaagaaacttgaagctttgtaggtgagatgcaacaagccctgcttttgcataatgcaatcaaaaatatgtgtttttaagattagttgaatataagaaaatgcttgacaaatattttcatgtattttacacaaatgtgatttttgtaatatgtctcaaccagatttattttaaacgcttcttatgtagagtttttatgcctttctctcctagtgagtgtgctgactttttaacatggtattatcaactgggccaggaggtagtttctcatgacggcttttgtcagtatggcttttagtactgaagccaaatgaaactcaaaaccatctctcttccagctgcttcagggaggtagtttcaaaggccacatacctctctgagactggcagatcgctcactgttgtgaatcaccaaaggagctatggagagaattaaaactcaacattactgttaactgtgcgttaaataagcaaataaacagtggctcataaaaataaaagtcgcattccatatctttggatgggccttttagaaacctcattggccagctcataaaatggaagcaattgctcatgttggccaaacatggtgcaccgagtgatttccatctctggtaaagttacacttttatttcctgtatgttgtacaatcaaaacacactactacctcttaagtcccagtatacctcatttttcatactgaaaaaaaaagcttgtggccaatggaacagtaagaacatcataaaatttttatatatatagtttatttttgtgggagataaattttataggactgttctttgctgttgttggtcgcagctacataagactggacatttaacttttctaccatttctgcaagttaggtatgtttgcaggagaaaagtatcaagacgtttaactgcagttgactttctccctgttcctttgagtgtcttctaactttattctttgttctttatgtagaattgctgtctatgattgtactttgaatcgcttgcttgttgaaaatatttctctagtgtattatcactgtctgttctgcacaataaacataacagcctctgtgatccccatgtgttttgattcctgctctttgttacagttccattaaatgagtaataaagtttggtcaaaacagatcaa

SEQ ID NO: 13623 - DNA, 1444 bp, Homo sapiens
  source 1..1444: mol_type = unassigned DNA
cttgaatcttggggcaggaactcagaaaacttccagcccgggcagcgcgcgcttggtgcaagactcaggagctagcagcccgtccccctccgactctccggtgccgccgctgcctgctcccgccaccctaggaggcgcggtgccacccactactctgtcctctgcctgtgctccgtgcccgaccctatcccggcggagtctccccatcctcctttgctttccgactgcccaaggcactttcaatctcaatctcttctctctctctctctctctctctctctctctctctctctctctctctctctctctcgcagggtggggggaagaggaggaggaattctttccccgcctaacatttcaagggacacaattcactccaagtctcttccctttccaagccgcttccgaagtgctcccggtgcccgcaactcctgatcccaacccgcgagaggagcctctgcgacctcaaagcctctcttccttctccctcgcttccctcctcctcttgctacctccacctccaccgccacctccacctccggcacccacccaccgccgccgccgccaccggcagcgcctcctcctctcctcctcctcctcccctcttctctttttggcagccgctggacgtccggtgttgatggtggcagcggcggcagcctaagcaacagcagccctcgcagcccgccagctcgcgctcgccccgccggcgtccccagccctatcacctcatctcccgaaaggtgctgggcagctccggggcggtcgaggcgaagcggctgcagcggcggtagcggcggcgggaggcaggatgagcgcacgcggtgagggcgcggggcagccgtccacttcagcccagggacaacctgccgccccagcgcctcagaagagaggacgcggccgccccaggaagcagcagcaagaaccaaccggtgagccctctcctaagagacccaggggaagacccaaaggcagcaaaaacaagagtccctctaaagcagctcaaaagaaagcagaagccactggagaaaaacggccaagaggcagacctaggaaatggtggttgctaatgaagagcccgtgctggtgaaggaagcctgctgatcccggaactggccttgcgcgcaagtggtgggatgacagacacattcccttccttgaactgcactcttttcccttgcactcagaggtggcccgagagagccccggtaggtcccggagtatgtttccatgctgcagaaggcatggagagattccaattgcgggggttcctccgtagcctttgcagctgaacgtctccatctcctgtccctgggcggtcagtcgctggcatggctctgtggagttttacctcccagttgtctatcaccaaagctgtccaccttgtccggaggggaatgagcgtggaaacccctggcggctgtactgacaaaagcaaccttag

SEQ ID NO: 13624 - DNA, 1508 bp, Homo sapiens
  source 1..1508: mol_type = unassigned DNA
cttgaatcttggggcaggaactcagaaaacttccagcccgggcagcgcgcgcttggtgcaagactcaggagctagcagcccgtccccctccgactctccggtgccgccgctgcctgctcccgccaccctaggaggcgcggtgccacccactactctgtcctctgcctgtgctccgtgcccgaccctatcccggcggagtctccccatcctcctttgctttccgactgcccaaggcactttcaatctcaatctcttctctctctctctctctctctctctctctctctctctctctctctctctctctctcgcagggtggggggaagaggaggaggaattctttccccgcctaacatttcaagggacacaattcactccaagtctcttccctttccaagccgcttccgaagtgctcccggtgcccgcaactcctgatcccaacccgcgagaggagcctctgcgacctcaaagcctctcttccttctccctcgcttccctcctcctcttgctacctccacctccaccgccacctccacctccggcacccacccaccgccgccgccgccaccggcagcgcctcctcctctcctcctcctcctcccctcttctctttttggcagccgctggacgtccggtgttgatggtggcagcggcggcagcctaagcaacagcagccctcgcagcccgccagctcgcgctcgccccgccggcgtccccagccctatcacctcatctcccgaaaggtgctgggcagctccggggcggtcgaggcgaagcggctgcagcggcggtagcggcggcgggaggcaggatgagcgcacgcggtgagggcgcggggcagccgtccacttcagcccagggacaacctgccgccccagcgcctcagaagagaggacgcggccgccccaggaagcagcagcaagaaccaaccggtgagccctctcctaagagacccaggggaagacccaaaggcagcaaaaacaagagtccctctaaagcagctcaaaagaaagcagaagccactggagaaaaacggccaagaggcagacctaggaaatggttaagagctcaggctctggattcagatggcttgggttcaaattctggtccgtcacttagctaactggagtcttaagaaaatcacatgacctttaaaggtccagtttcctcatctgcaaaaggaggagttttacattgcagcttagaagcctttcttccaatagcagagatttggtgtcatgtggtgttcatcagtttgaaaagaagtatttctgctgtttgcctcaagatgtacatacagagatgtgctgattctcagaacttctatagaattccattagccagtcctgccaattgaaatttggcatttaattatttgcatttttctattcttgcctaggaaaggagctcgtcacatacctagtttagtgatggaaagtatttggagaaagttttagagagtggggctcaggctcaagaatacaatgaagtaataaagttgttaacct

SEQ ID NO: 13625 - DNA, 1527 bp, Homo sapiens
  source 1..1527: mol_type = unassigned DNA
cttgaatcttggggcaggaactcagaaaacttccagcccgggcagcgcgcgcttggtgcaagactcaggagctagcagcccgtccccctccgactctccggtgccgccgctgcctgctcccgccaccctaggaggcgcggtgccacccactactctgtcctctgcctgtgctccgtgcccgaccctatcccggcggagtctccccatcctcctttgctttccgactgcccaaggcactttcaatctcaatctcttctctctctctctctctctctctctctctctctctctctctctctctctctctctcgcagggtggggggaagaggaggaggaattctttccccgcctaacatttcaagggacacaattcactccaagtctcttccctttccaagccgcttccgaagtgctcccggtgcccgcaactcctgatcccaacccgcgagaggagcctctgcgacctcaaagcctctcttccttctccctcgcttccctcctcctcttgctacctccacctccaccgccacctccacctccggcacccacccaccgccgccgccgccaccggcagcgcctcctcctctcctcctcctcctcccctcttctctttttggcagccgctggacgtccggtgttgatggtggcagcggcggcagcctaagcaacagcagccctcgcagcccgccagctcgcgctcgccccgccggcgtccccagccctatcacctcatctcccgaaaggtgctgggcagctccggggcggtcgaggcgaagcggctgcagcggcggtagcggcggcgggaggcaggatgagcgcacgcggtgagggcgcggggcagccgtccacttcagcccagggacaacctgccgccccagcgcctcagaagagaggacgcggccgccccaggaagcagcagcaagaaccaaccggtgagccctctcctaagagacccaggggaagacccaaaggcagcaaaaacaagagtccctctaaagcagctcaaaagaaagcagaagccactggagaaaaacggccaagaggcagacctaggaaatggctacagaactaattactgtgaaaagacataaaggaatgagaagaccaaaaccgtatcctcatgatactgacaaatcagttggactgagcacacatgaatcaactgaagaacacttctgccaagttcaagttgtgtaaaagtggaggatatgagtcttgtggggacacagagttgaggcatgagctattagtcagagccgtaaggctgcctgcaggagaagaactttggatggagttttgaaggaagtgaggaaaagatctgaattaacgtattaacacataaagcttgtcatctgaacaggactataagcatctcgaggtggttgctaatgaagagcccgtgctggtgaaggaagcctgctgatcccggaactggccttgcgcgcaagtggtgggatgacagacacattcccttccttgaactgcactcttttcccttgcactcagaggtggcccgagagagccccg

SEQ ID NO: 13626 - DNA, 8094 bp, Homo sapiens
  source 1..8094: mol_type = unassigned DNA
caacccgcgagaggagcctctgcgacctcaaagcctctcttccttctccctcgcttccctcctcctcttgctacctccacctccaccgccacctccacctccggcacccacccaccgccgccgccgccaccggcagcgcctcctcctctcctcctcctcctcccctcttctctttttggcagccgctggacgtccggtgttgatggtggcagcggcggcagcctaagcaacagcagccctcgcagcccgccagctcgcgctcgccccgccggcgtccccagccctatcacctcatctcccgaaaggtgctgggcagctccggggcggtcgaggcgaagcggctgcagcggcggtagcggcggcgggaggcaggatgagcgcacgcggtgagggcgcggggcagccgtccacttcagcccagggacaacctgccgccccagcgcctcagaagagaggacgcggccgccccaggaagcagcagcaagaaccaaccggtgagccctctcctaagagacccaggggaagacccaaaggcagcaaaaacaagagtccctctaaagcagctcaaaagaaagcagaagccactggagaaaaacggccaagaggcagacctaggaaatggccacaacaagttgttcagaagaagcctgctcaggtaagacatagtcattaatttttttctcccaattaatataaaaagtgaaatatgtactgaaaaatgtccccaaactaaaccttatttcgcattttcttacttttggttatcgtcctgcagtattcctgaaaatgtgttgtagccttcaaagttaggaatatatagtctgcaatcgtaccatgaaaacctcccaaaatgtaaggtcttaagtgtacaaagcaaatataaattcttttaaaaataaaactattttattacattgcctcatatgtaaaacaaatatttaatcttatcctatattttaccaattcttaaacatcaaattttgtccttccaactgactgtctatattctgttgacaccagacttatatttaatgattcatgactggaaacatatttcttcattgaacaatttcataatatttgatgatcccaaaacactccaaagaatgctagaatacttggaaattaagttatactaacgtgcagactgatgcattcttagatcttatttaaataactgaatcacagtctctgaagtttttggcaacatcaaattggaaaatagctctacgtctcttgccccatattcctggagcaccttgtcctcactataatctgtacatagaaacattaaaaaaacatatttattgaggaagcatatcttgaagaaaacaaaactgaagtataaattaaccaggattgctaataatgtgagccagtattaaagtataagaacgtcctgctgttctcttcccttctgtatgtaaatagtcattggagatccaggtggtatcatgctgaacctgctaaaataagtagtaagcagtgtcatgagctatcaaattaagtagaactctttcatgtaattttaagtatccatgaaatttttttccctagaagtctttacaaatctaccttgcatcctgttttcttaggtcaatgttgccttgcctgggaaggaccacccgggcaatcttatatatctactgttctctaaaaatgccacttagaagagaattgaaacttccaaacacatgaaaggatccaaggaaagtgtcttcaaacaattacatatgagctttaagtggaataaaaacagagttaccatgaaaaaaatcattttcattgctgctcccatacctaaaagctaagagtgggagaggggtgctaaaaaaaacccagtgtttgtgcgtctttaagcaatatttaaaaatatatacatataaacaaaaacttgacattttcattaggagaacccaaatatatttagcctctcatcctttaactgtacaaaaatcaagagaaagtaaattgataattctgtgcatttgagtcaaaggatgaggcagagttcacatttgcatcacaggctgtgaactatagattaatcactttatgtggtttgttaatattgattcagcccttgtgcttagtgtcatagggaagatgagtcaaacaaagaaaaacagtcactgcatctgagaaatgtatttatatgtatatgcctgtgtcctatccagtggtatgctggaaccagcccttgtgagcaaatagtgaacatctcttctgaattctgtgttcagtgatgtcaagtaggtagcttgaaatccactatggtgggagtatttacaccatggaaagtgacaaatactacaaatcaggacttttttttttcctgaggagcaagtagttaaacatttacctccccagcatggccccacccttcagcgattctgtttatttggtctggagatccatcatattttttatgaactccctaagtgagtttaatatgcaactagagatgaagacactccatgaaaacacatgagaagatgtctgaacatttgttgagcaaatgaccacagaatgtcaatgtgtatgggacacacgggggatacagatgaatgagtggaatgcctcaggttatcaaggggatgataagactggaattttcttgttttgtttgattttgttgttgttgagttgcagaagggaaaactgaaacataaattaagggaaagaaattacagatgagatgaatggcatatagaaaggtagagaggcaagaacaaatacatcataggtggagattattaatatggctagaactgattgcaagttggacattaatacatcaagaaataatataagtgaaatcacagttgtttttcccaagagaattcagaatctcaaagaagccacaagtggattgagttgatcttcaaggatcaatctggctatcttacagaccctgttccagatttgccctttataggagagttcagactcagaattataaaaaagaacatgagctcattgggctacctaatttatattgtgtaatgacacagtgatgaattatataaacatgaaaactacgtgaaagttcgtggaggataatgtaaattttacactacattcaaaagaatctcttccttttccatctgtttctttcaaaataccctcccagatggctttcccatgaggcaatctggattaactcagcctcatatccttccttcaacagcactttgaggggttacattcagaatcgcttttgaggtggtaaaaattttagcacaactaaatattttacatctaaagaaaagggctcagcagtgtgtaaacagacctacgtttttctttctggccccatcactgggctaattaatttctctttgctctatttatccatctaggaaatgggataataataatgccttttcccttactcccaagaacattacaagagatgcataattatataaattccaggtagcattattacattctgacttatttttgactgttaagtttttcatttccagagatttatagtctcaaaaattctagaatcctgatttattccaaagtacttcctctttgacgtcaagtgttttcattgaatgttttttaaggcaggaattttttagctggaggaaattttctagtaattgctccatcctactgttagggctaaagcattcagaatcatcttcctagcatttatgtcacacgtatacagaattacaaaggctctgtggtgaagtatcctcatactgcccaatgctgaagtctcctcagaacttcaagaatggcccttgttgaacctggggtacaaagcagcagagtttattctgaggagacaaattcagaattatgataaatctcagcacctgcatacgcacttgtgtttgtgtatacaagtacatgcatctagagagaaatgaaaagtgaaggaccaccctgttgcaggggtttgtgtttgcgaaatccaccaggtgtcatcagctgcaaacatcaagtgtgtcccataatcctaatgggagagttaatagtctcttaaaaatctaaaggggaaaatctgtaatatgtacgttaacttttttctaaaattccaaaaccaatgaaaacagcttacaaaataactctactatatttccacttcaagtgataaacaataaattgaaatcagctaattacaaataaatagaaatgaggctgggtgcagtggctcacacctgtaatcccaacactttgggaggtcaggagttcgagaccagcctggccaacatggtgaagccccatctctactaaatacacaaaaattagccgggcgtggcggcggccatctataatcccagctactcgggaggctgaggcaggagaatcacttgaacctggttggcgggggagggttgccgtgagcagagattgtgccactgcaccccagcctgggtgacagcgagactccatctcaaaagaaagaaagaaagaaatagaaagcagctcgttttttagcaatttgagcagttgaattctcagtcatatgaattacattcttcagtaggaaatggtggtaggtttttctttttctttttttaaaaaaagaaacaccataaaagtaccagattattattattattagagggtgctttgttactcaagtttttactttgataaaaataagtgtctctccaactgagatgtctaaaaaagtttcgctagtttatcaggtatttgatcgtttattgctatttcccttttaaggctttaatctgagacttgaagggactccctaaatgtaattcagacatttttctctcacctttcttctacccaaagggaaaacaggtttttaaaatcctaacagctctccaccctttcaatccactttccccattgttgtacagccctggcaaacgatgcctctggcaattaggacaggtataaacctgctccttttcaatttcccaatgagagaattgcaaagttttcagtttctaaaagactggaaacaaagctttctgtttcaaaaaaagagtttttacttgcaagtaacatcttctgtgggtggtgtgcacccgggcaaagaaatctcagtaagccttgattatcacgggatttcttccccctcaaaataaaatgttgaatgtttttacagagacttcaagggcagttttaaggatgtttatatttcagacaacctaaacattgtttggagcaaaatgagagatttcattttgggacaagcaagttgatgaattgcagtcagcatctcgttctcaaagaaggcatttttactgggggcttttagtctagacatacaaagagggaaggaggaaaggggaaagcattctcactctaacactcgtcttttacatggtaccttggccagtgcagtaaatagttcataataaatcagacttacaaatactcactcgtctactcactcaaggagcataatgatttatactgcctaagtcacaaagattaccgatgtatttattttcttgcttatgcactttcaagctagtaaaacatcttgtgggccagtaaatgtttagtaccaactggcaaaacatgaagaatcatatcaaaggttgccctaagttgcacggttttgttgtataggaaatactttttgacttaacctctgacctctgacatcaccaaggtcaagggaaaaggagagagcaaagtagaaaccaaggtttaacccttaataaagtagctcaaggacatagaagcacagggaaattggagggcagaggaagcgtatcaaaatgattattaactgtaaacagatgaagtaattagcttagctaacagttgtaatacaggaatattggcaggatgaagtcagcggttcttggcaggaaatgttttatagagatgacaacttctaacagaagtgaaagaacatcaatcaatttagggcaacttataaaactccaaaaagcaaaatttagtgtttctggacttgacaaatttgctgtgagagttttttttttaagtatgactgtttctgtgtggggaagtctgtggattaggctcaaaacaaaatggcagtggctgcctgcatttcctcttcatattgcagaattttcctctacattttgatgtgtactggataaaaaccaattgtttactcaatatataatctttcttcttactctccaaacttgctgacccaaattaatgtggaacaaatagcaactggctttaaaacctggtctttctaagaaaatccttaatggttgcatagaaatatgttgcattgcctcagacacttacattcaggaaatgtttgctggacactcagatgtctacagagaaattgttaacttactgttattgatatttttataatcttactcaaaagtcataactcaggataatgaaaaatgtttggtgcaataatgattaaaatccacaaatattctgttccctggccgcaaatacaacacctatgcaaaattttacacatctacaaaacaaagggaaaaggtttttcctagtctatgccattaataagcacatctggaatataacccttaagcagtctttaatcataatttaaagctactttgcataaaaataagaacattccacaacagctgtggaaacattgaaataaattttcttcttctgggccgggcacggtggctcatgcctgttatcccagcactttgggaggcccaggcagaagtattccttgagcccaggagtttgagaccagcctgagcaacatagtgagaccccatctctatttaaaaaaaaaaaaaattaccttcttttgaatactttgtttatgcaaaaatccttttgctttctttagctatttttttaaatgcagtgttcctgcagtaagaattgaacctggcatggaaaactgatcaaaccggtagtcctcagaaatcatcactcctgaaacttgcaattagtttatacctaaaatgatttccctatttgaaaaatgtgcctaccatttccagattttaaaaaaatggccctttatcccagaaaggagaaattcattgtatcccagagaccagcattacttctgttgcagtattttcagtgatggaactctgttgaggctacagacaagaaaagcaggagagcattttaggaatctaagattttttattttactttcctctggggaccttctttaatagtttttttctttcttaagaacctatccttgaatcataggtaaagaaataatcacagaatgagtaactgacattaataatcacagcttcacactatagtcttactggatttttacgtttttcagggtttccccaagtggtggtcacatttcttacacaactctgcagtgtagatagacatgtatagtcattactgggctgacacggtgggactgagacctgctagtgccgtggttggcatctatgattagtgaggtccaagatcaaccttctttacattaaacatgccctagcaagaccttcaacccaactttattaagctgatgctaacgcacacaaagaagtcctaacaattctatgtttttatatacataatgcaaaaataaagacaagatcaggtacaattgctgtcaatatctcaacttattgtctccttttgaaaaacataattcccgcctagcatttccaccagaatcccttgctcttgccaggttatattgtttatatatgttccatttaacatgttttttaaaaatctgctgtagagttttcctagttggaggaaataatcactttccattaagttaaacagtcccgataaattttaaatgaaaatatctgacagagaaatagaaaaactcagccttgtggtcttgccggtcacttagctacagatggaacttgaaaaactggttcctggtcattgctgctgaagagagccctttatttctgttgtgacaggactgactcaagatactcatgaacgtggaaaactcctaaatgtgtcattctgagttcctgagaagttgaacatacacagatgacaaaaaagaatgccatttagccataactaccctttctagattaccaagtatttgtaggtttattggcaagatagcttaaattacgtatgtatttctggcctgcaacatcatgtaatagaagagttgcagaattctttgcagttaag

SEQ ID NO: 13627 - DNA, 821 bp, Homo sapiens
  source 1..821: mol_type = unassigned DNA
gtaatgttacagagcggagagagtgaggaggctgcgtctggctcccgctctcacagccattgcagtacattgagctccatagagacagcaccggggcaagtgagagccggacgggcactgggcgactctgtgcctcgctgaggaaaaataactaaacatgggcaaaggagatcctaagaagccgagaggcaaaatgtcatcatatgcattttttgtgcaaacttgtcgggaggagcataagaagaagcacccagatgcttcagtcaacttctcagagttttctaagaagtgctcagagaggtggaagaccatgtctgctaaagagaaaggaaaatttgaagatatggcaaaagcggacaaggcccgttatgaaagagaaatgaaaacctatatccctcccaaaggggagacaaaaaagaagttcaaggatcccaatgcacccaagaggcctccttcggccttcttcctcttctgctctgagtatcgcccaaaaatcaaaggagaacatcctggcctgtccattggtgatgttgcgaagaaactgggagagatgtggaataacactgctgcagatgacaagcagccttatgaaaagaaggctgcgaagctgaaggaaaaatatgaaaagttctagttatttctggagttgctgtggatctacagatacgtgatattttggtataactagaatcttgatttctttcataaagttctgccatgttctatttctttccttaatgtttttttcttccctactgttttatcctccctttgctttggaaggatattgctgcatatcgagctaaaggaaagcctgatgc

SEQ ID NO: 13628 - DNA, 2319 bp, Homo sapiens
  source 1..2319: mol_type = unassigned DNA
atctcagggccaaaccgataggaaacgaggctgcctcgcggtggcaccgccaccccccaaccgggttccgagcaccggagctggctgctgctccctctttggagcaaagttttatgcaaagagggtgttttttgaaactttcggtgcacgaaaaataactaaacatgggcaaaggagatcctaagaagccgagaggcaaaatgtcatcatatgcattttttgtgcaaacttgtcgggaggagcataagaagaagcacccagatgcttcagtcaacttctcagagttttctaagaagtgctcagagaggtggaagaccatgtctgctaaagagaaaggaaaatttgaagatatggcaaaagcggacaaggcccgttatgaaagagaaatgaaaacctatatccctcccaaaggggagacaaaaaagaagttcaaggatcccaatgcacccaagaggcctccttcggccttcttcctcttctgctctgagtatcgcccaaaaatcaaaggagaacatcctggcctgtccattggtgatgttgcgaagaaactgggagagatgtggaataacactgctgcagatgacaagcagccttatgaaaagaaggctgcgaagctgaaggaaaaatatgaaaaggatattgctgcatatcgagctaaaggaaagcctgatgcagcaaaaaagggagttgtcaaggctgaaaaaagcaagaaaaagaaggaagaggaggaagatgaggaagatgaagaggatgaggaggaggaggaagatgaagaagatgaagatgaagaagaagatgatgatgatgaataagttggttctagcgcagttttttttttcttgtctataaagcatttaacccccctgtacacaactcactccttttaaagaaaaaaattgaaatgtaaggctgtgtaagatttgtttttaaactgtacagtgtctttttttgtatagttaacacactaccgaatgtgtctttagatagccctgtcctggtggtattttcaatagccactaaccttgcctggtacagtatgggggttgtaaattggcatggaaatttaaagcaggttcttgttggtgcacagcacaaattagttatatatggggatggtagttttttcatcttcagttgtctctgatgcagcttatacgaaataattgttgttctgttaactgaataccactctgtaattgcaaaaaaaaaaaaaaagttgcagctgttttgttgacattctgaatgcttctaagtaaatacaattttttttattagtattgttgtccttttcataggtctgaaatttttcttcttgaggggaagctagtcttttgcttttgcccattttgaatcacatgaattattacagtgtttatcctttcatatagttagctaataaaaagcttttgtctacacaccctgcatatcataatgggggtaaagttaagttgagatagttttcatccataactgaacatccaaaatcttgatcagttaagaaatttcacatagcccacttacatttacaaactgaagagtaatcaatctactcaaagcatgggattattagaatcaaacattttgaaagtctgtccttgaaggactaatagaaaagtatgttctaacctttacatgaggactctattctttaactcccattaccatgtaatggcagttatattttgcagttcccacattaaagaagacctgagaatgtatccccaaaagcgtgagcttaaaatacaagactgccatattaaattttttgttgacattagtctcagtgaagactatgaaaatgctggctatagatgtcttttcccatttatctaaatatggactgctcaggaaacgagactttccattacaagtatttttaattaattgggccagcttttcaaacaaagatgccacattcaaaatagggtatattttcctatattacggtttgcccctttataaatccaagtagataggaagaaagaagacaaactttgcatctcagtatgaattattcaatttatttgaatgatttttctttacaaaacaaactcattcattagtcatgtttatctgcttaggagtttagggaacaatttggcaattttgtggttttcgagattatcgttttcttaaagtgccagtattttaaaatagcgttcttgtaattttacacgcttttgtgatggagtgctgttttgttatataatttagacttggattctttccatttgcatttgtttatgtaatttcaggaggaatactgaacatctgagtcctggatgatactaataaactaataattgcagaggttttaaa

SEQ ID NO: 13629 - DNA, 2339 bp, Homo sapiens
  source 1..2339: mol_type = unassigned DNA
gccaataggagccgcgctggctggagagtaatgttacagagcggagagagtgaggaggctgcgtctggctcccgctctcacagccattgcagtacattgagctccatagagacagcaccggggcaagtgagagccggacgggcactgggcgactctgtgcctcgctgaggaaaaataactaaacatgggcaaaggagatcctaagaagccgagaggcaaaatgtcatcatatgcattttttgtgcaaacttgtcgggaggagcataagaagaagcacccagatgcttcagtcaacttctcagagttttctaagaagtgctcagagaggtggaagaccatgtctgctaaagagaaaggaaaatttgaagatatggcaaaagcggacaaggcccgttatgaaagagaaatgaaaacctatatccctcccaaaggggagacaaaaaagaagttcaaggatcccaatgcacccaagaggcctccttcggccttcttcctcttctgctctgagtatcgcccaaaaatcaaaggagaacatcctggcctgtccattggtgatgttgcgaagaaactgggagagatgtggaataacactgctgcagatgacaagcagccttatgaaaagaaggctgcgaagctgaaggaaaaatatgaaaaggatattgctgcatatcgagctaaaggaaagcctgatgcagcaaaaaagggagttgtcaaggctgaaaaaagcaagaaaaagaaggaagaggaggaagatgaggaagatgaagaggatgaggaggaggaggaagatgaagaagatgaagatgaagaagaagatgatgatgatgaataagttggttctagcgcagttttttttttcttgtctataaagcatttaacccccctgtacacaactcactccttttaaagaaaaaaattgaaatgtaaggctgtgtaagatttgtttttaaactgtacagtgtctttttttgtatagttaacacactaccgaatgtgtctttagatagccctgtcctggtggtattttcaatagccactaaccttgcctggtacagtatgggggttgtaaattggcatggaaatttaaagcaggttcttgttggtgcacagcacaaattagttatatatggggatggtagttttttcatcttcagttgtctctgatgcagcttatacgaaataattgttgttctgttaactgaataccactctgtaattgcaaaaaaaaaaaaaaagttgcagctgttttgttgacattctgaatgcttctaagtaaatacaattttttttattagtattgttgtccttttcataggtctgaaatttttcttcttgaggggaagctagtcttttgcttttgcccattttgaatcacatgaattattacagtgtttatcctttcatatagttagctaataaaaagcttttgtctacacaccctgcatatcataatgggggtaaagttaagttgagatagttttcatccataactgaacatccaaaatcttgatcagttaagaaatttcacatagcccacttacatttacaaactgaagagtaatcaatctactcaaagcatgggattattagaatcaaacattttgaaagtctgtccttgaaggactaatagaaaagtatgttctaacctttacatgaggactctattctttaactcccattaccatgtaatggcagttatattttgcagttcccacattaaagaagacctgagaatgtatccccaaaagcgtgagcttaaaatacaagactgccatattaaattttttgttgacattagtctcagtgaagactatgaaaatgctggctatagatgtcttttcccatttatctaaatatggactgctcaggaaacgagactttccattacaagtatttttaattaattgggccagcttttcaaacaaagatgccacattcaaaatagggtatattttcctatattacggtttgcccctttataaatccaagtagataggaagaaagaagacaaactttgcatctcagtatgaattattcaatttatttgaatgatttttctttacaaaacaaactcattcattagtcatgtttatctgcttaggagtttagggaacaatttggcaattttgtggttttcgagattatcgttttcttaaagtgccagtattttaaaatagcgttcttgtaattttacacgcttttgtgatggagtgctgttttgttatataatttagacttggattctttccatttgcatttgtttatgtaatttcaggaggaatactgaacatctgagtcctggatgatactaataaactaataattgcagaggttttaaa

SEQ ID NO: 13630 - DNA, 455 bp, Homo sapiens
  source 1..455: mol_type = unassigned DNA
agaagccctgcctttccagagacctaaagtgtaacgcaatcagagacctttgaggggctcgaggctcggcggcttccgcccctcagcaccagcagagaccccagttttcaggggacatgatcccatagtgtcgccctcacttttgaaggaaaaataactaaacatgggcaaaggagatcctaagaagccgagaggcaaaatgtcatcatatgcattttttgtgcaaacttgtcgggaggagcataagaagaagcacccagatgcttcagtcaacttctcagagttttctaagaagtgctcagagaggtggaagaccatgtctgctaaagagaaaggaaaatttgaagatatggcaaaagcggacaaggcccgttatgaaagagaaatgaaaacctatatccctcccaaaggggagacaaaaaagaagttcaaggatcccaatgcacccaagaggc

SEQ ID NO: 13631 - DNA, 1727 bp, Homo sapiens
  source 1..1727: mol_type = unassigned DNA
ggttccgagcaccggagctggctgctgctccctctttggagcaaagttttatgcaaagagggtgttttttgaaactttcggtgcacggtgattttttttttttaaggtcccataattaggaagagtcgactcgcttaggcccttgtttattccctatctagtgcaaagccacgaattggcagcatgttttctgacctttggtttggttggtttaaaatggtgttctagattttaaaatcgtttaagtgaccagttagatactcattcagagcagactcgggcggatagatagggaatactgtatgggtatatctttgtgtctagactttttgagatcgccctgaaggactgtttttgttttgttttgtttgcttggcatagccccttcaaggaatttaatctctcggccatattcttgtctgattttacggaggttgatgtcgctactgtgttaaataaccagtactttggttttcattcccttactaagtactttaaggtcttatatgtcataattttattgctaacatcaaatatttattttattttttagaaaaataactaaacatgggcaaaggagatcctaagaagccgagaggcaaaatgtcatcatatgcattttttgtgcaaacttgtcgggaggagcataagaagaagcacccagatgcttcagtcaacttctcagagttttctaagaagtgctcagagaggtggaagaccatgtctgctaaagagaaaggaaaatttgaagatatggcaaaagcggacaaggcccgttatgaaagagaaatgaaaacctatatccctcccaaaggggagacaaaaaagaagttcaaggatcccaatgcacccaagaggcctccttcggccttcttcctcttctgctctgagtatcgcccaaaaatcaaaggagaacatcctggcctgtccattggtgatgttgcgaagaaactgggagagatgtggaataacactgctgcagatgacaagcagccttatgaaaagaaggctgcgaagctgaaggaaaaatatgaaaagttctagttatttctggagttgctgtggatctacagatacgtgatattttggatattgctgcatatcgagctaaaggaaagcctgatgcagcaaaaaagggagttgtcaaggctgaaaaaagcaagaaaaagaaggaagaggaggaagatgaggaagatgaagaggatgaggaggaggaggaagatgaagaagatgaagatgaagaagaagatgatgatgatgaataagttggttctagcgcagttttttttttcttgtctataaagcatttaacccccctgtacacaactcactccttttaaagaaaaaaattgaaatgtaaggctgtgtaagatttgtttttaaactgtacagtgtctttttttgtatagttaacacactaccgaatgtgtctttagatagccctgtcctggtggtattttcaatagccactaaccttgcctggtacagtatgggggttgtaaattggcatggaaatttaaagcaggttcttgttggtgcacagcacaaattagttatatatggggatggtagttttttcatcttcagttgtctctgatgcagcttatacgaaataattgttgttctgttaactgaataccactctgtaattgcaaaaaaaaaaaaaaagttgcagctgttttgttgacattctgaatgcttctaagtaaatacaattttttttatta

SEQ ID NO: 13632 - DNA, 1282 bp, Homo sapiens
  source 1..1282: mol_type = unassigned DNA
gcagtgcgggcccggccggcctcggcccggtcgcggcggcggcggcggccgggcggcggggggagcggcgccgctgcgctcgctggaacatggctgactcgggcccggcgctgctggctggagagaaaacaaggcgggcgggcgggggagctgggcgcagcagttccgagaaaaataactaaacatgggcaaaggagatcctaagaagccgagaggcaaaatgtcatcatatgcattttttgtgcaaacttgtcgggaggagcataagaagaagcacccagatgcttcagtcaacttctcagagttttctaagaagtgctcagagaggtggaagaccatgtctgctaaagagaaaggaaaatttgaagatatggcaaaagcggacaaggcccgttatgaaagagaaatgaaaacctatatccctcccaaaggggagacaaaaaagaagttcaaggatcccaatgcacccaagaggcctccttcggccttcttcctcttctgctctgagtatcgcccaaaaatcaaaggagaacatcctggcctgtccattggtgatgttgcgaagaaactgggagagatgtggaataacactgctgcagatgacaagcagccttatgaaaagaaggctgcgaagctgaaggaaaaatatgaaaaggatattgctgcatatcgagctaaaggaaagcctgatgcagcaaaaaagggagttgtcaaggctgaaaaaagcaagaaaaagaaggaagaggaggaagatgaggaagatgaagaggatgaggaggaggaggaagatgaagaagatgaagatgaagaagaagatgatgatgatgaataagttggttctagcgcagttttttttttcttgtctataaagcatttaacccccctgtacacaactcactccttttaaagaaaaaaattgaaatgtaaggctgtgtaagatttgtttttaaactgtacagtgtctttttttgtatagttaacacactaccgaatgtgtctttagatagccctgtcctggtggtattttcaatagccactaaccttgcctggtacagtatgggggttgtaaattggcatggaaatttaaagcaggttcttgttggtgcacagcacaaattagttatatatggggatggtagttttttcatcttcagttgtctctgatgcagcttatacgaaataattgttgttctgttaactgaataccactctgtaattgcaaaaaaaaaaaaaaagttgcagctgttttgttgacattctgaatgcttctaagtaaatacaa

SEQ ID NO: 13633 - DNA, 4199 bp, Homo sapiens
  source 1..4199: mol_type = unassigned DNA
tttctgcggagggattacgctgacgaaagagacctgcttgcgcgtcgctgttccgtggtccgcgcgagcgtggtcgggagccgctggttcctggggtgacccgcggaggtgggagagggaagggcttccgaagccggcgggggtgccatggaccctctccgccggcgcggccttcacagctgggccgcgccgggcatccgtagtccgctctcccaaagcctcggtggagctgaagctgccacagagtgcatgttcacaaagggtcatcacacacggagctgcccctccctgtctccctagagcccatcttcgaggccaggggcttttctaccaggattctggggtgtttctcctcctttcctccctcccagatcttctcacggtaaggggagcagcgaaagcgcagggactttgcattccacgacccgttctgactagtcaacagccgatctgtccctgctgctctaattccagctgccctgccttgttttaacttcagagaaagggggagttctcatttgataagtttaagcctttgctttcgtaggaaggtcatgtggcttaagggacatcgtgaccgcgtatgctatttctgcctgtgcattctaaatcttgggggcagcatattccagaagtccttttggtcgattggttctgtgtcctaggataacaatttgtagtttctgaccatttctttacagaaaaaccacaattggtattttggactgcggggttttttagtggtctcaaactaaatgattatattctggaataatgctgacaatttggatagggtggtgtggaggaaacaagtctcgtgtagaagaaattatttagtaaaaaggattttagtttttggtacttctgaatgcaaatggccaaggaatccagcagtttgttggggtttctccagacaaaaataggctgaaaaataactaaacatgggcaaaggagatcctaagaagccgagaggcaaaatgtcatcatatgcattttttgtgcaaacttgtcgggaggagcataagaagaagcacccagatgcttcagtcaacttctcagagttttctaagaagtgctcagagaggtggaagaccatgtctgctaaagagaaaggaaaatttgaagatatggcaaaagcggacaaggcccgttatgaaagagaaatgaaaacctatatccctcccaaaggggagacaaaaaagaagttcaaggatcccaatgcacccaagaggcctccttcggccttcttcctcttctgctctgagtatcgcccaaaaatcaaaggagaacatcctggcctgtccattggtgatgttgcgaagaaactgggagagatgtggaataacactgctgcagatgacaagcagccttatgaaaagaaggctgcgaagctgaaggaaaaatatgaaaaggatattgctgcatatcgagctaaaggaaagcctgatgcagcaaaaaagggagttgtcaaggctgaaaaaagcaagaaaaagaaggaagaggaggaagatgaggaagatgaagaggatgaggaggaggaggaagatgaagaagatgaagatgaagaagaagatgatgatgatgaataagttggttctagcgcagttttttttttcttgtctataaagcatttaacccccctgtacacaactcactccttttaaagaaaaaaattgaaatgtaaggctgtgtaagatttgtttttaaactgtacagtgtctttttttgtatagttaacacactaccgaatgtgtctttagatagccctgtcctggtggtattttcaatagccactaaccttgcctggtacagtatgggggttgtaaattggcatggaaatttaaagcaggttcttgttggtgcacagcacaaattagttatatatggggatggtagttttttcatcttcagttgtctctgatgcagcttatacgaaataattgttgttctgttaactgaataccactctgtaattgcaaaaaaaaaaaaaaagttgcagctgttttgttgacattctgaatgcttctaagtaaatacaattttttttattagtattgttgtccttttcataggtctgaaatttttcttcttgaggggaagctagtcttttgcttttgcccattttgaatcacatgaattattacagtgtttatcctttcatatagttagctaataaaaagcttttgtctacacaccctgcatatcataatgggggtaaagttaagttgagatagttttcatccataactgaacatccaaaatcttgatcagttaagaaatttcacatagcccacttacatttacaaactgaagagtaatcaatctactcaaagcatgggattattagaatcaaacattttgaaagtctgtccttgaaggactaatagaaaagtatgttctaacctttacatgaggactctattctttaactcccattaccatgtaatggcagttatattttgcagttcccacattaaagaagacctgagaatgtatccccaaaagcgtgagcttaaaatacaagactgccatattaaattttttgttgacattagtctcagtgaagactatgaaaatgctggctatagatgtcttttcccatttatctaaatatggactgctcaggaaacgagactttccattacaagtatttttaattaattgggccagcttttcaaacaaagatgccacattcaaaatagggtatattttcctatattacggtttgcccctttataaatccaagtagataggaagaaagaagacaaactttgcatctcagtatgaattattcaatttatttgaatgatttttctttacaaaacaaactcattcattagtcatgtttatctgcttaggagtttagggaacaatttggcaattttgtggttttcgagattatcgttttcttaaagtgccagtattttaaaatagcgttcttgtaattttacacgcttttgtgatggagtgctgttttgttatataatttagacttggattctttccatttgcatttgtttatgtaatttcaggaggaatactgaacatctgagtcctggatgatactaataaactaataattgcagaggttttaaatactagttaaatggctttcacttaagaacttaagattttgttacatatttttaaatcttgtttctaataatacctcttagcagtaccttttaaataagtataagggatggcaaagtttttccctttaaaaatactcactttatgcttataaataggttaatgggctgataaaaggttttgtcaaacattgcaagtattcggtgctatatataaaggaggaaaaactagttttactttcagaatgatttaaacaagatttttaaaaacaagatacatgcaagcgaacagcagggttagtgataggctgcaattgtgtcgaacatcagattttttgttaagaggagcaaatgactcaatctgatttagatggaagtttctactgtatagaaatcaccattaatcaccaacattaataattctgatccatttaaaatgaattctggctcaaggagaatttgtaactttagtaggtacgtcatgacaactaccatttttttaagatgttgagaatgggaacagtttttttagggtttattcttgaccacagatcttaagaaaatggacaaaacccctcttcaatctgaagattagtatggtttggtgttctaacagtatcccctagaagttggatgtctaaaactcaagtaaatggaagtgggaggcaatttagataagtgtaaagccttgtaactgaagatgattttttttagaaagtgtatagaaactattttaatgccaagatagttacagtgctgtggggtttaaagactttgttgacatcaagaaaagactaaatctataattaattgggccaacttttaaaatgaagatgctttttaaaactaatgaactaagatgtataaatcttagtttttttgtattttaaagataggcatatggcatattgattaacgagtcaaatttcctaactttgctgtgcaaaggttgagagctattgctgattagttaccacagttctgatgatcgtcccatcacagtgttgttaatgtttgctgtatttattaattttcttaaagtgaaatctgaaaaatgaaatttgtgtgtcctgtgtacccgaggggtaatgattaaatgataaagat

SEQ ID NO: 13634 - DNA, 644 bp, Homo sapiens
  source 1..644: mol_type = unassigned DNA
atctcagggccaaaccgataggaaacgaggctgcctcgcggtggcaccgccaccccccaaccgggttccgagcaccggagctggctgctgctccctctttggagcaaagttttatgcaaagagggtgttttttgaaactttcgaaaaataactaaacatgggcaaaggagatcctaagaagccgagaggcaaaatgtcatcatatgcattttttgtgcaaacttgtcgggaggagcataagaagaagcacccagatgcttcagtcaacttctcagagttttctaagaagtgctcagagaggtggaagaccatgtctgctaaagagaaaggaaaatttgaagatatggcaaaagcggacaaggcccgttatgaaagagaaatgaaaacctatatccctcccaaaggggagacaaaaaagaagttcaaggatcccaatgcacccaagaggcctccttcggccttcttcctcttctgctctgagtatcgcccaaaaatcaaaggagaacatcctggcctgtccattggtgatgttgcgaagaaactgggagagatgtggaataacactgctgcagatgacaagcagccttatgaaaagatattgctgcatatcgagctaaaggaaagcctgatgcagcaaaaaaggg

SEQ ID NO: 13635 - DNA, 1889 bp, Homo sapiens
  source 1..1889: mol_type = unassigned DNA
cgggacgcgggaacggttccctcccggccccccgcgccctttccgaggttccctgccttgacttccccgagttctacgacaacctcagcgacagcgggaggagctgggcaatcggttttgcagggcaaactccaggctctcctcatttattattctctgggcggcgcacgggagaccctgcagggcaacagagcagagcgactacagctcccaggagccaacgctgcagggctgagccgacgcgggggacagacaggacctaaatggtggtcggaggaagggcaaggcagacctcttctgttaccttagcgccagcaaaccgagccgccgccgtcgccaagccaggagaccaacccccagtctcccgactaagtatttttaaatctggcggggctttccttcccgagccaaccactcccaccgtttacagccccaaccagtcagcgtgaggcccgccatttttcaaaccctcttcccgccgccaatcaggatcgagcagtacattcctctcctgaccggttctaacgggtctgggagttaacgacctgggcgacccaccgaacctgctaggctggggcgtggagggcgggtctggtaagacactgaccaatcgttagcctccgtggcaagggggcggggactatctgggtttgaataatcgtcagaaccaatcagattagtggggatgtggcccgtggcctagctcgtcaagttgccgtggcgcggagaactctgcaaaacaagaggctgaggattgcgttagagataaaccagttcacgccggagccccgtgagggaagcgtctccgttgggtccggccgctctgcgggactctgaggaaaagctcgcaccaggtggacgcggatctgtcaacatgggtaaaggagaccccaacaagccgcggggcaaaatgtcctcgtacgccttcttcgtgcagacctgccgggaagagcacaagaagaaacacccggactcttccgtcaatttcgcggaattctccaagaagtgttcggagagatggaagaccatgtctgcaaaggagaagtcgaagtttgaagatatggcaaaaagtgacaaagctcgctatgacagggagatgaaaaattacgttcctcccaaaggtgataagaaggggaagaaaaaggaccccaatgctcctaaaaggccaccatctgccttcttcctgttttgctctgaacatcgcccaaagatcaaaagtgaacaccctggcctatccattggggatactgcaaagaaattgggtgaaatgtggtctgagcagtcagccaaagataaacaaccatatgaacagaaagcagctaagctaaaggagaaatatgaaaaggatattgctgcatatcgtgccaagggcaaaagtgaagcaggaaagaagggccctggcaggccaacaggctcaaagaagaagaacgaaccagaagatgaggaggaggaggaggaagaagaagatgaagatgaggaggaagaggatgaagatgaagaataaatggctatcctttaatgatgcgtgtggaatgtgtgtgtgtgctcaggcaattattttgctaagaatgtgaattcaagtgcagctcaatactagcttcagtataaaaactgtacagatttttgtatagctgataagattctctgtagagaaaatacttttaaaaaatgcaggttgtagctttttgatgggctactcatacagttagattttacagcttctgatgttgaatgttcctaaatatttaatggtttttttaatttcttgtgtatggtagcacagcaaacttgtaggaattagtatcaatagtaaattttgggttttttaggatgttgcatttcgtttttttaaaaaaaattttgtaataaaattatgtatattatttcta

SEQ ID NO: 13636 - DNA, 1032 bp, Homo sapiens
  source 1..1032: mol_type = unassigned DNA
caggtggacgcggatctgtcaacatgggtaaaggagaccccaacaagccgcggggcaaaatgtcctcgtacgccttcttcgtgcagacctgccgggaagagcacaagaagaaacacccggactcttccgtcaatttcgcggaattctccaagaagtgttcggagagatggaagaccatgtctgcaaaggagaagtcgaagtttgaagatatggcaaaaagtgacaaagctcgctatgacagggagatgaaaaattacgttcctcccaaaggtgataagaaggggaagaaaaaggaccccaatgctcctaaaaggccaccatctgccttcttcctgttttgctctgaacatcgcccaaagatcaaaagtgaacaccctggcctatccattggggatactgcaaagaaattgggtgaaatgtggtctgagcagtcagccaaagataaacaaccatatgaacagaaagcagctaagctaaaggagaaatatgaaaaggatattgctgcatatcgtgccaagggcaaaagtgaagcaggaaagaagggccctggcaggccaacaggctcaaagaagaagaacgaaccagaagatgaggaggaggaggaggaagaagaagatgaagatgaggaggaagaggatgaagatgaagaataaatggctatcctttaatgatgcgtgtggaatgtgtgtgtgtgctcaggcaattattttgctaagaatgtgaattcaagtgcagctcaatactagcttcagtataaaaactgtacagatttttgtatagctgataagattctctgtagagaaaatacttttaaaaaatgcaggttgtagctttttgatgggctactcatacagttagattttacagcttctgatgttgaatgttcctaaatatttaatggtttttttaatttcttgtgtatggtagcacagcaaacttgtaggaattagtatcaatagtaaattttgggttttttaggatgttgcatttcgtttttttaaaaaaaattttgtaataaaattatgtatatta

SEQ ID NO: 13637 - DNA, 1175 bp, Homo sapiens
  source 1..1175: mol_type = unassigned DNA
gcaaaacaagaggctgaggattgcgttagagataaaccagttcacgccggagccccgtgagggaagcgtctccgttgggtccggccgctctgcgggactctgaggaaaagctcgcaccaggcaagaataccctccaataccctcgggtggacgcggatctgtcaacatgggtaaaggagaccccaacaagccgcggggcaaaatgtcctcgtacgccttcttcgtgcagacctgccgggaagagcacaagaagaaacacccggactcttccgtcaatttcgcggaattctccaagaagtgttcggagagatggaagaccatgtctgcaaaggagaagtcgaagtttgaagatatggcaaaaagtgacaaagctcgctatgacagggagatgaaaaattacgttcctcccaaaggtgataagaaggggaagaaaaaggaccccaatgctcctaaaaggccaccatctgccttcttcctgttttgctctgaacatcgcccaaagatcaaaagtgaacaccctggcctatccattggggatactgcaaagaaattgggtgaaatgtggtctgagcagtcagccaaagataaacaaccatatgaacagaaagcagctaagctaaaggagaaatatgaaaaggatattgctgcatatcgtgccaagggcaaaagtgaagcaggaaagaagggccctggcaggccaacaggctcaaagaagaagaacgaaccagaagatgaggaggaggaggaggaagaagaagatgaagatgaggaggaagaggatgaagatgaagaataaatggctatcctttaatgatgcgtgtggaatgtgtgtgtgtgctcaggcaattattttgctaagaatgtgaattcaagtgcagctcaatactagcttcagtataaaaactgtacagatttttgtatagctgataagattctctgtagagaaaatacttttaaaaaatgcaggttgtagctttttgatgggctactcatacagttagattttacagcttctgatgttgaatgttcctaaatatttaatggtttttttaatttcttgtgtatggtagcacagcaaacttgtaggaattagtatcaatagtaaattttgggttttttaggatgttgcatttcgtttttttaaaaaaaattttgtaataaaattatgtatatta

SEQ ID NO: 13638 - DNA, 629 bp, Homo sapiens
  source 1..629: mol_type = unassigned DNA
tcgggttcgtggacctgcctttccccattccctcagagcctctactcggtctcggcgcagtggctctcggggtctgacccggcgagcggcatttggggtgcgggccggcgagggctgggtctgtggagggccggcgggcagtcggaggaggcggaaactgcccctgaccgggcccggttctgggagttttcaatgtcggtcacgaggtggacgcggatctgtcaacatgggtaaaggagaccccaacaagccgcggggcaaaatgtcctcgtacgccttcttcgtgcagacctgccgggaagagcacaagaagaaacacccggactcttccgtcaatttcgcggaattctccaagaagtgttcggagagatggaagaccatgtctgcaaaggagaagtcgaagtttgaagatatggcaaaaagtgacaaagctcgctatgacagggagatgaaaaattacgttcctcccaaaggtgataagaaggggaagaaaaaggaccccaatgctcctaaaaggccaccatctgccttcttcctgttttgctctgaacatcgcccaaagatcaaaagtgaacaccctggcctatccattggggatactgcaaagaaattgggtgaaatgtggtctg

SEQ ID NO: 13639 - DNA, 3560 bp, Homo sapiens
  source 1..3560: mol_type = unassigned DNA
aggcggctctcgtggaggcagctagcgcgaggctggggagcgctgagccgcgcgtcgtgccctgcgctgcccagactagcgaacaatacagtcaggatggctaaaggtgaccccaagaaaccaaagggcaagatgtccgcttatgccttctttgtgcagacatgcagagaagaacataagaagaaaaacccagaggtccctgtcaattttgcggaattttccaagaagtgctctgagaggtggaagacgatgtccgggaaagagaaatctaaatttgatgaaatggcaaaggcagataaagtgcgctatgatcgggaaatgaaggattatggaccagctaagggaggcaagaagaagaaggatcctaatgctcccaaaaggccaccgtctggattcttcctgttctgttcagaattccgccccaagatcaaatccacaaaccccggcatctctattggagacgtggcaaaaaagctgggtgagatgtggaataatttaaatgacagtgaaaagcagccttacatcactaaggcggcaaagctgaaggagaagtatgagaaggatgttgctgactataagtcgaaaggaaagtttgatggtgcaaagggtcctgctaaagttgcccggaaaaaggtggaagaggaagatgaagaagaggaggaggaagaagaggaggaggaggaggaggaggatgaataaagaaactgtttatctgtctccttgtgaatacttagagtaggggagcgccgtaattgacacatctcttatttgagaagtgtctgttgccctcattaggtttaattacaaaatttgatcacgatcatattgtagtctctcaaagtgctctagaaattgtcagtggtttacatgaagtggccatgggtgtctggagcaccctgaaactgtatcaaagttgtacatatttccaaacatttttaaaatgaaaaggcactctcgtgttctcctcactctgtgcactttgctgttggtgtgacaaggcatttaaagatgtttctggcattttctttttatttgtaaggtggtggtaactatggttattggctagaaatcctgagttttcaactgtatatatctatagtttgtaaaaagaacaaaacaaccgagacaaacccttgatgctccttgctcggcgttgaggctgtggggaagatgccttttgggagaggctgtagctcagggcgtgcactgtgaggctggacctgttgactctgcagggggcatccatttagcttcaggttgtcttgtttctgtatatagtgacatagcattctgctgccatcttagctgtggacaaaggggggtcagctggcatgagaatattttttttttttaagtgcggtagtttttaaactgtttgtttttaaacaaactatagaactcttcattgtcagcaaagcaaagagtcactgcatcaatgaaagttcaagaacctcctgtacttaaacacgattcgcaacgttctgttattttttttgtatgtttagaatgctgaaatgtttttgaagttaaataaacagtattacatttttaaaactcttctctattataacagtcaatttctgactcacagcagtgaacaaacccccactccattgtatttggagactggcctccctataaatgtggtagcttcttttattactcagtggccagctcacttagggctgagatgaaggagagggctacttgaagctactgtgtgattttgtttgtgtctgagtggcattcagatgaagtctggaggagttaggagaacgacataggcaaggttcagcagccttccaaggtataggaaggtgggtgattaggactgaggctatctaggtttaacttttgtcccacctccaccccctattttgtggggccaaatgcattgctaaacagcaatttcagagtgtatggtgtgtcaaaaattaaggccttattgtttttctctttcacccctaccccccgtgctcctggcacatatcacattatttgtggtgcccaacatttggggtcttgagcctgctgctggtctcctggatgccagtgagggtatgtgggatggggtggtggggtaggggacggtatcctttttttgctcctacttggaaacaccaaacaccccaaggaagatgataggctccatcttgggccacctgagctatagggcaggctaatggaatcaaccatttctgagcactaaatgtatcatgaaaagttgaatggcctgctcataagtttagctcattcactggaaatgtagattgatgttcaatgttaaactggaaggagcttggtttgtgtgtcagtggttatattagtgggtagtgtaacattttatccaggttggggtgaggggagatggccacagtagcaagtggtgacactaaataccattttgaaggctgatgtgtatatacatcattactgtccgtagcaatgaaggatacagtactgtgttgtgggtgagtgttgctattgcccagcattaatatttgggtgtgtatgtttgaggctatgaaacacgcaggagtgtttttgtgctattaattttaagagaaagcagctttttcttaaaattcactgttgagaaacttgcatgtctggaggcggtgtcctctccgccctgtcgggtcctggatgagtacgagttatggtcacggtcacagcctgatctcttatgtgttcatagccattcgctctcccatcagaactgtttgtcctgaatgtgttcctctagttctagaaaatgaccactaatttaaaaaactcggttgtgaggtttgcccagaggcacttgttccagaatttcccctcctgcttcagccatgtccttgtcacttggcattctaagctaaagctttagcttcccaattcgtgatgtgctaggccaagattcgggagctgttgccagcctcgtcaaatatggaagagaaacaacctgcggtcaaaagggagtgatttgttaagtggtgcgcgtctatctcataactagatgtaccaaccagggaagggccaaggatggaaaggggtaacttttgtgcttccaaagtagctaagcagaagtgggggagcagtttagccagatgatctttgattaggcaaacattgagttttaaagaggctgtcaagttgaggccacttggtccattagctggggcagcaagatcactactcaacgttttcacactgtggcaagattgctcttctagtggaataatgccctagtttctctgagatgatgtaagtggcatgatgttacctaaggcttaggcttagcttgatttctgggcccactgtctgtgttcttaagatgccaacctgttgctttttttttttttttcccccatttaaaaggatagtacctactccctctaaccacctcaccccattcttgaatgacattttatccttcggaaagaacaaggctgtgatgtagtgactattgtctgtgtctcctgtgtgtgtctgttcttgtcacaaatgtatttggggacgttggatgcattcattttctgtaataaagtttcttaatcactcttcccaaaaagtaa

SEQ ID NO: 13640 - DNA, 707 bp, Homo sapiens
  source 1..707: mol_type = unassigned DNA
tttgtagttcagcttcaggccaagtgcttcagctccatataagaggtagctttcttgagagcagagatcgaaatatttcctatgcaaaggatggaaatacttcctgcgcgtaagcgcaatcctttcatcattcgaatcaggatggctaaaggtgaccccaagaaaccaaagggcaagatgtccgcttatgccttctttgtgcagacatgcagagaagaacataagaagaaaaacccagaggtccctgtcaattttgcggaattttccaagaagtgctctgagaggtggaagacgatgtccgggaaagagaaatctaaatttgatgaaatggcaaaggcagataaagtgcgctatgatcgggaaatgaaggattatggaccagctaagggaggcaagaagaagaaggatcctaatgctcccaaaaggccaccgtctggattcttcctgttctgttcagaattccgccccaagatcaaatccacaaaccccggcatctctattggagacgtggcaaaaaagctgggtgagatgtggaataatttaaatgacagtgaaaagcagccttacatcactaaggcggcaaagctgaaggagaagtatgagaaggatgttgctgactataagtcgaaaggaaagtttgatggtgcaaagggtcctgctaaagttgcccggaaaaaggtggaagaggaagatgaagaagaggagga

SEQ ID NO: 13641 - DNA, 529 bp, Homo sapiens
  source 1..529: mol_type = unassigned DNA
gtacttcttgtcaattcctccttgcttttcctcattgtatttctttgtttctcttttatcacagtcaggatggctaaaggtgaccccaagaaaccaaagggcaagatgtccgcttatgccttctttgtgcagacatgcagagaagaacataagaagaaaaacccagaggtccctgtcaattttgcggaattttccaagaagtgctctgagaggtggaagacgatgtccgggaaagagaaatctaaatttgatgaaatggcaaaggcagataaagtgcgctatgatcgggaaatgaaggattatggaccagctaagggaggcaagaagaagaaggatcctaatgctcccaaaaggccaccgtctggattcttcctgttctgttcagaattccgccccaagatcaaatccacaaaccccggcatctctattggagacgtggcaaaaaagctgggtgagatgtggaataatttaaatgacagtgaaaagcagccttacatcactaaggcggcaaagctgaaggagaagtatg

SEQ ID NO: 13642 - DNA, 812 bp, Homo sapiens
  source 1..812: mol_type = unassigned DNA
cgccgccgccgccgccgccgccgccgccgccgccgccgccgccgccgcagcgcccgcacaactttccggcccgcgccgccgtgagcgcgccctgccgccgcctccccctgcctctactccccattcccttcccgccccctccgccttccctcctgctaggcggccgggaaggaagaagcaattcagtcaggatggctaaaggtgaccccaagaaaccaaagggcaagatgtccgcttatgccttctttgtgcagacatgcagagaagaacataagaagaaaaacccagaggtccctgtcaattttgcggaattttccaagaagtgctctgagaggtggaagacgatgtccgggaaagagaaatctaaatttgatgaaatggcaaaggcagataaagtgcgctatgatcgggaaatgaaggattatggaccagctaagggaggcaagaagaagaaggatcctaatgctcccaaaaggccaccgtctggattcttcctgttctgttcagaattccgccccaagatcaaatccacaaaccccggcatctctattggagacgtggcaaaaaagctgggtgagatgtggaataatttaaatgacagtgaaaagcagccttacatcactaaggcggcaaagctgaaggagaagtatgagaaggatgttgctgactataagtcgaaaggaaagtttgatggtgcaaagggtcctgctaaagttgcccggaaaaaggtggaagaggaagatgaagaagaggaggaggaagaagaggaggaggaggaggaggaggatgaataaagaaactgtttatctgtc

SEQ ID NO: 13643 - DNA, 793 bp, Homo sapiens
  source 1..793: mol_type = unassigned DNA
cgcaccgcccgctcccgccgccgccgccgccgccgccgccgccgccgccgccgccgccgccgccgccgcagcgcccgcacaactttccggcccgcgccgccgtgagcgcgccctgccgccgcctccccctgcctctactccccattcccttcccgccccctccgccttccctcctgctaggcggccgggaaggaagaagcaattcagtcaggatggctaaaggtgaccccaagaaaccaaagggcaagatgtccgcttatgccttctttgtgcagacatgcagagaagaacataagaagaaaaacccagaggtccctgtcaattttgcggaattttccaagaagtgctctgagaggtggaagacgatgtccgggaaagagaaatctaaatttgatgaaatggcaaaggcagataaagtgcgctatgatcgggaaatgaaggattatggaccagctaagggaggcaagaagaagaaggatcctaatgctcccaaaaggccaccgtctggattcttcctgttctgttcagaattccgccccaagatcaaatccacaaaccccggcatctctattggagacgtggcaaaaaagctgggtgagatgtggaataatttaaatgacagtgaaaagcagccttacatcactaaggcggcaaagctgaaggagaagtatgagaaggatgttgctgactataagtcgaaaggaaagtttgatggtgcaaagggtcctgctaaagttgcccggaaaaaggtggaagaggaagatgaagaagaggaggaggaagaagaggagga

SEQ ID NO: 13644 - DNA, 1191 bp, Homo sapiens
  source 1..1191: mol_type = unassigned DNA
aagaggcgagaacgacccccggaccgaccaaagcccgcgcgccgctgcatcccgcgtccagcacctacgtcccgctgccgtcgccgccgccaccatgcccaagagaaaggctgaaggggatgctaagggagataaagcaaaggtgaaggacgaaccacagagaagatccgcgaggttgtctgctaaacctgctcctccaaagccagagcccaagcctaaaaaggcccctgcaaagaagggagagaaggtacccaaagggaaaaagggaaaagctgatgctggcaaggaggggaataaccctgcagaaaatggagatgccaaaacagaccaggcacagaaagctgaaggtgctggagatgccaagtgaagtgtgtgcatttttgataactgtgtacttctggtgactgtacagtttgaaatactattttttatcaagttttataaaaatgcagaattttgttttactttttttttttttttaaaagctatgttgttagcacacagaacacttcattgttgtttttgggggaaggggcatatgtcactaatagaatgtctccaaagctggattgatgtggagaaaacacctttcccttctagttttgagagacttcctcttggctcccaggaggagggattccctgactttgacacacatggccaccttggcacaaaagccttgtggtatagaaaaacaaatttgtttttatgtcctcttctccctttccatcgttcagcatagacttaactcccttaagcccagacatctgttgagacctgacccctagtcattggttaccagtgtgtcaggcaatctggactttccagtgatgccactgagatggcacctgtcaaaagagcagtggttccatttctagattgtggatcttcagataaattctgccattttcatttcacttcctgaaagtcagggtcggcttgtgaaaagttgttaaacaacatgctaaatgtgaaatgtcaaccctcactctaaactttccctgttcagagcatcagatgaagacttcattgggttttatagtggctttctgatttttggtagtccattgaagaagggagtttgaaagttgttgtatactgttaacgattgtctgcccatgtcctgcctgaaataccatgattgtttatggaaagtatctttaataaagctggatacagtttggcttggaa

SEQ ID NO: 13645 - DNA, 831 bp, Homo sapiens
  source 1..831: mol_type = unassigned DNA
gcaggtcgaagaggccgggctacgtcgtgccctgcgcgtgagcagctgcagaggcagaggcagcatccagcggcggcgccagcagttccagtccgttgctttactttttgcttcaccgacatagtcattatgccgaagagaaagtctccagagaatacagagggcaaagatggatccaaagtaactaaacaggagcccacaagacggtctgccagattgtcagcgaaacctgctccaccaaaacctgaacccaaaccaagaaaaacatctgctaagaaagaacctggagcaaagattagcagaggtgctaaagggaagaaggaggaaaagcaggaagctggaaaggaaggcacagaaaactgaatctgtagataacgagggagaatgaattgtcatgaaaaattggggttgattttatgtatctcttgggacaacttttaaaagctatttttaccaagtattttgtaaatgctaattttttaggactctactagttggcatacgaaaatatataaggatggacattttatcgtctcatagtcatgctttttggaaatttacatcatcctcaagtaaaataaatatcagttaaatattggaagctgtgtgtaagattgattcagcattccatgcacttgctttaaaatttagtcctgtgcatactgtggtgtttttactgtgcatatttgaatttttcatgcagtttttctagagcaataatcagtggtgcttttgtacctaggttttatgtgattttaatgaaacatggatagttgtggccacctgctgactatttgtggtttaaaataaaaggtttacttgtctgcagaa

SEQ ID NO: 13646 - DNA, 872 bp, Homo sapiens
  source 1..872: mol_type = unassigned DNA
gcaggtcgaagaggccgggctacgtcgtgccctgcgcgtgagcagctgcagaggcagaggcagcatccagcggcggcgccagcagttccagtccgttgctttactttttgcttcaccgacatagtcattatgccgaagagaaagtctccagagaatacagagggcaaagatggatccaaagtaactaaacaggagcccacaagacggtctgccagattgtcagcgaaacctgctccaccaaaacctgaacccaaaccaagaaaaacatctgctaagaaagaacctggagcaaagattagcagaggtgctaaagggaagaaggaggaaaagcaggaagctggaaaggaaggtactgcaccatctgaaaatggtgaaactaaagctgaagaggcacagaaaactgaatctgtagataacgagggagaatgaattgtcatgaaaaattggggttgattttatgtatctcttgggacaacttttaaaagctatttttaccaagtattttgtaaatgctaattttttaggactctactagttggcatacgaaaatatataaggatggacattttatcgtctcatagtcatgctttttggaaatttacatcatcctcaagtaaaataaatatcagttaaatattggaagctgtgtgtaagattgattcagcattccatgcacttgctttaaaatttagtcctgtgcatactgtggtgtttttactgtgcatatttgaatttttcatgcagtttttctagagcaataatcagtggtgcttttgtacctaggttttatgtgattttaatgaaacatggatagttgtggccacctgctgactatttgtggtttaaaataaaaggtttacttgtctgcagaa

SEQ ID NO: 13647 - DNA, 1672 bp, Homo sapiens
  source 1..1672: mol_type = unassigned DNA
atttcaagtccaagatattatgtattctattttaactgtttcccagttttgtattttttgtattggaatgattatgaaattaatgagaaatctttagaaacagactacaaaagagtagttcttaaatacagaagtgattgtgaaactttgtgatagcaatgtgtgtagtagcagttttgtctcaaatacatttatcatttgttactcaaaggatgttgaagtattaaaagtcattatgctgtctgtggaatcctactattagtacagaacaccctgcagtgatttttccgcccgtgttagcattgaagttgtgagctctacttgcttgtctttatggccctttaattcaagtaattggtcagtatccgtatgggtcttttataccacccgctgggggctaaactaatttagctgctgctgtatacttactaacaaggaataaatgttaagctttcttctcagtattgatggatggtatctaaaagtatttttatgtttctttaacatggcttaaattttgaacttaatgtatcaagttagtatggtcatattaatacctgtgcttttcagattcttcaaacacctaaatgaaagtgataaattcaaaactgatccttttagttcctcattatatgatatgaagggattaactgtagcaggatagtcaacctgaccgtacggcatggtgctttttttcaggataaatcttcagacaaaaaagtgcaaacaaaagggaaaaggggagcaaagggaaaacaggccgaagtggctaaccaagaaactaaagaagacttacctgcggaaaacggggaaacgaagactgaggagagtccagcctctgatgaagcaggagagaaagaagccaagtctgattaataaccatataccatgtcttatcagtggtccctgtctcccttcttgtacaatccagaggaatatttttatcaactattttgtaaatgcaagttttttagtagctctagaaacatttttaagaaggagggaatcccacctcatcccattttttaagtgtaaatgcttttttttaagaggtgaaatcatttgctggttgtttattttttggtacaaccagaaaatagtgtgggatattgaattatgggaggctctgactgtctcgggtgtcagcttaacattccacagatggggggttagtttttatatcctataatacaaagcatattaaatggcaatatggagtcagtcctgcatttaatgtcttgaacattttaaattacttctattaccatgttgttttttagtagaattgtttcctaaagaaaaccactctttgatcatggctctctctgccagaattgtgtgcactctgtaacatctttgtggtagtcctgttttcctaataactttgttactgtgctgtgaaagattacagatttgaacatgtagtgtacgtgctgttgagttgtgaactggtgggccgtatgtaacagctgaccaacgtgaagatactggtacttgatagcctcttaaggaaaatttgcttccaaattttaagctggaaagtcactggaataactttaaaaaagaattacaatacatggctttttagaatttcgttacgtatgttaagatttgtgtacaaattgaaatgtctgtactgatcctcaaccaataaaatctcagttatgaaaat

SEQ ID NO: 13648 - DNA, 1383 bp, Homo sapiens
  source 1..1383: mol_type = unassigned DNA
gctgagtcccgtagccaatgggcgggggtggggggcggcccggccggcggggagggggagcccgcggccggggacgcggggggaggaggaggcgggctcccaatccggttccatccggttctcccaccgcccccgctgtgggtctcagcagctcgggcggcgggaggagtggcagcggcaaggcagcccagtttcgcgaaggctgtcggcgcgccgcggcccgcaggcacccggcacgcgccttccccgcaggcacccggcacgcgccttccccgccgccacgatgcccaagaggaaggtcagctccgccgaaggcgccgccaaggaagagcccaagaggagatcggcgcggttgtcagctaaacctcctgcaaaagtggaagcgaagccgaaaaaggcagcagcgaaggataaatcttcagacaaaaaagtgcaaacaaaagggaaaaggggagcaaagggaaaacaggccgaagtggctaaccaagaaactaaagaagacttacctgcggaaaacggggaaacgaagactgaggagagtccagcctctgatgaagcaggagagaaagaagccaagtctgattaataaccatataccatgtcttatcagtggtccctgtctcccttcttgtacaatccagaggaatatttttatcaactattttgtaaatgcaagttttttagtagctctagaaacatttttaagaaggagggaatcccacctcatcccattttttaagtgtaaatgcttttttttaagaggtgaaatcatttgctggttgtttattttttggtacaaccagaaaatagtgtgggatattgaattatgggaggctctgactgtctcgggtgtcagcttaacattccacagatggggggttagtttttatatcctataatacaaagcatattaaatggcaatatggagtcagtcctgcatttaatgtcttgaacattttaaattacttctattaccatgttgttttttagtagaattgtttcctaaagaaaaccactctttgatcatggctctctctgccagaattgtgtgcactctgtaacatctttgtggtagtcctgttttcctaataactttgttactgtgctgtgaaagattacagatttgaacatgtagtgtacgtgctgttgagttgtgaactggtgggccgtatgtaacagctgaccaacgtgaagatactggtacttgatagcctcttaaggaaaatttgcttccaaattttaagctggaaagtcactggaataactttaaaaaagaattacaatacatggctttttagaatttcgttacgtatgttaagatttgtgtacaaattgaaatgtctgtactgatcctcaaccaataaaatctcagttatgaaaata

SEQ ID NO: 13649 - DNA, 1468 bp, Homo sapiens
  source 1..1468: mol_type = unassigned DNA
gcccgcccctcctgccgcccctgccgcgcgcgccgcagcagcgccgccttccctgcgcagtcggtgtctccgcgtcgctgggtgggacttggctcggcggccatgggcaagcagaacagcaagctgcggcccgagatgttgcaggacctgcgagagaacacagagttctcagagctggagctgcaggagtggtacaagggcttcctcaaggactgccccacaggaatcctcaatgtggatgagttcaagaagatctacgccaacttctttccctatggtgacgcctccaagtttgccgagcacgtcttccgcacctttgacaccaacagcgatggcaccatagactttcgggagttcatcattgcgctgagcgtgacctcgcgcggccgcctggagcagaagctcatgtgggccttcagcatgtatgacctggacggcaacggctacatcagccgggaggagatgctggagatcgtgcaggccatttacaagatggtttcgtccgtgatgaagatgccggaggacgagtcgaccccggaaaagaggactgagaaaatcttccgccaaatggacacaaacaacgacggcaagctgtccttggaggagttcatccgcggggccaaaagcgacccgtccatcgtgcgtctgctgcagtgcgaccccagcagcgcctcccagttctgagaggagccaggttccccttcctccctcccttcaccggccccctcccggctcttagcttccactcccttgtgtgtattctggctgggggccagattggggaagcccttctccccgggtctgccctgtggggggcttccggaaaagggaaccctgcggtacccccaggccaaagcaagtaagcggttagcaccccccaatcccagaggcaacaatagagacacaggctgggttggtctgcccctcagtcaggcccccttacccacccaccagccccaaggcccgacccctcccccaaaggggcagtccccttcttgcaggtctcagcttgcggggtggggggagtcatgcccaggggaggagactttttatctggaggggagagaaggattctaggggtgtggagttggagaaagaggcttccttgagccacccttcccaccccagcccttgctggtccctaggccaagccaccaagtgaaaccttccaggatactagcccgccagctgtgggccccagaaagccagcctgccttttagcacttggatacacacagacccacggagctctctgtgtttggcctctcacacacacacaggcccatagacagatgggcagatgcacccagagccccatgcacagtgtcctgcgtgggaaagagacacggtccccctggctgagcccctgtcctcccctctgtccccccaaccgccccccctgcatgcagccaaatggagcatctctgttctttttaataatttcagaataaagtctcatttcagtgca

SEQ ID NO: 13650 - DNA, 1751 bp, Homo sapiens
  source 1..1751: mol_type = unassigned DNA
cgggccgcggcggcggcgggcagcggacgggcggactgacgggcgcctccaccttgctccctccctggctgccggcttccttttgtctttctgggcggcgatgagcgcagggccggcgcagcagctgcgggcgcacggaggcccgcgctgctagtcactcctcccggcctcggcgcgcttgtcccgggcagcggcccgggcccgctgcagccgccgccggcgccgaacttgggctcgggaagccggcggaccgcgtcctgcgccggagcaggggcatggtctagtggcccagtcaggacgcggaaacactccctggaggttctgacccactccctctcagcctccgcctggtctctggtgtagtcgccgccgccagccgccatgggcaaacagaacagcaagctgcggcccgaggtgctgcaggacctgcgggagaacacggagttcaccgaccacgagctgcaggagtggtacaagggcttcctcaaggactgccccaccggccacctgaccgtggacgagttcaagaagatctacgccaacttcttcccctacggcgacgcttccaagttcgccgagcacgtcttccgcaccttcgacaccaacggcgacggcaccatcgacttccgggagttcatcattgcgctgagcgtgacctcgcggggcaagctggagcagaagctcaagtgggccttcagcatgtacgacctggacggcaacggctacatcagccgcagcgagatgctggagatcgtgcaggccatctacaagatggtgtcgtctgtgatgaagatgccggaggatgagtccaccccggagaagcgcacagacaagatcttcaggcagatggacaccaacaatgacggcaaactgtccttggaagaattcatcagaggtgccaagagcgacccctccatcgtccgcctgctgcagtgcgaccccagcagtgccagtcagttctgagcgagcggcccctggacagttgcagagaaacacaggcttgtcgtgccgtttaagctttgcttgcaagagtggatgccccgcaatcgttcctgctctcccgggccccgggcctggggcatgcgttgcacctgcccagcccggtggctgcgcctccctcctccacctgaccaacgcgacattcctcccctcacgcctggcccggtcccttccagggcaactcccagggatgtggtgacatgcagggttcaagtgttcttggttccaggcacctcccggctcacggggagctcagaggtccatgccgaggagaccaggcaggacctcccgaggctgcgccccggccggcccatgcgttttgtgatcccaagtgactctgtgggaagggtggggacgaggcgtcgggagggtatacagggagcccctcccgtgcatggctgcccccccgttcattttctccaccacagccgcttgcacgtatagatactgtggtcccctttcttttaatatataaattatgtatggtgaagtggagtgtattgtgtaggtcccgtatttaatgcctctgactgcctttgaagcgcagccctctgtggcccgcagccccctgagcctggctgttgtgtggtatttatgctctctttgtctgcctgtttctaaggaaatgcatgtgtgccctgagccgtgatgatcctcccatccgtgttgtgagcacaggcatttgtgtctggtctgtcctccctgttgattggtctggcatttccggtattaaaatgataaaataaatggca

SEQ ID NO: 13651 - DNA, 1904 bp, Homo sapiens
  source 1..1904: mol_type = unassigned DNA
agcttctgccaagggtgggggcccacgcggaggcgatccgctcgttcctcccagggccatggggcgacgaggagagccctggcctccccgcgacccgcactgcgacctgggccagacgcgccaccttccccggtcgcggtttgcttctctttaaaatgaggacagctcctcccttgggggctgtggtgacaggtgaaatgagaacgcactgaagacagctcttggtccaaagccccgcacacagggcatggtctagtggcccagtcaggacgcggaaacactccctggaggttctgacccactccctctcagcctccgcctggtctctgggttggctgttccagctccaaagagaaggaggaaccttttccttctgcagcccctccccaccagcctcattccttagctggggtcagacctggggtcctcactgcagctggcctctggcagcgttctcaggctagccctccctgctgaaaagagaaccgtgtgggactcacaggtgtagtcgccgccgccagccgccatgggcaaacagaacagcaagctgcggcccgaggtgctgcaggacctgcgggagaacacggagttcaccgaccacgagctgcaggagtggtacaagggcttcctcaaggactgccccaccggccacctgaccgtggacgagttcaagaagatctacgccaacttcttcccctacggcgacgcttccaagttcgccgagcacgtcttccgcaccttcgacaccaacggcgacggcaccatcgacttccgggagttcatcattgcgctgagcgtgacctcgcggggcaagctggagcagaagctcaagtgggccttcagcatgtacgacctggacggcaacggctacatcagccgcagcgagatgctggagatcgtgcaggccatctacaagatggtgtcgtctgtgatgaagatgccggaggatgagtccaccccggagaagcgcacagacaagatcttcaggcagatggacaccaacaatgacggcaaactgtccttggaagaattcatcagaggtgccaagagcgacccctccatcgtccgcctgctgcagtgcgaccccagcagtgccagtcagttctgagcgagcggcccctggacagttgcagagaaacacaggcttgtcgtgccgtttaagctttgcttgcaagagtggatgccccgcaatcgttcctgctctcccgggccccgggcctggggcatgcgttgcacctgcccagcccggtggctgcgcctccctcctccacctgaccaacgcgacattcctcccctcacgcctggcccggtcccttccagggcaactcccagggatgtggtgacatgcagggttcaagtgttcttggttccaggcacctcccggctcacggggagctcagaggtccatgccgaggagaccaggcaggacctcccgaggctgcgccccggccggcccatgcgttttgtgatcccaagtgactctgtgggaagggtggggacgaggcgtcgggagggtatacagggagcccctcccgtgcatggctgcccccccgttcattttctccaccacagccgcttgcacgtatagatactgtggtcccctttcttttaatatataaattatgtatggtgaagtggagtgtattgtgtaggtcccgtatttaatgcctctgactgcctttgaagcgcagccctctgtggcccgcagccccctgagcctggctgttgtgtggtatttatgctctctttgtctgcctgtttctaaggaaatgcatgtgtgccctgagccgtgatgatcctcccatccgtgttgtgagcacaggcatttgtgtctggtctgtcctccctgttgattggtctggcatttccggtattaaaatgataaaataaatggcattttctga

SEQ ID NO: 13652 - DNA, 586 bp, Homo sapiens
  source 1..586: mol_type = unassigned DNA
cttcccggagctggcaggcgggccgcggcggcggcgggcagcggacgggcggactgacgggcgcctccaccttgctccctccctggctgccggcttccttttgtctttctgggcggcgatgagcgcagggccggcgcagcagctgcgggcgcacggaggcccgcgctgctagtcactcctcccggcctcggcgcgcttgtcccgggcagcggcccgggcccgctgcagccgccgccggcgccgaacttgggctcgggaagccggcggaccgcgtcctgcgccggagcaggggcatggtctagtggcccagtcaggacgcggaaacactccctggaggttctgacccactccctctcagcctccgcctggtctctgctggagaactcctggaacctttaagccctggctcagccctcagctctgtcccatcccagctgacctctgtgctctgcgcccgagctcctgagcccacgtgtagtcgccgccgccagccgccatgggcaaacagaacagcaagctgcggcccgaggtgctgcaggacctgcgggagaacacggagttcaccgaccacgagctgcaggagtgg

SEQ ID NO: 13653 - DNA, 4053 bp, Homo sapiens
  source 1..4053: mol_type = unassigned DNA
gttgcccgggagccgcctgaggaggagcggcgcaggggatgcggctgtggtggcggcggcggcggccgagcgcgggtggcggctgtggcggcggaggggggcgcgggccggcgatggcgcggcggccctgagggcgcggggcgggcggcggccggagggcgggtggcgcgggaggaagcggcggcggtggctccatggcccgggcgcgctgagggacccggcgctcgcctcagcccggcggcggcggcggccgaacaatgaagctcctgaagccgacctgggtcaaccacaatggcaagccgattttttcagttgatattcaccctgacgggaccaagttcgcaactggaggacaagggcaggattctgggaaggttgtgatctggaatatgtctccagtcctccaggaggatgacgagaaggatgaaaatattcccaagatgctttgccagatggacaatcacttagcatgtgtgaactgtgtgcggtggtcaaacagtgggatgtatttagcttctgggggagatgacaaactgattatggtgtggaagcgggctacgtacatcggccccagcaccgtgttcggctccagtggtaagcttgccaatgtggagcagtggcggtgtgtctctatcctccggaatcattcaggcgatgtgatggatgtagcatggtctccccacgatgcctggctagcctcatgcagcgtggataacactgtcgtcatctggaatgctgtaaagttcccagaaattctagctactctgagaggtcattctggcttggtcaaagggttgacatgggaccctgttggtaaatacatagcttctcaagctgatgaccgcagcctaaaggtgtggaggacgctggactggcagttggagaccagcatcaccaagccttttgatgagtgtggaggaacgacccatgtgttgcggctcagctggtcacctgatgggcattacctggtgtctgcccatgccatgaacaactcaggccccactgcccagatcatcgaacgggagggatggaagaccaacatggactttgttgggcaccggaaagctgtgactgtcgtgaaattcaacccaaaaatcttcaaaaagaagcagaagaatgggagttctgcgaagcctagctgcccgtactgctgctgtgctgttggcagcaaggaccgctcgctttctgtctggctcacatgtctgaaacggccgctggtggtcatccatgaactgtttgacaaatccatcatggatatttcctggactctgaatgggctgggcatcttggtatgctctatggacggctctgtggcattcctcgacttctcccaggatgagcttggcgatcccctgagcgaggaggagaagagccgcattcaccagtccacctatggcaagagcctagccatcatgaccgaggcccagctctccacagccgtcattgagaaccctgagatgctcaagtaccagcgaaggcagcagcagcagcagctggaccagaagagtgctgcgaccagggagatgggctcagccacctcagtcgcaggcgttgtcaacggggagagtcttgaagatatcaggaagaatcttttgaagaaacaagttgagactcggacagcagatggccggagaagaatcacgcctctctgcatagcacagctggacactggggacttctccacggcattctttaacagcatccccctctcgggctccctggcgggcaccatgctctcttctcatagcagtccacagctactgccactggactccagtacccctaactccttcggcgcctcgaagccttgcacagagcctgtggtggctgccagtgccagacctgcaggcgattctgtcaataaagacagtatgaatgctacctctactcctgctgcattgtcaccttctgtgttaacgaccccgtccaagatcgaacccatgaaagcgtttgactcccggttcacagagcggtccaaagccacaccaggtgctcctgccctgaccagcatgactccgacagctgtggaaaggttaaaagagcagaaccttgtgaaagagctgaggccccgagacctcctggagagcagcagtgacagcgatgagaaagtccctttggctaaggcttcctcactgtccaagcgaaaacttgagcttgaggtagagacagtagagaagaagaagaaagggcggcctcggaaggactctcgtctcatgcctgtgtctctgtctgtccagtctccagctgccctaaccgcagagaaggaggccatgtgtctgtctgcaccagcacttgcactgaagctgccaattccaagcccccagagagcattcaccctccaggtcagctccgatccttccatgtacattgaggtggagaatgaagtgacagtggtggggggcgtgaagctgagccgcctgaagtgcaaccgggaagggaaggagtgggagacggtactcaccagccggatcctcactgctgcgggcagctgtgacgtggtgtgtgtcgcctgtgaaaaaaggatgctgtcagtgttctccacctgtggtcgccgtctcctctctcccatcctcctgccatccccgatctctactttgcattgcacaggctcctacgtcatggcgctcaccgctgcagccacactctctgtctgggatgttcacagacaggtggttgtggtgaaagaagagtctctacactccatcctggcaggaagtgatatgacggtatcacagatcttgctgacgcagcatggaatcccagtaatgaacctgtccgatgggaaggcgtactgctttaatccgtcactttccacatggaacctggtttctgacaagcaggactcactggctcagtgtgcagactttaggagcagcctgccatcccaggacgccatgctgtgctcaggaccgttagccataatccagggccgcacctccaactcgggaaggcaggctgcccggctcttctccgtgcctcatgtggtgcagcaagagaccaccctggcctacctagagaaccaggtggcagcagcactcaccctgcagtccagccacgagtaccgccattggctcctcgtctacgcacggtacctcgtaaacgaagggtttgaataccgacttcgagaaatatgcaaggacttactgggtccggttcactactccactggaagccagtgggagtcaacagtagtgggtctgcggaagagggagctgctgaaggagctgctaccagtcatcgggcagaacctccgattccagcgcctcttcaccgagtgtcaggaacagctcgacatcctgagggacaagtagcctgccccagcctgccctggctgcagcaagggcagggccacactctcgccgctgatgacatgcaggaccgcctctcacctgaccaggctgtagggggaggagacactggcaggagatgtgctgtcctgcaccagcgccagcccagctccctgggcagatgtgccctgtgtcctgggtctgacattgcctcaggagggggaagctcatccctccctccaagcccccgatgcggagctagggctggagctctgcccaggtgccctggggccagcaaggcagtcccaggcctgccgtctccagcacggccccaaggtggacactagcccctgctgctgcaggcaccatgctgcttcagcagtgacgattgagccatttgtgagagagaatccggaagcgttaggtattacagcagactgacctaagacctatgtaaaaggaaagctgttccaacacacggactatttttgtactagaatttgctaacttgtaatattgaatttcctttggccgataatcaggatttccctataagtcacttggacattggtcacttgtaggaaatttaaactctaattatgacagctacactgaaaaataattgtactgaaattaacttgtctatcttcatttggttttaatttttaaatgtttgtaaaaagagactgttttgggggaatggggcaaaggggtgggcgatttcttttgtaagtgtaaaataaatgaacacgcattgaataccaaa

SEQ ID NO: 13654 - DNA, 3395 bp, Homo sapiens
  source 1..3395: mol_type = unassigned DNA
gatgcggctgtggtggcggcggcggcggccgagcgcgggtggcggctgtggcggcggaggggggcgcgggccggcgatggcgcggcggccctgagggcgcggggcgggcggcggccggagggcgggtggcgcgggaggaagcggcggcggtggctccatggcccgggcgcgctgagggacccggcgctcgcctcagcccggcggcggcggcggccgaacaatgaagctcctgaagccgacctgggtcaaccacaatggcaagccgattttttcagttgatattcaccctgacgggaccaagttcgcaactggaggacaagggcaggattctgggaaggttgtgatctggaatatgtctccagtcctccaggaggatgacgagaaggatgaaaatattcccaagatgctttgccagatggacaatcacttagcatgtgtgaactgtgtgcggtggtcaaacagtgggatgtatttagcttctgggggagatgacaaactgattatggtgtggaagcgggctacgtacatcggccccagcaccgtgttcggctccagtggtaagcttgccaatgtggagcagtggcggtgtgtctctatcctccggaatcattcaggcgatgtgatggatgtagcatggtctccccacgatgcctggctagcctcatgcagcgtggataacactgtcgtcatctggaatgctgtaaagttcccagaaattctagctactctgagaggtcattctggcttggtcaaagggttgacatgggaccctgttggtaaatacatagcttctcaagctgatgaccgcagcctaaaggtgtggaggacgctggactggcagttggagaccagcatcaccaagccttttgatgagtgtggaggaacgacccatgtgttgcggctcagctggtcacctgatgggcattacctggtgtctgcccatgccatgaacaactcaggccccactgcccagatcatcgaacgggagggatggaagaccaacatggactttgttgggcaccggaaagctgtgactgtcgtgaaattcaacccaaaaatcttcaaaaagaagcagaagaatgggagttctgcgaagcctagctgcccgtactgctgctgtgctgttggcagcaaggaccgctcgctttctgtctggctcacatgtctgaaacggccgctggtggtcatccatgaactgtttgacaaatccatcatggatatttcctggactctgaatgggctgggcatcttggtatgctctatggacggctctgtggcattcctcgacttctcccaggatgagcttggcgatcccctgagcgaggaggagaagagccgcattcaccagtccacctatggcaagagcctagccatcatgaccgaggcccagctctccacagccgtcattgagaaccctgagatgctcaagtaccagcgaaggcagcagcagcagcagctggaccagaagagtgctgcgaccagggagatgggctcagccacctcagtcgcaggcgttgtcaacggggagagtcttgaagatatcaggaagaatcttttgaagaaacaagttgagactcggacagcagatggccggagaagaatcacgcctctctgcatagcacagctggacactggggacttctccacggcattctttaacagcatccccctctcgggctccctggcgggcaccatgctctcttctcatagcagtccacagctactgccactggactccagtacccctaactccttcggcgcctcgaagccttgcacagagcctgtggtggctgccagtgccagacctgcaggcgattctgtcaataaagacagtatgaatgctacctctactcctgctgcattgtcaccttctgtgttaacgaccccgtccaagatcgaacccatgaaagcgtttgactcccggttcacagagcggtccaaagccacaccaggtgctcctgccctgaccagcatgactccgacagctgtggaaagggatgttcacagacaggtggttgtggtgaaagaagagtctctacactccatcctggcaggaagtgatatgacggtatcacagatcttgctgacgcagcatggaatcccagtaatgaacctgtccgatgggaaggcgtactgctttaatccgtcactttccacatggaacctggtttctgacaagcaggactcactggctcagtgtgcagactttaggagcagcctgccatcccaggacgccatgctgtgctcaggaccgttagccataatccagggccgcacctccaactcgggaaggcaggctgcccggctcttctccgtgcctcatgtggtgcagcaagagaccaccctggcctacctagagaaccaggtggcagcagcactcaccctgcagtccagccacgagtaccgccattggctcctcgtctacgcacggtacctcgtaaacgaagggtttgaataccgacttcgagaaatatgcaaggacttactgggtccggttcactactccactggaagccagtgggagtcaacagtagtgggtctgcggaagagggagctgctgaaggagctgctaccagtcatcgggcagaacctccgattccagcgcctcttcaccgagtgtcaggaacagctcgacatcctgagggacaagtagcctgccccagcctgccctggctgcagcaagggcagggccacactctcgccgctgatgacatgcaggaccgcctctcacctgaccaggctgtagggggaggagacactggcaggagatgtgctgtcctgcaccagcgccagcccagctccctgggcagatgtgccctgtgtcctgggtctgacattgcctcaggagggggaagctcatccctccctccaagcccccgatgcggagctagggctggagctctgcccaggtgccctggggccagcaaggcagtcccaggcctgccgtctccagcacggccccaaggtggacactagcccctgctgctgcaggcaccatgctgcttcagcagtgacgattgagccatttgtgagagagaatccggaagcgttaggtattacagcagactgacctaagacctatgtaaaaggaaagctgttccaacacacggactatttttgtactagaatttgctaacttgtaatattgaatttcctttggccgataatcaggatttccctataagtcacttggacattggtcacttgtaggaaatttaaactctaattatgacagctacactgaaaaataattgtactgaaattaacttgtctatcttcatttggttttaatttttaaatgtttgtaaaaagagactgttttgggggaatggggcaaaggggtgggcgatttcttttgtaagtgtaaaataaatgaacacgcattgaataccaaa

SEQ ID NO: 13655 - DNA, 3734 bp, Homo sapiens
  source 1..3734: mol_type = unassigned DNA
gcagtgcagccggagcggccgagggggcgtccctctgctcctccgagtccaaatgttcatgtctaggcaaacggccccgatcttctaataaacgcgtccgccccagcctcccccaccagggttggctcgtcccccgcattcgttcgagtccgaagcccggatcgcattccggcgccggcgcggagcccggcgctcgcaagatgcccaatagcgcgctgagggacccggcgctcgcctcagcccggcggcggcggcggccgaacaatgaagctcctgaagccgacctgggtcaaccacaatggcaagccgattttttcagttgatattcaccctgacgggaccaagttcgcaactggaggacaagggcaggattctgggaaggttgtgatctggaatatgtctccagtcctccaggaggatgacgagaaggatgaaaatattcccaagatgctttgccagatggacaatcacttagcatgtgtgaactgtgtgcggtggtcaaacagtgggatgtatttagcttctgggggagatgacaaactgattatggtgtggaagcgggctacgtacatcggccccagcaccgtgttcggctccagtggtaagcttgccaatgtggagcagtggcggtgtgtctctatcctccggaatcattcaggcgaacttcccacgttctgctgtttgtcctgctgaacagaatcagtaccttcatcagcggatcactaagtcccactgcaccaggcgctgaggttagagaaataactaagactgcgcccttcacccctgatggcaggataggcaaggttggcaccatcgtcacagcggaccctcatcgatgccttgatgtgatggatgtagcatggtctccccacgatgcctggctagcctcatgcagcgtggataacactgtcgtcatctggaatgctgtaaagttcccagaaattctagctactctgagaggtcattctggcttggtcaaagggttgacatgggaccctgttggtaaatacatagcttctcaagctgatgaccgcagcctaaaggtgtggaggacgctggactggcagttggagaccagcatcaccaagccttttgatgagtgtggaggaacgacccatgtgttgcggctcagctggtcacctgatgggcattacctggtgtctgcccatgccatgaacaactcaggccccactgcccagatcatcgaacgggagggatggaagaccaacatggactttgttgggcaccggaaagctgtgactgtcgtgaaattcaacccaaaaatcttcaaaaagaagcagaagaatgggagttctgcgaagcctagctgcccgtactgctgctgtgctgttggcagcaaggaccgctcgctttctgtctggctcacatgtctgaaacggccgctggtggtcatccatgaactgtttgacaaatccatcatggatatttcctggactctgaatgggctgggcatcttggtatgctctatggacggctctgtggcattcctcgacttctcccaggatgagcttggcgatcccctgagcgaggaggagaagagccgcattcaccagtccacctatggcaagagcctagccatcatgaccgaggcccagctctccacagccgtcattgagaaccctgagatgctcaagtaccagcgaaggcagcagcagcagcagctggaccagaagagtgctgcgaccagggagatgggctcagccacctcagtcgcaggcgttgtcaacggggagagtcttgaagatatcaggaagaatcttttgaagaaacaagttgagactcggacagcagatggccggagaagaatcacgcctctctgcatagcacagctggacactggggacttctccacggcattctttaacagcatccccctctcgggctccctggcgggcaccatgctctcttctcatagcagtccacagctactgccactggactccagtacccctaactccttcggcgcctcgaagccttgcacagagcctgtggtggctgccagtgccagacctgcaggcgattctgtcaataaagacagtatgaatgctacctctactcctgctgcattgtcaccttctgtgttaacgaccccgtccaagatcgaacccatgaaagcgtttgactcccggttcacagagcggtccaaagccacaccaggtgctcctgccctgaccagcatgactccgacagctgtggaaaggttaaaagagcagaaccttgtgaaagagctgaggccccgagacctcctggagagcagcagtgacagcgatgagaaagtccctttggctaaggcttcctcactgtccaagcgaaaacttgagcttgaggtagagacagtagagaagaagaagaaagggcggcctcggaaggactctcgtctcatgcctgtgtctctgtctgtccagtctccagctgccctaaccgcagagaaggaggccatgtgtctgtctgcaccagcacttgcactgaagctgccaattccaagcccccagagagcattcaccctccaggtcagctccgatccttccatgtacattgaggtggagaatgaagtgacagtggtggggggcgtgaagctgagccgcctgaagtgcaaccgggaagggaaggagtgggagacggtactcaccagccggatcctcactgctgcgggcagctgtgacgtggtgtgtgtcgcctgtgaaaaaaggatgctgtcagtgttctccacctgtggtcgccgtctcctctctcccatcctcctgccatccccgatctctactttgcattgcacaggctcctacgtcatggcgctcaccgctgcagccacactctctgtctgggatgttcacagacaggtggttgtggtgaaagaagagtctctacactccatcctggcaggaagtgatatgacggtatcacagatcttgctgacgcagcatggaatcccagtaatgaacctgtccgatgggaaggcgtactgctttaatccgtcactttccacatggaacctggtttctgacaagcaggactcactggctcagtgtgcagactttaggagcagcctgccatcccaggacgccatgctgtgctcaggaccgttagccataatccagggccgcacctccaactcgggaaggcaggctgcccggctcttctccgtgcctcatgtggtgcagcaagagaccaccctggcctacctagagaaccaggtggcagcagcactcaccctgcagtccagccacgagtaccgccattggctcctcgtctacgcacggtacctcgtaaacgaagggtctgcggaagagggagctgctgaaggagctgctaccagtcatcgggcagaacctccgattccagcgcctcttcaccgagtgtcaggaacagctcgacatcctgagggacaagtagcctgccccagcctgccctggctgcagcaagggcagggccacactctcgccgctgatgacatgcaggaccgcctctcacctgaccaggctgtagggggaggagacactggcaggagatgtgctgtcctgcaccagcgccagcccagctccctgggcagatgtgccctgtgtcctgggtctgacattgcctcaggagggggaagctcatccctccctccaagcccccgatgcggagctagggctggagctctgcccaggtgccctggggccagcaaggcagtcccaggcctgccgtctccagcacggccccaaggtggacactag

SEQ ID NO: 13656 - DNA, 3436 bp, Homo sapiens
  source 1..3436: mol_type = unassigned DNA
cggtcgcccagacatggcggacggcagcggctggcaggcaagccgattttttcagttgatattcaccctgacgggaccaagttcgcaactggaggacaagggcaggattctgggaaggttgtgatctggaatatgtctccagtcctccaggaggatgacgagaaggatgaaaatattcccaagatgctttgccagatggacaatcacttagcatgtgtgaactgtgtgcggtggtcaaacagtgggatgtatttagcttctgggggagatgacaaactgattatggtgtggaagcgggctacgtacatcggccccagcaccgtgttcggctccagtggtaagcttgccaatgtggagcagtggcggtgtgtctctatcctccggaatcattcaggcgatgtgatggatgtagcatggtctccccacgatgcctggctagcctcatgcagcgtggataacactgtcgtcatctggaatgctgtaaagttcccagaaattctagctactctgagaggtcattctggcttggtcaaagggttgacatgggaccctgttggtaaatacatagcttctcaagctgatgaccgcagcctaaaggtgtggaggacgctggactggcagttggagaccagcatcaccaagccttttgatgagtgtggaggaacgacccatgtgttgcggctcagctggtcacctgatgggcattacctggtgtctgcccatgccatgaacaactcaggccccactgcccagatcatcgaacgggagggatggaagaccaacatggactttgttgggcaccggaaagctgtgactgtcgtgaaattcaacccaaaaatcttcaaaaagaagcagaagaatgggagttctgcgaagcctagctgcccgtactgctgctgtgctgttggcagcaaggaccgctcgctttctgtctggctcacatgtctgaaacggccgctggtggtcatccatgaactgtttgacaaatccatcatggatatttcctggactctgaatgggctgggcatcttggtatgctctatggacggctctgtggcattcctcgacttctcccaggatgagcttggcgatcccctgagcgaggaggagaagagccgcattcaccagtccacctatggcaagagcctagccatcatgaccgaggcccagctctccacagccgtcattgagaaccctgagatgctcaagtaccagcgaaggcagcagcagcagcagctggaccagaagagtgctgcgaccagggagatgggctcagccacctcagtcgcaggcgttgtcaacggggagagtcttgaagatatcaggaagaatcttttgaagaaacaagttgagactcggacagcagatggccggagaagaatcacgcctctctgcatagcacagctggacactggggacttctccacggcattctttaacagcatccccctctcgggctccctggcgggcaccatgctctcttctcatagcagtccacagctactgccactggactccagtacccctaactccttcggcgcctcgaagccttgcacagagcctgtggtggctgccagtgccagacctgcaggcgattctgtcaataaagacagtatgaatgctacctctactcctgctgcattgtcaccttctgtgttaacgaccccgtccaagatcgaacccatgaaagcgtttgactcccggttcacagagcggtccaaagccacaccaggtgctcctgccctgaccagcatgactccgacagctgtggaaaggttaaaagagcagaaccttgtgaaagagctgaggccccgagacctcctggagagcagcagtgacagcgatgagaaagtccctttggctaaggcttcctcactgtccaagcgaaaacttgagcttgaggtagagacagtagagaagaagaagaaagggcggcctcggaaggactctcgtctcatgcctgtgtctctgtctgtccagtctccagctgccctaaccgcagagaaggaggccatgtgtctgtctgcaccagcacttgcactgaagctgccaattccaagcccccagagagcattcaccctccaggtcagctccgatccttccatgtacattgaggtggagaatgaagtgacagtggtggggggcgtgaagctgagccgcctgaagtgcaaccgggaagggaaggagtgggagacggtactcaccagccggatcctcactgctgcgggcagctgtgacgtggtgtgtgtcgcctgtgaaaaaaggatgctgtcagtgttctccacctgtggtcgccgtctcctctctcccatcctcctgccatccccgatctctactttgcattgcacaggctcctacgtcatggcgctcaccgctgcagccacactctctgtctgggatgttcacagacaggtggttgtggtgaaagaagagtctctacactccatcctggcaggaagtgatatgacggtatcacagatcttgctgacgcagcatggaatcccagtaatgaacctgtccgatgggaaggcgtactgctttaatccgtcactttccacatggaacctggtttctgacaagcaggactcactggctcagtgtgcagactttaggagcagcctgccatcccaggacgccatgctgtgctcaggaccgttagccataatccagggccgcacctccaactcgggaaggcaggctgcccggctcttctccgtgcctcatgtggtgcagcaagagaccaccctggcctacctagagaaccaggtggcagcagcactcaccctgcagtccagccacgagtaccgccattggctcctcgtctacgcacggtacctcgtaaacgaagggtttgaataccgacttcgagaaatatgcaaggacttactgggtccggttcactactccactggaagccagtgggagtcaacagtagtgggtctgcggaagagggagctgctgaaggagctgctaccagtcatcgggcagaacctccgattccagcgcctcttcaccgagtgtcaggaacagctcgacatcctgagggacaagtagcctgccccagcctgccctggctgcagcaagggcagggccacactctcgccgctgatgacatgcaggaccgcctctcacctgaccaggctgtagggggaggagacactggcaggagatgtgctgtcctgcaccagcgccagcccagctccctgggcagatgtgccctgtgtcctgggtctgacattgcctcaggagggggaagctcatccctccctccaagcccccgatgcggagctagggctggagctctgcccaggtgccctggggccagcaaggcagtcccaggcctgccgtctccagcacggccccaaggtggacactagcccctgctgctgcaggcaccatgctgcttcagcagtgacgattgagccatttgtgagag

SEQ ID NO: 13657 - DNA, 2979 bp, Homo sapiens
  source 1..2979: mol_type = unassigned DNA
gacatggcggacggcagcggctggcagccgccgcgcccctgcgaggcctaccgcgccgagtggaagctctgccgcagcgccaggcacttcctacaccactactacgtccacggcgagcggccggcctgcgaacagtggcagcgcgacctggccagctgccgcgactgggaggagcgccggaacgccgaggcccaggcaagccgattttttcagttgatattcaccctgacgggaccaagttcgcaactggaggacaagggcaggattctgggaaggttgtgatctggaatatgtctccagtcctccaggaggatgacgagaaggatgaaaatattcccaagatgctttgccagatggacaatcacttagcatgtgtgaactgtgtgcggtggtcaaacagtgggatgtatttagcttctgggggagatgacaaactgattatggtgtggaagcgggctacgtacatcggccccagcaccgtgttcggctccagtggtaagcttgccaatgtggagcagtggcggtgtgtctctatcctccggaatcattcaggcgatgtgatggatgtagcatggtctccccacgatgcctggctagcctcatgcagcgtggataacactgtcgtcatctggaatgctgtaaagttcccagaaattctagctactctgagaggtcattctggcttggtcaaagggttgacatgggaccctgttggtaaatacatagcttctcaagctgatgaccgcagcctaaaggtgtggaggacgctggactggcagttggagaccagcatcaccaagccttttgatgagtgtggaggaacgacccatgtgttgcggctcagctggtcacctgatgggcattacctggtgtctgcccatgccatgaacaactcaggccccactgcccagatcatcgaacgggagggatggaagaccaacatggactttgttgggcaccggaaagctgtgactgtcgtgaaattcaacccaaaaatcttcaaaaagaagcagaagaatgggagttctgcgaagcctagctgcccgtactgctgctgtgctgttggcagcaaggaccgctcgctttctgtctggctcacatgtctgaaacggccgctggtggtcatccatgaactgtttgacaaatccatcatggatatttcctggactctgaatgggctgggcatcttggtatgctctatggacggctctgtggcattcctcgacttctcccaggatgagcttggcgatcccctgagcgaggaggagaagagccgcattcaccagtccacctatggcaagagcctagccatcatgaccgaggcccagctctccacagccgtcattgagaaccctgagatgctcaagtaccagcgaaggcagcagcagcagcagctggaccagaagagtgctgcgaccagggagatgggctcagccacctcagtcgcaggcgttgtcaacggggagagtcttgaagatatcaggaagaatcttttgaagaaacaagttgagactcggacagcagatggccggagaagaatcacgcctctctgcatagcacagctggacactggggacttctccacggcattctttaacagcatccccctctcgggctccctggcgggcaccatgctctcttctcatagcagtccacagctactgccactggactccagtacccctaactccttcggcgcctcgaagccttgcacagagcctgtggtggctgccagtgccagacctgcaggcgattctgtcaataaagacagtatgaatgctacctctactcctgctgcattgtcaccttctgtgttaacgaccccgtccaagatcgaacccatgaaagcgtttgactcccggttcacagagcggtccaaagccacaccaggtgctcctgccctgaccagcatgactccgacagctgtggaaaggttaaaagagcagaaccttgtgaaagagctgaggccccgagacctcctggagagcagcagtgacagcgatgagaaagtccctttggctaaggcttcctcactgtccaagcgaaaacttgagcttgaggtagagacagtagagaagaagaagaaagggcggcctcggaaggactctcgtctcatgcctgtgtctctgtctgtccagtctccagctgccctaaccgcagagaaggaggccatgtgtctgtctgcaccagcacttgcactgaagctgccaattccaagcccccagagagcattcaccctccaggtcagctccgatccttccatgtacattgaggtggagaatgaagtgacagtggtggggggcgtgaagctgagccgcctgaagtgcaaccgggaagggaaggagtgggagacggtactcaccagccggatcctcactgctgcgggcagctgtgacgtggtgtgtgtcgcctgtgaaaaaaggatgctgtcagtgttctccacctgtggtcgccgtctcctctctcccatcctcctgccatccccgatctctactttgcattgcacaggctcctacgtcatggcgctcaccgctgcagccacactctctgtctgggatgttcacagacaggtggttgtggtgaaagaagagtctctacactccatcctggcaggaacctggtttctgacaagcaggactcactggctcagtgtgcagactttaggagcagcctgccatcccaggacgccatgctgtgctcaggaccgttagccataatccagggccgcacctccaactcgggaaggcaggctgcccggctcttctccgtgcctcatgtggtgcagcaagagaccaccctggcctacctagagaaccaggtggcagcagcactcaccctgcagtccagccacgagtaccgccattggctcctcgtctacgcacggtacctcgtaaacgaagggtttgaataccgacttcgagaaatatgcaaggacttactgggtccggttcactactccactggaagccagtgggagtc

SEQ ID NO: 13658 - DNA, 504 bp, Homo sapiens
  source 1..504: mol_type = unassigned DNA
ctttctcagaaaaccaaatatggcatcttccatgaggagcttgttttctgaccacgggaaatatgttgaatctttccggaggtttctcaaccattccacggaacaccagtgcatgcaggaattcatggacaagaagctgccaggcataataggaagataccagaattgctgttaacaaataaaatactggccagatgtgttggttcacgcctgtaatcctagcacttcgggaggctgaggcgggaggattacttgagcctaggagtttgagaccagcctgggcaacatagcaagatcccatctctacaaaaaagtgaaaaagttagctgaacaaggcggcatgcacatgctactccagacgctgaagtgggaagatcacttaagtccgagagatcgaggcttcagtgagatatggctgagacactgctctcagcctggatgacagagtgagaacctgtctcaaacaagagaaaaaaataaatcaaatgctactcaaaattctca

SEQ ID NO: 13659 - DNA, 3291 bp, Homo sapiens
  source 1..3291: mol_type = unassigned DNA
gactcagtaatgagctctacaagccagcctttgtggcatgttaaattcaaaacaagcttagcatttttttttttttttttggatagaaactggtgggggtggggaaagaaagagggaactgggaagagaaggaggggaacttaaaccttgcttcctgctctgtctttctcagaaaaccaaatatggcatcttccatgaggagcttgttttctgaccacgggaaatatgttgaatctttccggaggtttctcaaccattccacggaacaccagtgcatgcaggaattcatggacaagaagctgccaggcataataggaaggattggagacacaaaatcagaaattaagattctaagcataggcggaggtgcaggtgaaattgatcttcaaattctctccaaagttcaggctcaatacccaggagtttgtatcaacaatgaagttgttgagccaagtgctgaacaaattgccaaatacaaagagcttgtagccaagacatcgaacctcgagaacgtaaagtttgcttggcataaggagacatcatctgaataccaaagtagaatgttggagaaaaaggagcttcaaaagtgggactttattcatatgattcaaatgctgtattatgtaaaagacatcccagctaccctgaaattcttccatagtctcttaggtaccaatgctaagatgctcattattgttgtgtcaggaagcagtggctgggacaagctgtggaaaaagtacggatcacgctttccccaggatgacctctgccagtatatcacatcagatgacctcactcagatgctggacaacctagggcttaagtatgagtgctatgaccttttgtccaccatggatatatctgactgctttattgatggtaatgaaaatggagacctgctttgggattttttgactgaaacctgcaactttaatgccacagcaccacctgatctcagagcagagcttgggaaagatctacaagagcctgaatttagtgctaagaaagaggggaaggttctttttaataatactctgagtttcatagtgattgaggcataactatcaatcacaaaagtatattcaaaaattatattttgaacaactcgaatcactcatttatttccatattaaaatcacaaactcatccattaatgtagataaagcactgtttggatatgagatgtagcaaattccaatacattattggacttccatttggaatcatatgggatactgctggtcttatcctgtccctcctccaggtagagagaccacaagcaggctcaacataacataagctagaaaaattagatgactgaatttctatggcatattgataataaaattcattccatttgctgattgtctgaaattttctagaatactaataaaatacatactatagattctttattagtgaagtatgcactaatcaatactttgaacacaaagcctgtgttactgatttggccgttttgtgaagaaacatttatctttgtacgttcttctattgtgctttctatctaatttttattaatttgtaagagtaagcacctttagaatattaaaaattaattctttatcacatgttgtcatttcttcccattgtgttttctcttgtaattttatctgtgaattaatagctttttgtttgtctttttgatatactgaagttttctattatattcagccagatttttttttaagtctcggcttctgatacattttaaaagaccttctaaaaccaaggttttagaatactaacattttatcaaaataatattatagttttgctttttttaaaaaatgaaatctttactatgtttgaaatttagataagtataaacagtgagaacaaactgtttcccctcaaaataatagccagatgtataaacaaaatttattgaagaacaaagaaacacaaaactaaacctgttctagcttaaaatgcagcttttaccagatttctaggaattgggtaaatgcaaggttctagaaaaccttcaatgcattttgatactttatagtttcttatgtcactctcaagaactcctataagaccaagagtcatctttggactgtaggatttcaggggggttttgaaaacaaatttgatgtttcttatttttaataataacgctctgttatttttgacataaacagtacatttaataattaataaataaatattttaagtatgtaaataattagtactccctgtcacaaacaaaacaaaagtaaggttttactaaacagctcatgagccctcattctgccagtgaggaagccttcaaccccgtgtgatactcactctttcatgcaatagggcttccatgtaatgttgccgtataatcactttaaaaagttaaacgacccatctcaatcacctagtttatccccagggaatacactggcatagagagcctatttacactaataaactaccaagctttgttgttcataataagtaaaatggacttgcattgctctcttttttggacaacttcatcaatgctttttgaattatatgtttcaacaaatgaaacgacagttatccaatcagattcctgaaaatgaacactgaaccgttaatcatactgatatgtactactgacaaaggaaatctgtgaggcacacatgattgatgggtatggggccatgaagaccttgaagagcttcaccagaagtatggaaatcaagactttacagagtcttttgtataaagcacacgtgcaaaaacaaacaaaattagaactaacaatgctattgaaagatacaaaagaattgcagtccatagattggtgtttgtaaatatggcctttttctcgtccttattaaacccttagtatacaaggataaataaattctcacctgcttaattttagtgcaattgaaacacataagcctttttaaagagagaaattcccatgaaaacctactagtcagcaatgggaagttgtataaattcaagggataaacctatccctgttttcttcctgcactgtatgataataccaaaatttgggacagtcacatactaacttttcagatttgttcttgtgtttcagaaaaaagtgctcagcatgaatttggaatgttgttttatgtattgttgtggatctctcagtgtttaacatggtgccttgcatatggtaaatgctaagtaaagcgggatcaatgaattatttccttctcaaacatttatcttataccttgtgtgttcatattattattataaacagagctcaagaaacccaataaagttatgtgttgccagtgtaaaccttaa

SEQ ID NO: 13660 - DNA, 835 bp, Homo sapiens
  source 1..835: mol_type = unassigned DNA
gactcagtaatgagctctacaagccagcctttgtggcatgttaaattcaaaacaagcttagcatttttttttttttttttggatagaaactggtgggggtggggaaagaaagagggaactgggaagagaaggaggggaacttaaaccttgcttcctgctctgtctttctcagaaaaccaaatatggcatcttccatgaggagcttgttttctgaccacgggaaatatgttgaatctttccggaggtttctcaaccattccacggaacaccagtgcatgcaggaattcatggacaagaagctgccaggcataataggaaggattggagacacaaaatcagaaattaagattctaagcataggcggaggtgcagattgtctcattcggggaagctccagggttctcaagcggaattcgtgtttcattttgtgtagcacccgtcagaaagacaagccaggcatgaggatccatgatgagcgctcttctgagttgccatttggagctgcccgtttagaaagcaaatctgcatttccctcattcctagtttccttcatcctcttttaagtgtcatcttttccatgaagcctactagatcacacagttgaaaattgcaaagtcttcacaccgcagcttcccctttctttgttgctttggttttctccgtgggacttcccaccatccgtaaaattaggtgtttttgcctgttttattcactgctacgtctccaatggttagaacctgacatttagtgggtgctcaataatatttgttgaagtaatgtataataacttcactttcttgagtaattactatatatcatgaactgtggtaaatta

SEQ ID NO: 13661 - DNA, 1150 bp, Homo sapiens
  source 1..1150: mol_type = unassigned DNA
cagtcttccgttaaagatttcactgctgtagatttctgagagtgctgtgtagctgtcctctttatcctggtgtttgccacttcgaacagtcactttcccacttggaacttacttgtggctttgctgacaaaacaggaaaaaaccaaatatggcatcttccatgaggagcttgttttctgaccacgggaaatatgttgaatctttccggaggtttctcaaccattccacggaacaccagtgcatgcaggaattcatggacaagaagctgccaggcataataggaaggattggagacacaaaatcagaaattaagattctaagcataggcggaggtgcaggtgaaattgatcttcaaattctctccaaagttcaggctcaatacccaggagtttgtatcaacaatgaagttgttgagccaagtgctgaacaaattgccaaatacaaagagcttgtagccaagacatcgaacctcgagaacgtaaagtttgcttggcataaggagacatcatctgaataccaaagtagaatgttggagaaaaaggagcttcaaaagtgggactttattcatatgattcaaatgctgtattatgtaaaagacatcccagctaccctgaaattcttccatagtctcttaggtaccaatgctaagatgctcattattgttgtgtcaggaagcagtggctgggacaagctgtggaaaaagtacggatcacgctttccccaggatgacctctgccagtatatcacatcagatgacctcactcagatgctggacaacctagggcttaagtatgagtgctatgaccttttgtccaccatggatatatctgactgctttattgatggtaatgaaaatggagacctgctttgggattttttgactgaaacctgcaactttaatgccacagcaccacctgatctcagagcagagcttgggaaagatctacaagagcctgaatttagtgctaagaaagaggggaaggttctttttaataatactctgagtttcatagtgattgaggcataactatcaatcacaaaagtatattcaaaaattatattttgaacaactcgaatcactcatttatttccatattaaaatcacaaactcatccattaatgtagataaagcactgtttggatatgagat

SEQ ID NO: 13662 - DNA, 4711 bp, Homo sapiens
  source 1..4711: mol_type = unassigned DNA
agtattggagtgttacagggagacatacaggatttaagaagcccatcatggagaagaccttcaattacagagataaaaagtttttcttgtgaacaagttacactagatggaagataacagactgaggagtgagctgcttctgactcgattaaaaagggagtgagccataactggtggctgctcttgcgccaatgagcctccccaattcctcctgcctcttagaagacaagatgtgtgagggcaacaagaccactatggccagcccccagctgatgcccctggtggtggtcctgagcactatctgcttggtcacagtagggctcaacctgctggtgctgtatgccgtacggagtgagcggaagctccacactgtggggaacctgtacatcgtcagcctctcggtggcggacttgatcgtgggtgccgtcgtcatgcctatgaacatcctctacctgctcatgtccaagtggtcactgggccgtcctctctgcctcttttggctttccatggactatgtggccagcacagcgtccattttcagtgtcttcatcctgtgcattgatcgctaccgctctgtccagcagcccctcaggtaccttaagtatcgtaccaagacccgagcctcggccaccattctgggggcctggtttctctcttttctgtgggttattcccattctaggctggaatcacttcatgcagcagacctcggtgcgccgagaggacaagtgtgagacagacttctatgatgtcacctggttcaaggtcatgactgccatcatcaacttctacctgcccaccttgctcatgctctggttctatgccaagatctacaaggccgtacgacaacactgccagcaccgggagctcatcaataggtccctcccttccttctcagaaattaagctgaggccagagaaccccaagggggatgccaagaaaccagggaaggagtctccctgggaggttctgaaaaggaagccaaaagatgctggtggtggatctgtcttgaagtcaccatcccaaacccccaaggagatgaaatccccagttgtcttcagccaagaggatgatagagaagtagacaaactctactgctttccacttgatattgtgcacatgcaggctgcggcagaggggagtagcagggactatgtagccgtcaaccggagccatggccagctcaagacagatgagcagggcctgaacacacatggggccagcgagatatcagaggatcagatgttaggtgatagccaatccttctctcgaacggactcagataccaccacagagacagcaccaggcaaaggcaaattgaggagtgggtctaacacaggcctggattacatcaagtttacttggaagaggctccgctcgcattcaagacagtatgtatctgggttgcacatgaaccgcgaaaggaaggccgccaaacagttgggttttatcatggcagccttcatcctctgctggatcccttatttcatcttcttcatggtcattgccttctgcaagaactgttgcaatgaacatttgcacatgttcaccatctggctgggctacatcaactccacactgaaccccctcatctaccccttgtgcaatgagaacttcaagaagacattcaagagaattctgcatattcgctcctaagggaggctctgaggggatgcaacaaaatgatccttatgatgtccaacaaggaaatagaggacgaaggcctgtgtgttgccaggcaggcacctgggctttctggaatccaaaccacagtcttaggggcttggtagtttggaaagttcttaggcaccatagaagaacagcagatggcggtgatcagcagagagattgaactttgaggaggaagcagaatctttgcaagaaagtcagacctgtttcttgtaactgggttcaaaaagaaaaaaataataaaaataaaagagagagagaatcagacctgggtggaactctcctgctcctcaggaactatgggagcctcagactcattgtaattcaagctttccgagtcaagtgattgacaactgaagagacacgtggctagggttccactggagaattgaaaaggactcttgagccctcctggaatggagctgtataactgtgcagagactttatccatgccaatagttgctgtccccttccaggggtcaccttgagaggcatgacagctgttccacaggggctatcccttctcagaaaacttctcttctgagcctctttaacagctttctccagaaccagtgtctgaaccaccctggaaattctgccttattatttcttactcaaacatgtttagagtggatagaaaattatgcagcttgcacacccatcgtctttaaccccaaatttcctttggctattaaaaaagtggtggcaaaagacatcctcaaaagaaagagaaatgaaatatttttgaatggttgcacgttaaaaattaaaagaaggaatgggggcagaatgccatatttttgagggctgtactaggtttatctcatttaagccccacaacaccccacaggagggtaattttctaactctagtttgcagaggagcaaattgaggttcagcaaggtgagagaggtacccaaggtcacatagctagttatgtgagaaagttagagtacagatcctctggggtttcagcttattgtagcatattttctccgaaaggcaaaaatgtgcccttttggccgggcatggtagctcaagcctataatcccagcatgttgagaggctgaggtgggcagatcatttgaggccaggagttcaagaccagtctggccaatatggagaaaccttgtctctactaaaaacacaaaaattatctgggcatggtggggcatgcctgtagtcccacttacttgggaggccgaggcacgagaattgcttgaacccgggaggtggaggttgccgtgagccaagatcacgccactgcactccagcctgggcaacagagcaagactctgtctcaaaaaaaaaaatacaatattttaacaatgtgccctcttaagtgtgcacagatacacatacacggtattcccaagagtggtggcagctcaaaatgatatgtttgagtagacgaacagctgacatggagttcccgtgcacctacggaaggggacgctttgaaggaaccaagtgcatttttatctgtgagttctgttgtgtttgtcaaaaagtcattgtaatctttcatagccatacctggtaagcaaaaactagtaaagacataggaacatgtagttttacttggtgtttatgttgcaatctggttgtgatttatattttaaagcttggtgctaaaccacaatatgtatagcatatggagtgcctgtacaagctgatgttttgtattttgtgttcctctttgcatgatctgtcaaagtgagatatttttacctgcctaaaatatgatgtttaaaagcatactctatgtgatttatttatttctacctttctgagtctcttggactaagaagatgttttgaaatgtaccatcaaatgttaacagagtttgatatgggctttctctttggtttctcatcacatttgtaaatgtcttttcaaaaggatttactttttgtaaaaagcttcattctcactctgctttgcatcccccaaacttcttgttcaaaacggggggagtttaggagactttaatcccggtttcagaagctgcagctggtctgtttccaggtcagaaaccattgttcagaagacctccctgtgagagagttgctcctcagggtccctcaggaccaaagaacactcgaaaagagcacttcacacagacaagtggctaagtgtccattatttaccttgaacaatcaaggcaactagtggagagaactgattgtgagctctgcctctgggtcagagagacctggatttgagtctgacaagaacaagaaatggtcaataaatataaattaccagcgtctaaggaacaaggtctatgcattattgtatacagtgtctctagtgcttgtatagtgtctggtatacagagggcactcctatgcatttttaaaacatgctgagcacataccatgtgccaggctttgtgttttatctaatgttatctaatggtattggtgccattatgtaatgttgcctttacaacaacctcatgagggagatttccatctttacaaataggcaaactgaggcccagagagattgaggaactgctccgaggtctgattctggaatgtgcttcctttccactttatcaatctgctcttcgtactcctgtctgaacgatggaaattaatttttgaatgtataaaagacaacagactatgatacagaaatgtcagccccagcccactaagaaagccccagcccatcagtggctaatggctttaataaattggtcatttggctacttggcttgtggacaatctctgacctcttttgaagatgggcactgcatggacttccaggaggtggatttaatagtcttaactcagcatgaaaaagatgctgggatgctcctggctatttatgcaccctaagtgccatagagacatgctgttggcaaggcatggtggctcatgcctgtaatcccagcacactgggaggctgacgcgggcagatggctggagtccaggagttcgagacaagcctgggcaccatggtgaaatcctgtctctactaaaaataaaaaattagccaggggctgtgacgca

SEQ ID NO: 13663 - DNA, 574 bp, Homo sapiens
  source 1..574: mol_type = unassigned DNA
ttcccggcaggagagcagcatttgtaaaggtatggggtgtacacgagcagggcctatttggggagagtggagaatcagagatgaggctgcacagtaaggtgagaccaggtggaaaaagctctgtgtgatgggtcgaaggtattgacatatactagccactgcccggcaccctccctccgtttccggagtagacctgtttgcttatctcgtgggcatttgccaggctgattagagtaatgagtaaagaaaagagggcactgggaaagctaagttcatttatattagaaattacatgatactcttccataaatcagaaagattgaagagtgggtgaaagaagggaaaagggaattaaaggggaaccaaggcaacctgaagtttttgagagagagagcaggaagatttgaggatgagcaggtgatgctgtagctggcgctatgtagcgacagatgggagaagttctttgtgatggttttgcctctttgagagtcttcagtaaagggagtgagccataactggtggctgctcttgcgccaatgagcctccccaattcctcctgcctcttagaagacaa

SEQ ID NO: 13664 - DNA, 4278 bp, Homo sapiens
  source 1..4278: mol_type = unassigned DNA
accaaactttccccggagccggcgccgggagtgagccataactggtggctgctcttgcgccaatgagcctccccaattcctcctgcctcttagaagacaagatgtgtgagggcaacaagaccactatggccagcccccagctgatgcccctggtggtggtcctgagcactatctgcttggtcacagtagggctcaacctgctggtgctgtatgccgtacggagtgagcggaagctccacactgtggggaacctgtacatcgtcagcctctcggtggcggacttgatcgtgggtgccgtcgtcatgcctatgaacatcctctacctgctcatgtccaagtggtcactgggccgtcctctctgcctcttttggctttccatggactatgtggccagcacagcgtccattttcagtgtcttcatcctgtgcattgatcgctaccgctctgtccagcagcccctcaggtaccttaagtatcgtaccaagacccgagcctcggccaccattctgggggcctggtttctctcttttctgtgggttattcccattctaggctggaatcacttcatgcagcagacctcggtgcgccgagaggacaagtgtgagacagacttctatgatgtcacctggttcaaggtcatgactgccatcatcaacttctacctgcccaccttgctcatgctctggttctatgccaagatctacaaggccgtacgacaacactgccagcaccgggagctcatcaataggtccctcccttccttctcagaaattaagctgaggccagagaaccccaagggggatgccaagaaaccagggaaggagtctccctgggaggttctgaaaaggaagccaaaagatgctggtggtggatctgtcttgaagtcaccatcccaaacccccaaggagatgaaatccccagttgtcttcagccaagaggatgatagagaagtagacaaactctactgctttccacttgatattgtgcacatgcaggctgcggcagaggggagtagcagggactatgtagccgtcaaccggagccatggccagctcaagacagatgagcagggcctgaacacacatggggccagcgagatatcagaggatcagatgttaggtgatagccaatccttctctcgaacggactcagataccaccacagagacagcaccaggcaaaggcaaattgaggagtgggtctaacacaggcctggattacatcaagtttacttggaagaggctccgctcgcattcaagacagtatgtatctgggttgcacatgaaccgcgaaaggaaggccgccaaacagttgggttttatcatggcagccttcatcctctgctggatcccttatttcatcttcttcatggtcattgccttctgcaagaactgttgcaatgaacatttgcacatgttcaccatctggctgggctacatcaactccacactgaaccccctcatctaccccttgtgcaatgagaacttcaagaagacattcaagagaattctgcatattcgctcctaagggaggctctgaggggatgcaacaaaatgatccttatgatgtccaacaaggaaatagaggacgaaggcctgtgtgttgccaggcaggcacctgggctttctggaatccaaaccacagtcttaggggcttggtagtttggaaagttcttaggcaccatagaagaacagcagatggcggtgatcagcagagagattgaactttgaggaggaagcagaatctttgcaagaaagtcagacctgtttcttgtaactgggttcaaaaagaaaaaaataataaaaataaaagagagagagaatcagacctgggtggaactctcctgctcctcaggaactatgggagcctcagactcattgtaattcaagctttccgagtcaagtgattgacaactgaagagacacgtggctagggttccactggagaattgaaaaggactcttgagccctcctggaatggagctgtataactgtgcagagactttatccatgccaatagttgctgtccccttccaggggtcaccttgagaggcatgacagctgttccacaggggctatcccttctcagaaaacttctcttctgagcctctttaacagctttctccagaaccagtgtctgaaccaccctggaaattctgccttattatttcttactcaaacatgtttagagtggatagaaaattatgcagcttgcacacccatcgtctttaaccccaaatttcctttggctattaaaaaagtggtggcaaaagacatcctcaaaagaaagagaaatgaaatatttttgaatggttgcacgttaaaaattaaaagaaggaatgggggcagaatgccatatttttgagggctgtactaggtttatctcatttaagccccacaacaccccacaggagggtaattttctaactctagtttgcagaggagcaaattgaggttcagcaaggtgagagaggtacccaaggtcacatagctagttatgtgagaaagttagagtacagatcctctggggtttcagcttattgtagcatattttctccgaaaggcaaaaatgtgcccttttggccgggcatggtagctcaagcctataatcccagcatgttgagaggctgaggtgggcagatcatttgaggccaggagttcaagaccagtctggccaatatggagaaaccttgtctctactaaaaacacaaaaattatctgggcatggtggggcatgcctgtagtcccacttacttgggaggccgaggcacgagaattgcttgaacccgggaggtggaggttgccgtgagccaagatcacgccactgcactccagcctgggcaacagagcaagactctgtctcaaaaaaaaaaatacaatattttaacaatgtgccctcttaagtgtgcacagatacacatacacggtattcccaagagtggtggcagctcaaaatgatatgtttgagtagacgaacagctgacatggagttcccgtgcacctacggaaggggacgctttgaaggaaccaagtgcatttttatctgtgagttctgttgtgtttgtcaaaaagtcattgtaatctttcatagccatacctggtaagcaaaaactagtaaagacataggaacatgtagttttacttggtgtttatgttgcaatctggttgtgatttatattttaaagcttggtgctaaaccacaatatgtatagcatatggagtgcctgtacaagctgatgttttgtattttgtgttcctctttgcatgatctgtcaaagtgagatatttttacctgcctaaaatatgatgtttaaaagcatactctatgtgatttatttatttctacctttctgagtctcttggactaagaagatgttttgaaatgtaccatcaaatgttaacagagtttgatatgggctttctctttggtttctcatcacatttgtaaatgtcttttcaaaaggatttactttttgtaaaaagcttcattctcactctgctttgcatcccccaaacttcttgttcaaaacggggggagtttaggagactttaatcccggtttcagaagctgcagctggtctgtttccaggtcagaaaccattgttcagaagacctccctgtgagagagttgctcctcagggtccctcaggaccaaagaacactcgaaaagagcacttcacacagacaagtggctaagtgtccattatttaccttgaacaatcaaggcaactagtggagagaactgattgtgagctctgcctctgggtcagagagacctggatttgagtctgacaagaacaagaaatggtcaataaatataaattaccagcgtctaaggaacaaggtctatgcattattgtatacagtgtctctagtgcttgtatagtgtctggtatacagagggcactcctatgcatttttaaaacatgctgagcacataccatgtgccaggctttgtgttttatctaatgttatctaatggtattggtgccattatgtaatgttgcctttacaacaacctcatgagggagatttccatctttacaaataggcaaactgaggcccagagagattgaggaactgctccgaggtctgattctggaatgtgcttcctttccactttatcaatctgctcttcgtactcctgtctgaacgatggaaattaatttttgaatgtataaaagacaacagactatgatacagaaatgtcagccccagcccactaagaaagccccagcccatcagtggctaatggctttaataaattggtcatttggcta

SEQ ID NO: 13665 - DNA, 2080 bp, Homo sapiens
  source 1..2080: mol_type = unassigned DNA
atttcaaagcacaccatgccggcagcacttggaggtggtatgtgctgggaaactgaccaacagtttagtcagactgagtcacttcaaggaggggagtggagacagcagtgggtgccagatgacacggagctgtcggcttccgtgtgcattttcttttgatagtagccgtagagaagttgtccgccaggcagccctcaatgggatttttcatttaagaaaaatcactctgctcgtgcactgatggagaaatgaactacaagaagcaagccctgaggtctggagacaggaagctactgaaaccagccagggagtgagccataactggtggctgctcttgcgccaatgagcctccccaattcctcctgcctcttagaagacaagatgtgtgagggcaacaagaccactatggccagcccccagctgatgcccctggtggtggtcctgagcactatctgcttggtcacagtagggctcaacctgctggtgctgtatgccgtacggagtgagcggaagctccacactgtggggaacctgtacatcgtcagcctctcggtggcggacttgatcgtgggtgccgtcgtcatgcctatgaacatcctctacctgctcatgtccaagtggtcactgggccgtcctctctgcctcttttggctttccatggactatgtggccagcacagcgtccattttcagtgtcttcatcctgtgcattgatcgctaccgctctgtccagcagcccctcaggtaccttaagtatcgtaccaagacccgagcctcggccaccattctgggggcctggtttctctcttttctgtgggttattcccattctaggctggaatcacttcatgcagcagacctcggtgcgccgagaggacaagtgtgagacagacttctatgatgtcacctggttcaaggtcatgactgccatcatcaacttctacctgcccaccttgctcatgctctggttctatgccaagatctacaaggccgtacgacaacactgccagcaccgggagctcatcaataggtccctcccttccttctcagaaattaagctgaggccagagaaccccaagggggatgccaagaaaccagggaaggagtctccctgggaggttctgaaaaggaagccaaaagatgctggtggtggatctgtcttgaagtcaccatcccaaacccccaaggagatgaaatccccagttgtcttcagccaagaggatgatagagaagtagacaaactctactgctttccacttgatattgtgcacatgcaggctgcggcagaggggagtagcagggactatgtagccgtcaaccggagccatggccagctcaagacagatgagcagggcctgaacacacatggggccagcgagatatcagaggatcagatgttaggtgatagccaatccttctctcgaacggactcagataccaccacagagacagcaccaggcaaaggcaaattgaggagtgggtctaacacaggcctggattacatcaagtttacttggaagaggctccgctcgcattcaagacagtatgtatctgggttgcacatgaaccgcgaaaggaaggccgccaaacagttgggttttatcatggcagccttcatcctctgctggatcccttatttcatcttcttcatggtcattgccttctgcaagaactgttgcaatgaacatttgcacatgttcaccatctggctgggctacatcaactccacactgaaccccctcatctaccccttgtgcaatgagaacttcaagaagacattcaagagaattctgcatattcgctcctaagggaggctctgaggggatgcaacaaaatgatccttatgatgtccaacaaggaaatagaggacgaaggcctgtgtgttgccaggcaggcacctgggctttctggaatccaaaccacagtcttaggggcttggtagtttggaaagttcttaggcaccatagaagaacagcagatggcggtgatcagcagagagattgaactttgaggaggaagcagaatctttgcaagaaagtcagacctgtttcttgtaactgggttcaaaaagaaaaaaataat

SEQ ID NO: 13666 - DNA, 3095 bp, Homo sapiens
  source 1..3095: mol_type = unassigned DNA
caggagattgcctgctctctgaaaaaccaggaggagctggtagggaaggactggggcgtggaacagggcctcagcttgtttctcgccagttggaatcatatacagccaccactgggagggagccttggagattacctagtgaccaggggctcttatttaatcaagaggcattgcacatgcagttactttattgacgtagtgtttgcactacttcaatagtgcaaagggaggaagggaggaaggagaaaccaccctaatgcccgtgagagggtgatgtggggatgataggataaacctattcatggtgagcctccccacagactgttatgcaaccattagaaggaatgagtgagttctgtccctgctgacctggatgtgggatcacgtgttctgccaagtaagaccagtaagatttagagatgcgttcggagcaggggtggcgtggatgacaggtgacgaactgccgattaaatctggccctctgcctggctttgtacagcccgtggctaagaatggtttttacatttttaaattttggaaaaaaatcaaaaaaaggagatttttatgacacgtgaaaatgatatgaaatttacatttcagtgttcattactgaagttttgttggagtgcagccacgctcttctgtcggcacgtcatctgcatagctgcattcgcactgcaaaggcagagccgagccgtcacaggctgtgaggcagaacgtgtttattacctgacccttttctgaaaaagtttgtcggccaccgccttagagtatgatgacattttgccaaacagcagcaccagatatggttctcagcacttcagaggagtagattcattacatttgtttattcgttcattcattttatcctttattcgtcagatgcttactgtctatctgtggggccaggcaccaggaaccagcagagaacaaacagatgcaggccttcttcttgtggagctgaaagtctgtgtctagatccttcttttctcagtacaagcacttccagcctttccaactctttctcacgagtctcagtgtccagccccttgcatcctgcctcccttctgcctccccagtatgtatcctgattgcccaagtccctcccaaaaagaggtatccaaactggtcccatacttcctggggtcttgccaagaggttgagatctagtagaaggacacatcttgaattgggtcatgctttctatctggtttcaaggtgcttaacatccaacctttgccttttcagctcctgccctccactgactccagagagggagatccccagtacttgactccatcacgcagatgggagcaggcaccagctatggagagggatacagctgcgtctccacatgacccatcctgcatgacaccaaagccaccgccagacagtgcctcggattctatgcaaaacctgggaagcggagacctaccccagccccgggaggaagctagctcttcaggggaccgtctgaggactggagtttgatccatgaacctggcttcgaggccttgcttttctctcttcttcattcatattcattcccaacaccttagaaggtgttgcttaatttatttctagaaaagcagcccagagtcagtcattgaagccttccccaccccctggccaaaaaaaaaaaaaaaaaaaaactggacacattttggatctgttgggagcttggagtccagtggttggcatagttgtcacattgggagcagagaagaagcaaccaggggccctgatcaggggactgagccgtagagtcccaggatggcacccaatggcacagcctcttccttttgcctggactctaccgcatgcaagatcaccatcaccgtggtccttgcggtcctcatcctcatcaccgttgctggcaatgtggtcgtctgtctggccgtgggcttgaaccgccggctccgcaacctgaccaattgtttcatcgtgtccttggctatcactgacctgctcctcggcctcctggtgctgcccttctctgccatctaccagctgtcctgcaagtggagctttggcaaggtcttctgcaatatctacaccagcctggatgtgatgctctgcacagcctccattcttaacctcttcatgatcagcctcgaccggtactgcgctgtcatggacccactgcggtaccctgtgctggtcaccccagttcgggtcgccatctctctggtcttaatttgggtcatctccattaccctgtcctttctgtctatccacctggggtggaacagcaggaacgagaccagcaagggcaatcataccacctctaagtgcaaagtccaggtcaatgaagtgtacgggctggtggatgggctggtcaccttctacctcccgctactgatcatgtgcatcacctactaccgcatcttcaaggtcgcccgggatcaggccaagaggatcaatcacattagctcctggaaggcagccaccatcagggagcacaaagccacagtgacactggccgccgtcatgggggccttcatcatctgctggtttccctacttcaccgcgtttgtgtaccgtgggctgagaggggatgatgccatcaatgaggtgttagaagccatcgttctgtggctgggctatgccaactcagccctgaaccccatcctgtatgctgcgctgaacagagacttccgcaccgggtaccaacagctcttctgctgcaggctggccaaccgcaactcccacaaaacttctctgaggtccaacgcctctcagctgtccaggacccaaagccgagaacccaggcaacaggaagagaaacccctgaagctccaggtgtggagtgggacagaagtcacggccccccagggagccacagacaggtaatagccctagccattggtgcacaggatgggggcaatgggaggggatgctactgatgggaatgattaagggagctgctgtttaggtggtgctggtttatgttctaggaactcttcatgagcactttgtaaacaccctcttgcttaatcctcccaacggcccccaaaggtagaacttagctcccttttaaaaggagcacattaaaattctcagaggacttggcaagggccgcacagctggggcct

SEQ ID NO: 13667 - DNA, 2561 bp, Homo sapiens
  source 1..2561: mol_type = unassigned DNA
gtgcgaggcgcggggcgcaggccgtgcgcgcgccgcccgctgcatccctgcccggagcgcagccggcgcgggcgcgggaccgaggcgaaccgggtgcggagccaatacccgcggcagcagcaccagctcctgccctccactgactccagagagggagatccccagtacttgactccatcacgcagatgggagcaggcaccagctatggagagggatacagctgcgtctccacatgacccatcctgcatgacaccaaagccaccgccagacagtgcctcggattctatgcaaaacctgggaagcggagacctaccccagccccgggaggaagctagctcttcaggggaccgtctgaggactggagtttgatccatgaacctggcttcgaggccttgcttttctctcttcttcattcatattcattcccaacaccttagaaggtgttgcttaatttatttctagaaaagcagcccagagtcagtcattgaagccttccccaccccctggccaaaaaaaaaaaaaaaaaaaaactggacacattttggatctgttgggagcttggagtccagtggttggcatagttgtcacattgggagcagagaagaagcaaccaggggccctgatcaggggactgagccgtagagtcccaggatggcacccaatggcacagcctcttccttttgcctggactctaccgcatgcaagatcaccatcaccgtggtccttgcggtcctcatcctcatcaccgttgctggcaatgtggtcgtctgtctggccgtgggcttgaaccgccggctccgcaacctgaccaattgtttcatcgtgtccttggctatcactgacctgctcctcggcctcctggtgctgcccttctctgccatctaccagctgtcctgcaagtggagctttggcaaggtcttctgcaatatctacaccagcctggatgtgatgctctgcacagcctccattcttaacctcttcatgatcagcctcgaccggtactgcgctgtcatggacccactgcggtaccctgtgctggtcaccccagttcgggtcgccatctctctggtcttaatttgggtcatctccattaccctgtcctttctgtctatccacctggggtggaacagcaggaacgagaccagcaagggcaatcataccacctctaagtgcaaagtccaggtcaatgaagtgtacgggctggtggatgggctggtcaccttctacctcccgctactgatcatgtgcatcacctactaccgcatcttcaaggtcgcccgggatcaggccaagaggatcaatcacattagctcctggaaggcagccaccatcagggagcacaaagccacagtgacactggccgccgtcatgggggccttcatcatctgctggtttccctacttcaccgcgtttgtgtaccgtgggctgagaggggatgatgccatcaatgaggtgttagaagccatcgttctgtggctgggctatgccaactcagccctgaaccccatcctgtatgctgcgctgaacagagacttccgcaccgggtaccaacagctcttctgctgcaggctggccaaccgcaactcccacaaaacttctctgaggtccaacgcctctcagctgtccaggacccaaagccgagaacccaggcaacaggaagagaaacccctgaagctccaggtgtggagtgggacagaagtcacggccccccagggagccacagacagaccatggctttgccttccagaatgctggtctgtggaactgacccattcattcattcatttgttcattcattcatttgcaaacattcatccaattcccaccacatgccaggaattatgatgaatactggggatgtagaaatgagattttttgggtttatggtgatgaagttacagaaaatcaatggcacagccctggtctcagctctgccgtcactcaacttgtatcttgagcaagttcctccccatctcaggcctcagtttcctcatcgcatagagagttggtcttccctcaccgggcttcctacttgccctccagagttgcctgaagctcacatgagcgaagggacatgaacatgctctgccatctcccaataggacataagtccacgctggagcgctgagcatcagactcaagaaaagcttgcgtggatattgcagacccaccaacaagggctccaggttctggagttgtggaggcaaaactgcctagtgagaaccctacatattccctctggtccttgcagctgccacccccattcccaggggtggagtgtccctccatagacttggatcctgggccctctgctccttcaccactgtccatctgaagcaagcctggttgctccggcactgaactgtggcctcgggccctggaccctgcccctcaaatccaccctccaagtgcacacctggaaacttccgcttccagtcctgatgggtaaaacgcccacctaccatatccttgcgcaatctcttattcaggaggcagctggagtgcaaagctgacttagttcacaaagtataaaaaaatacagggatgtggttcagctagaa

SEQ ID NO: 13668 - DNA, 3668 bp, Homo sapiens
  source 1..3668: mol_type = unassigned DNA
ggaagactacacattttaggtatgtgattagaaaacatacttgtcagaattgtctggctggattaatttgctaatttgaccttcttcatcatttgatgtgatgccagatactaatagcacaatcaatttatcactaagcactcgtgttactttagcattttttatgtccttagtagcttttgctataatgctaggaaatgctttggtcattttagcttttgtggtggacaaaaaccttagacatcgaagtagttatttttttcttaacttggccatctctgacttctttgtgggtgtgatctccattcctttgtacatccctcacacgctgttcgaatgggattttggaaaggaaatctgtgtattttggctcactactgactatctgttatgtacagcatctgtatataacattgtcctcatcagctatgatcgatacctgtcagtctcaaatgctgtgtcttatagaactcaacatactggggtcttgaagattgttactctgatggtggccgtttgggtgctggccttcttagtgaatgggccaatgattctagtttcagagtcttggaaggatgaaggtagtgaatgtgaacctggatttttttcggaatggtacatccttgccatcacatcattcttggaattcgtgatcccagtcatcttagtcgcttatttcaacatgaatatttattggagcctgtggaagcgtgatcatctcagtaggtgccaaagccatcctggactgactgctgtctcttccaacatctgtggacactcattcagaggtagactatcttcaaggagatctctttctgcatcgacagaagttcctgcatcctttcattcagagagacagaggagaaagagtagtctcatgttttcctcaagaaccaagatgaatagcaatacaattgcttccaaaatgggttccttctcccaatcagattctgtagctcttcaccaaagggaacatgttgaactgcttagagccaggagattagccaagtcactggccattctcttaggggtttttgctgtttgctgggctccatattctctgttcacaattgtcctttcattttattcctcagcaacaggtcctaaatcagtttggtatagaattgcattttggcttcagtggttcaattcctttgtcaatcctcttttgtatccattgtgtcacaagcgctttcaaaaggctttcttgaaaatattttgtataaaaaagcaacctctaccatcacaacacagtcggtcagtatcttcttaaagacaattttctcacctctgtaaattttagtctcaatctcacctaaatgaatcaggtctgccctttatcttgcccttttcattctaccaacagatctgcactttgaagtcaatggtaaattactccagtgaataatagcagtataatatgacttgataatatttttgtaaacttgtagtcataatagtactatattcttcttagtcctcacctcttccttgtcttttagatcttaatttcatgctgattacaaaaatccagttttgttttctttctatgttccatgcataatacagtcttaagtgaatttctcttttttaattttatcgtaatagaaacttatccagtttgaaaatcattccctaaagcatgcaataggaaaaagaacctcctggctgggactgcccaactctgttctgatcagtgggtgggtgaggtagggtttgagttggcaagagcagggaacgggcatgtgcccaggtgagctcctgtgtgtgtccagattttatattcctaatcccagtaaggaagaaagcgtagtgtgggagaggagagagctgatgactgcagttctcaaaggtcctcagtgaagttattttggaggccctggtggtcacaggatcagaaggcaagggataggcagtggtcaccaatggttgaaagtatggcttgtcccatttcttcctgttctctttttctagcttccacatcagcttccttttttgagaacatatagaagaagaaggctaagagatggtgaagagactgcatgattaaactagatagacctggtatacagtcactgaactagtagatgtcaataattattatttttaaaaatttttatttgttggccgggcatggtggctcacgcctgaaatcccagcactttgggaggccaaggtgggcggatcatgaggtcaggagatcgagaccatcctggccaacatggtgaaaccccatctgtactaaaatacaaacaagtagctggttgtggcgccgcatgcctgtagtcccagctactcgggaggctgaggcaggggaattgcttgaacccgggaggcggagtttgccagcctggcaacagaacaagactctgtctaaaaagaaaaaaaaatttttttgtttaagacagcatcttgctctgtctcccaggctggagcgtagtaatgcaatcatagctcactgcagcctggaactccttggctcaagcaatcctgctgccttggcctcccaagtatgtaggactacaggtactcgccaccacacctggataattaaaaaattatttctgtagagatgaagtctcactgtgttgcccagcctgggtgtcaataattattttttaaaaaaaatttttaaaaaggttttttgagacagattcttgctctgtcacccaggctggagtgcagtagcatgatcagggatcactgcaacctctgcctcctgggttcaagcgattcttgtgcctaagccacctgagcagctgggattacaggtgcatgccaccatgcctggctaattttggtatttttagtagagatgaggttttgccattttggtcaggctggaatttttttttttttaattttgataagacagggtattgccgtgttggccagactggtctcaaactcctgggctgaaacaatcctcccgccttggcctcccaaagtgctgggattataggcacaagacaccacaataattattgcctgtatgtcaattattattttaaaatattgttgtatttacttaatgtctttaatgcatttgcccaatattttacattgtactgctcagaggtattcctttattatgtggttagcataggttatactttgctgacgattcacattttattagtttggttatgttttgtccttttaaaacattttcttttgagatgggggtcttgctctgttgcccacgcaggagtgcagtggcatgctctcagctcactgcagccctgactgcctaggctccagcaatcttcttacgtcagcctccagagtagctgggaccgcaggcacttgccaccacgccccactaaaaattttttaaattgttgcctttcttgaagtgttctctgcctgtctttgtcacaaaatttcatttttctcatagttaatttcatctctccggtaagattttattggtgtttcttttataactttgcagttcttacaccgtttggtgattttcatgtttcttagaaactttaaacctttaacttcaaacattaaaatacaagtcttttaagtacatgagtgcttagaaatgtacataatgtttatatacacttatgccttacattaaagtccaatatgagaaatacatgtttaacattcaataataattttaaaaatttgagaaataaactctcataaatgca

SEQ ID NO: 13669 - DNA, 3403 bp, Homo sapiens
  source 1..3403: mol_type = unassigned DNA
ggaagactacacattttaggtatgtgattagaaaacatacttgtcagaattgtctggctggattaatttgctaatttgaccttcttcatcatttgatgtgatgccagatactaatagcacaatcaatttatcactaagcactcgtgttactttagcattttttatgtccttagtagcttttgctataatgctaggaaatgctttggtcattttagcttttgtggtggacaaaaaccttagacatcgaagtagttatttttttcttaacttggccatctctgacttctttgtggtttcagagtcttggaaggatgaaggtagtgaatgtgaacctggatttttttcggaatggtacatccttgccatcacatcattcttggaattcgtgatcccagtcatcttagtcgcttatttcaacatgaatatttattggagcctgtggaagcgtgatcatctcagtaggtgccaaagccatcctggactgactgctgtctcttccaacatctgtggacactcattcagaggtagactatcttcaaggagatctctttctgcatcgacagaagttcctgcatcctttcattcagagagacagaggagaaagagtagtctcatgttttcctcaagaaccaagatgaatagcaatacaattgcttccaaaatgggttccttctcccaatcagattctgtagctcttcaccaaagggaacatgttgaactgcttagagccaggagattagccaagtcactggccattctcttaggggtttttgctgtttgctgggctccatattctctgttcacaattgtcctttcattttattcctcagcaacaggtcctaaatcagtttggtatagaattgcattttggcttcagtggttcaattcctttgtcaatcctcttttgtatccattgtgtcacaagcgctttcaaaaggctttcttgaaaatattttgtataaaaaagcaacctctaccatcacaacacagtcggtcagtatcttcttaaagacaattttctcacctctgtaaattttagtctcaatctcacctaaatgaatcaggtctgccctttatcttgcccttttcattctaccaacagatctgcactttgaagtcaatggtaaattactccagtgaataatagcagtataatatgacttgataatatttttgtaaacttgtagtcataatagtactatattcttcttagtcctcacctcttccttgtcttttagatcttaatttcatgctgattacaaaaatccagttttgttttctttctatgttccatgcataatacagtcttaagtgaatttctcttttttaattttatcgtaatagaaacttatccagtttgaaaatcattccctaaagcatgcaataggaaaaagaacctcctggctgggactgcccaactctgttctgatcagtgggtgggtgaggtagggtttgagttggcaagagcagggaacgggcatgtgcccaggtgagctcctgtgtgtgtccagattttatattcctaatcccagtaaggaagaaagcgtagtgtgggagaggagagagctgatgactgcagttctcaaaggtcctcagtgaagttattttggaggccctggtggtcacaggatcagaaggcaagggataggcagtggtcaccaatggttgaaagtatggcttgtcccatttcttcctgttctctttttctagcttccacatcagcttccttttttgagaacatatagaagaagaaggctaagagatggtgaagagactgcatgattaaactagatagacctggtatacagtcactgaactagtagatgtcaataattattatttttaaaaatttttatttgttggccgggcatggtggctcacgcctgaaatcccagcactttgggaggccaaggtgggcggatcatgaggtcaggagatcgagaccatcctggccaacatggtgaaaccccatctgtactaaaatacaaacaagtagctggttgtggcgccgcatgcctgtagtcccagctactcgggaggctgaggcaggggaattgcttgaacccgggaggcggagtttgccagcctggcaacagaacaagactctgtctaaaaagaaaaaaaaatttttttgtttaagacagcatcttgctctgtctcccaggctggagcgtagtaatgcaatcatagctcactgcagcctggaactccttggctcaagcaatcctgctgccttggcctcccaagtatgtaggactacaggtactcgccaccacacctggataattaaaaaattatttctgtagagatgaagtctcactgtgttgcccagcctgggtgtcaataattattttttaaaaaaaatttttaaaaaggttttttgagacagattcttgctctgtcacccaggctggagtgcagtagcatgatcagggatcactgcaacctctgcctcctgggttcaagcgattcttgtgcctaagccacctgagcagctgggattacaggtgcatgccaccatgcctggctaattttggtatttttagtagagatgaggttttgccattttggtcaggctggaatttttttttttttaattttgataagacagggtattgccgtgttggccagactggtctcaaactcctgggctgaaacaatcctcccgccttggcctcccaaagtgctgggattataggcacaagacaccacaataattattgcctgtatgtcaattattattttaaaatattgttgtatttacttaatgtctttaatgcatttgcccaatattttacattgtactgctcagaggtattcctttattatgtggttagcataggttatactttgctgacgattcacattttattagtttggttatgttttgtccttttaaaacattttcttttgagatgggggtcttgctctgttgcccacgcaggagtgcagtggcatgctctcagctcactgcagccctgactgcctaggctccagcaatcttcttacgtcagcctccagagtagctgggaccgcaggcacttgccaccacgccccactaaaaattttttaaattgttgcctttcttgaagtgttctctgcctgtctttgtcacaaaatttcatttttctcatagttaatttcatctctccggtaagattttattggtgtttcttttataactttgcagttcttacaccgtttggtgattttcatgtttcttagaaactttaaacctttaacttcaaacattaaaatacaagtcttttaagtacatgagtgcttagaaatgtacataatgtttatatacacttatgccttacattaaagtccaatatgagaaatacatgtttaacattcaataataattttaaaaatttgagaaataaactctcataaatgc

SEQ ID NO: 13670 - DNA, 580 bp, Homo sapiens
  source 1..580: mol_type = unassigned DNA
aacgtgtttaaatacatcagccatatagaaaaggacatctcttgagacttcacttcagcttcactgacttcttgactctcctcttgagtaaaaggactcagccaactatgaagttttttgtctttgctttagtcttggctctcatgatttccatgattagcgctgattcacatgaaaagagacatcatgggtatagaagaaaattccatgaaaagcatcattcacatcgagaatttccattttatggggactatggatcaaattatctatatgacaattgatatccttagtaatcatggggcatgattatagaggtttgactggcaaattcactttttactcatttattctcattcatcataccgcatcacactaccactgctttttgaagaattatcataaggcaatggagaataaaagaaagaccatgatttagtgaattctgtgtttcatgatacttcccttcctaattatcatttgattagatacttgcaatttaaactgttaagctgttttcactgctgtttctgagtaatagaaattcattcctctccaaaagcaataaatttctagcacatta

SEQ ID NO: 13671 - DNA, 623 bp, Homo sapiens
  source 1..623: mol_type = unassigned DNA
atctcttgagacttcacttcagcttcactgacttcttgactctcctcttgagtaaaaggactcagccaactatgaagttttttgtctttgctttagtcttggctctcatgatttccatgattagcgctgattcacatgaaaagagacatcatgggtatagaagaaaattccatgaaaagcatcattcacatcgagaatttccattttatggggactatggatcaaattatctatatgacaattgatatccttagtaatcatggggcatgattatagaggtaagctgactctagttgcttgtctttctagaagtgtcaacactgacagtttaaaaaaaaagccataagctaacaaccattccagtttaagaaatgtagcatgggttagctccttgaagtgtattcatttgtataaatgcttctgaagctgtagatatgtggtgttatttctgaggtctctgttctgtgccattggtctgtatgttgttttggtactggtaccatgctgttttggtaactgtagctttgtagtatagtttgaagtcaggtagtgtgatgccttcagctttgttcttttgcttacaattgtcttgggtatatgagcttttctttggatccatatga

SEQ ID NO: 13672 - DNA, 578 bp, Homo sapiens
  source 1..578: mol_type = unassigned DNA
gggagatttcaacgtgtttaaatacatcagccatctaggaaaggacatctcttgagacttcacttcagcttcactgacttctggattctcctcttgagtaaaaggactcagccaactatgaagttttttgtttttgctttaatcttggctctcatgctttccatgactggagctgattcacatgcaaagagacatcatgggtataaaagaaaattccatgaaaagcatcattcacatcgaggctatagatcaaattatctgtatgacaattgatatcttcagtaatcacggggcatgattatggaggtttgactggcaaattcgctttggactcgtgtattctcatttgtcataccgcatcacactaccactgctttttgaagaattatcataaggcaatgcagaataaaagaaataccatgatttagtgaattctgtgtttcaggatacttcccttcctaattatcatttgattagatacttgcaatttaaatgttaagctgttttcactgctgtttctgagtaatagaaattcattcctctccaaaagcaataaaattcaagcacattattatgtg

SEQ ID NO: 13673 - DNA, 775 bp, Homo sapiens
  source 1..775: mol_type = unassigned DNA
ggacatctcttgagacttcacttcagcttcactgacttctggattctcctcttgagtaaaaggactcagccaactatgaagttttttgtttttgctttaatcttggctctcatgctttccatgactggagctgattcacatgcaaagagacatcatgggtataaaagaaaattccatgaaaagcatcattcacatcgaggctatagatcaaattatctgtatgacaattgatatcttcagtaatcacggggcatgattatggaggtctctgcttgctatctgatctacgacaatcctgacaaaaacaagcaatgggaaaaggatctcctagtcaataaatggtactgggaaaactggctagccatatacagaaaactgaaactggaccccttccttacaccttatacaaaaattaactcaagatggattgaaaattaaatgaaaaacccaaaaccaaaaaaagaccctagaagaaaacctaggtgatatcattcgggacataggcatggacaaagacttcatgaagaaaatgccaaaagcaatggcaacaaaagccaaaattcacaaatgggatctaattaaactaaagagcttctgcacaacaaaagaaactatcatcagagtgaacaggtaacttagagattgggagaaaatttttgcagtctacccatctgacaaaggtgtagtgtccagagtctacaaggaacttaaacaaatttacaagacaaaaacaaaaaacccgtctaaaagtggacaaaggatatgaacagacact

SEQ ID NO: 13674 - DNA, 2705 bp, Homo sapiens
  source 1..2705: mol_type = unassigned DNA
gggagcttgtctgaggctggagctctattgtctgaatccaggggcagaaagaactgagggctcttttacggcatccacctggaggctgcctgcaggcttgggttgctaagtgcactgcttaatttagaagcgccttttatcctggctctcttgaccagtcaaagttgtggtcgctgttttctacaaggactggggaaagaaagggtggaattaattaaacctggaggaagggactttgaagggcggagctaaggtcaaagaaagaaccctttaaataaagggcccacactggctgccagggagtgcgcaggactggcaagagggaagccgggctgctccacgcctttcacgccttccacctcctgcgtgtccatctgtgagaaggagccagagcccaagggagatgatggagcctgaggagtacagagagagagggagagagatggtggattacatctgccagtacctgagcactgtgcgggagagacgtgtgacgccagacgtgcagcctggctacctgcgagcccagctgcctgagagtgctcctgaggaccccgacagctgggacagcatctttggggacattgaacgaatcatcatgcctggggtggtacattggcagagcccccatatgcacgcctactacccagccctcacctcttggccctccctgctaggagacatgctggctgatgccatcaactgcttgggattcacctgggcatccagccctgcgtgtacagagctggagatgaacgtcatggactggttggcaaaaatgctgggacttccagagcacttcttgcaccaccaccccagcagccagggcggaggcgtcctgcagagcacggtcagtgaatccactttgattgccctgctggcagcaaggaagaacaaaatcctggaaatgaaaacgtctgagcccgatgctgatgagtcctgcctaaatgcccgactcgtggcctatgcctctgaccaggctcactcctctgtggaaaaggctggtttgatttcccttgtgaagatgaaatttctgcctgtggatgacaacttctcactccgaggggaagctcttcagaaggccatcgaggaagacaagcagcggggcttggtgcccgtctttgtctgtgcaacactagggaccactggggtctgtgcatttgactgcctgtcagagctgggccccatctgtgcccgtgaggggctgtggctccacatcgatgctgcttatgcaggcactgccttcctgtgccccgagttccgggggtttctgaaggggattgagtatgccgactccttcacctttaatccttccaagtggatgatggtgcattttgactgtactgggttctgggtcaaggacaagtacaagctgcagcagaccttcagtgtgaatcccatctacctcaggcatgccaactcaggcgtggccaccgacttcatgcactggcagatccccctgagccgacggtttcgctctgttaaactctggttcgtgattcggtccttcggggtgaagaatcttcaagcacatgtcagacatggtactgaaatggctaaatattttgaatctctggtcagaaacgacccttcctttgaaattcctgccaagaggcaccttggcctggtggtttttcgtctaaagggtcctaattgtctcacagaaaatgtgttaaaggaaatagctaaagctggccgtctcttcctcatcccggccactatccaggacaagttaatcatccgtttcactgtgacatcccagtttaccactagggatgacatcctgagagactggaatctcattcgagatgctgccactctcatcctgagtcagcactgtacttcccaacccagccctcgggttgggaacctcatctcccaaatcaggggtgccagagcctgggcctgtggaacgtcccttcagtctgtcagtggggcaggagatgatccagtccaggccaggaagatcatcaagcagcctcagcgtgtgggagccggtcccatgaaaagggaaaatggcctccatcttgaaaccctgctggacccagttgatgactgcttttcagaagaggccccagatgccaccaagcacaagctgtcctccttcctgttcagttacttgtctgtgcagactaagaagaagacggtgcgctccctcagttgcaacagtgtgccagtgagtgctcagaagccactgcccacagaggcctctgtgaagaatgggggctcctccagggtcagaatcttttccaggtttccagaagacatgatgatgctgaagaaaagtgccttcaaaaaactcatcaaattctacagcgtccccagctttcctgaatgcagctctcaatgtggactccagctgccctgttgccctctgcaggccatggtttagacacagggccttcagccagagtctgaggatatacttcagggactctgtgaacccctcacaattgtatgccaactttgtgtgcttatgtgtacatgcatttttcttggggcgagttcataattttaatcaaattctcataggggttcatgacccacaataggatacaaacgaagagtttaagccagcatgatccagatgggttcagcagtctggtcagtgagaaagggccgagggtagacaggcagcttctgtggttcagcttgtgacatgatatataacacagaaataaattatgcttgtccctgaaacaaaa

SEQ ID NO: 13675 - DNA, 2382 bp, Homo sapiens
  source 1..2382: mol_type = unassigned DNA
ctccggagacagcctcagaggggtgtccagagccaggcagcaaggaccagaggaaggtggacagagaccgaaaggacaaaggagagacacagagaaaaaaagagaccaaccccaaagggacaaagaccccaacgtttgtccacattgccgcagaggcagctggagccagtgctgcctgtccgtccccatgggccaccataggccatggctgcacgcttctgtcctctgggctggggtggccagcctgctcctccccccggccatgacccagcagctcagaggggatgggctaggcttcagaaaccggaacaacagcactggagtcgccgggctctccgaggaggcatcagcagagcttcgccaccacctccacagccctagagaccatccagatgagaacaaggatgtttccacagagaatgggcatcatttctggagccacccagaccgtgaaaaggaggatgaagatgtctccaaggaatatgggcacctactcccaggccacaggtcccaagaccacaaagtcggagatgagggtgtctcaggtgaggaggtctttgcagagcatggtgggcaggcccgtgggcacagaggccacgggagtgaagacacggaagactcagctgagcacaggcaccacctccccagccacaggagccacagccatcaagacgaggatgaggatgaagttgtgtccagtgagcatcaccatcatatcctcaggcatggacaccgaggccatgatggggaagatgatgaaggagaagaggaggaggaggaggaggaggaggaagaggaggcctccactgagtatggacaccaggcccacaggcaccgaggccatgggagtgaagaggatgaggatgtctcagatggacaccatcatcatggccccagccacaggcaccaaggccatgaagaagatgacgatgatgatgatgatgatgatgatgatgatgatgatgatgatgtctccattgaatatagacaccaggctcacaggcaccaaggccacgggattgaagaggatgaagatgtctcagatggacaccatcatcgcgaccccagccacaggcaccgaagccatgaagaagatgacaatgatgatgatgatgtctccactgagtatggacaccaggcccacaggcaccaagaccacagaaaggaagaggttgaggctgtctcaggtgaacaccaccatcatgtccctgaccacaggcaccaaggccacagagacgaggaagaagatgaggatgtgtccactgaacgttggcaccagggtccccaacatgtccaccatggccttgtagatgaggaagaggaagaagaggagatcacagtccagttcggccactatgttgcaagccaccaacctcgaggccacaagagtgatgaagaggacttccaagatgagtataaaacagaagtccctcaccatcaccaccacagagtccccagggaggaagatgaggaggtctctgctgagcttggccaccaggcccccagccacaggcaaagccaccaagatgaagaaactggccatggtcaaagagggtccatcaaagagatgagccatcaccccccaggacacacagtggtcaaggatagaagccatttgaggaaggatgattctgaggaggaaaaggagaaggaagaggaccccggctcccatgaggaagacgatgaaagttcagagcagggagagaaaggcacccatcatggcagccgggaccaggaagatgaggaggatgaggaggaaggtcatggcctcagcctgaaccaggaggaggaagaagaggaagacaaggaggaggaggaggaggaagaagacgaggagaggagggaagagagggctgaggttggggccccactgagcccagaccacagcgaggaggaagaggaggaggaggaggggctggaggaagatgagccccgcttcaccatcatccccaacccactggacaggagagaggaggctggaggtgcctccagcgaggaggaaagcggtgaggacacaggtccacaggatgctcaggagtatgggaactaccagccagggtccctgtgtggctactgctccttctgcaatcgatgcactgaatgtgagagctgtcactgtgatgaggagaacatgggtgagcactgcgaccagtgccagcactgtcagttctgctatctctgcccgctggtctgcgaaacggtctgcgctccaggaagctacgttgactatttctcctcgtccctttatcaggccctggcagacatgctggaaacgccggaaccctgacccagtcgctcgactgcgacgcaggtgtacctccccctgccttccaacccctttccacgagctatatttatttctccgaataaacgtgctccccg

SEQ ID NO: 13676 - DNA, 1265 bp, Homo sapiens
  source 1..1265: mol_type = unassigned DNA
gaagatgacaatgatgatgatgatgtctccactgagtatggacaccaggcccacaggcaccaagaccacagaaaggaagaggttgaggctgtctcaggtgaacaccaccatcatgtccctgaccacaggcaccaaggccacagagacgaggaagaagatgaggatgtgtccactgaacgttggcaccagggtccccaacatgtccaccatggccttgtagatgaggaagaggaagaagaggagatcacagtccagttcggccactatgttgcaagccaccaacctcgaggccacaagagtgatgaagaggacttccaagatgagtataaaacagaagtccctcaccatcaccaccacagagtccccagggaggaagatgaggaggtctctgctgagcttggccaccaggcccccagccacaggcaaagccaccaagatgaagaaactggccatggtcaaagagggtccatcaaagagatgagccatcaccccccaggacacacagtggtcaaggatagaagccatttgaggaaggatgattctgaggaggaaaaggagaaggaagaggaccccggctcccatgaggaagacgatgaaagttcagagcagggagagaaaggcacccatcatggcagccgggaccaggaagatgaggaggatgaggaggaaggtcatggcctcagcctgaaccaggaggaggaagaagaggaagacgaggagaggagggaagagagggctgaggttggggccccactgagcccagaccacagcgaggaggaagaggaggaggaggaggggctggaggaagatgagccccgcttcaccatcatccccaacccactggacaggagagaggaggctggaggtgcctccagcgaggaggaaagcggtgaggacacaggtccacaggatgctcaggagtatgggaactaccagccagggtccctgtgtggctactgctccttctgcaatcgatgcactgaatgtgagagctgtcactgtgatgaggagaacatgggtgagcactgcgaccagtgccagcactgtcagttctgctatctctgcccgctggtctgcgaaacggtctgcgctccaggaagctacgttgactatttctcctcgtccctttatcaggccctggcagacatgctggaaacgccggaaccctgacccagtcgctcgactgcgacgcaggtgtacctccccctgccttccaacccctttccacgagctatatttatttctccgaataaacgtgctccccg

SEQ ID NO: 13677 - DNA, 1362 bp, Homo sapiens
  source 1..1362: mol_type = unassigned DNA
atgggccaccataggccatggctgcacgcttctgtcctctgggctggggtggccagcctgctcctccccccggccatgacccagcagctcagaggggatgggctaggcttcagaaaccggaacaaggatgtttccacagagaatgggcatcatttctggagccacccagaccgtgaaaaggaggatgaagatgtctccaaggaatatgggcacctactcccaggccacaggtcccaagaccacaaagtcggagatgagggtgtctcaggtgaggaggtctttgcagagcatggtgggcaggcccgtgggcacagaggccacgggagtgaagacacggaagactcagctgagcacaggcaccacctccccagccacaggagccacagccatcaagacgaggatgaggatgaagttgtgtccagtgagcatcaccatcatatcctcaggcatggacaccgaggccatgatggggaagatgatgaaggagaagaggaggaggaggaggaggaggaggaagaggaggcctccactgagtatggacaccaggcccacaggcaccgaggccatgggagtgaagaggatgaggatgtctcagatggacaccatcatcatggccccagccacaggcaccaaggccatgaagaagatgacgatgatgatgatgatgatgatgatgatgatgatgatgatgatgtctccattgaatatagacaccaggctcacaggcaccaaggccacgggattgaagaggatgaagatgtctcagatggacaccatcatcgcgaccccagccacaggcaccgaagccatgaagaagatgacaatgatgatgatgatgtctccactgagtatggacaccaggcccacaggcaccaagaccacagaaaggaagaggttgaggctgtctcaggtgaacaccaccatcatgtccctgaccacaggcaccaaggccacagagacgaggaagaagatgaggatgtgtccactgaacgttggcaccagggtccccaacatgtccaccatggccttgtagatgaggaagaggaagaagaggagatcacagtccagttcggccactatgttgcaagccaccaacctcgaggccacaagagtgatgaagaggacttccaagatgagtataaaacagaagtccctcaccatcaccaccacagagtccccagggaggaagatgaggaggtctctgctgagcttggccaccaggcccccagccacaggcaaagccaccaagatgaagaaactggccatggtcaaagagggtccatcaaagagatgagccatcaccccccaggacacacagtggtcaaggatagaagccatttgaggaaggatgattctgaggag

SEQ ID NO: 13678 - DNA, 1081 bp, Homo sapiens
  source 1..1081: mol_type = unassigned DNA
gcattccccaggagacaagaaaggaggatagaaaaacgacttaggaatctccttggagctcaagaccaggaacttccccaagccggaggtccctgaggcgctctagcgcgctggccgcactcgcagcccaggtcgccagtgcgcacgcgcaagattaggtggggcgccagagccggggcacctgcgcaggcttggctgcgccctctcgcgccgcacgctctgcgggttcctcccttcttccgagcctctcctctggccgccgcgcgggagagaggccgagatggcagatgagattgccaaggctcaggtcgctcggcctggtggcgacacgatctttgggaagatcatccgcaaggaaataccagccaaaatcatttttgaggatgaccggtgccttgctttccatgacatttcccctcaagcaccaacacattttctggtgatacccaagaaacatatatcccagatttctgtggcagaagatgatgatgaaagtcttcttggacacttaatgattgttggcaagaaatgtgctgctgatctgggcctgaataagggttatcgaatggtggtgaatgaaggttcagatggtggacagtctgtctatcacgttcatctccatgttcttggaggtcggcaaatgcattggcctcctggttaagcacgttttggggataattttctcttctttaggcaatgattaagttaggcaatttccagtatgttaagtaacacacttatttttgcctgtgtatggagagattcaagaaataattttaaaaccgcatacataataaaagacattgttgcatggcttatagtctctctgagtgttgcgtttgatttgttattttaaaaacatatttgttggaatatgtgaaggtgggtttataattttggatgtttcttgctttttcttcccaaggaggactcaacatatgaacatcgcattgttttaatggtgttactagtctttgaagacaaataatgagagtttataaatttagctttaacttcgaaatatctttccaggctaaaataggtccaacttagatttttaagctaattctcacattttcta

SEQ ID NO: 13679 - DNA, 628 bp, Homo sapiens
  source 1..628: mol_type = unassigned DNA
cgagtgctgacccgggtgagaggttcccgcggctcagggaagatggcggcagccgtggtgctggctgctgggttgcgcgcggcgcgcagagccgtggcggccacgggggtgcgcggggggcaggtccgaggagctgcaggtgtgactgatgggaatgaagtggccaaggcccagcaggcaactcctgggggagcagccccaaccatcttctcccggatcctggacaagagcctcccagctgacattctctatgaggaccagcagtgtcttgtgttccgtgatgtggcccctcaggctcctgtgcacttcctggtcattcctaagaagcccattcctcggattagccaggctgaagaagaagaccagcagcttctaggacacctactccttgtggccaagcagacagcaaaggctgagggcctgggagatggataccgacttgtgatcaacgatgggaagctgggtgcacaatctgtgtatcatctgcacattcatgtacttgggggccggcagctccagtggcctccaggttgaacctgccaactgattaaaggacaccagactctggatgcttggatggaaagggaaaaatggaccctgtgatgctaataaaactgttctcccttaa

SEQ ID NO: 13680 - DNA, 3311 bp, Homo sapiens
  source 1..3311: mol_type = unassigned DNA
gccggttttgaggccggcctccggctttgaagttcctcaccgcgtctccttccctctccccaaagcctggatcaccgcccagcgtcaggcgaggggcgacgtctcgaggtaaaacggaggaggtgcgggacgcggagactgcgcgggcccggtagccctggagaggccgaggctctaggccgcgaggggcgggtgcaatggcggaggaacaggtgaaccgcagcgccggcctggcccccgactgtgaggcctcggcgactgcagaaactacggtttcctcagtggggacctgtgaagccgctggcaagtcaccagagcccaaggactacgacagcacctgcgtgttctgccggatcgcggggcggcaggacccgggcaccgaactcctgcactgcgagaatgaggacctaatttgcttcaaagatatcaaaccagcagcaactcatcattatcttgtggtgccaaagaagcatattggaaactgcagaactctaaggaaagatcaagtagaactggttgagaacatggtaactgttggaaaaaccattcttgaaagaaataatttcactgacttcacgaatgtgaggatgggttttcatatgccaccattctgttccatttcccacttgcaccttcatgttctggcaccagtggatcagcttggcttcttatccaagttggtttatagagtcaattcctattggtttatcacagctgatcacttgattgaaaaactaagaacatgaaaatgtcaagagtggaagatttttctaatcttggttcagcatgaagtggtatttaggtcccttttaagtctaattgcaattttaagatttgttgggttttatgagaggctgttacttagtggccttaaatcttttctgaatgtctgtttcctaagatctgtgatacagttatgtgaatattttgttactgacttgtttcaatggttacttgtataaggattttatatatatgatactatagataaaatcctatttaagacaaattctgttaatcaacaagggctctgtatttttttaagttaaaatattttcatttctcagtaagtagtcagttataatagtgatttatttatgaagaataaactactatagaaagtactttgtgggaacctttattactgtgaaggagaaaaatagctatttcttgacagttctatagttatacacataaattttcaaaataaagaataccatactacacaatgatctctgattttgctgagggaaggaattatatatgtgccactttttcctcaaatttcagatgccagttttcactttttgaagcattgcatctttttaataaatctatcctgaaagctatataatatatataatttatatcaatgaatttacaataactatcaaattggctatcagaattcactgtaatggaattttgcctctaataacataaagggggaagaaacataaagtggttctcttaataaaactagcagaaaatgttgctttatggcatgtttttgtatcaaagagaaatcagaggttaaactttgcttttatcatgaaaagggcctgatttgaaggtagagataggcttagatgagaaaaattgataacgcaatgttaatactattgatatttcataggtatattttgttagaaattggttttttggtgctaatctataggcacaatagtgaatatgaatgaagagtaggtgctgcaagttaatcctacattgtgccagtgtatattagtaccatgtaaatgaatatgaataaatgaacatgaggattaacgaactgttgaaaataggctgagatactagttttctttcttttttagagggggcatgatattaaagatagttttaagtaacaaattacttattacaaagttacaacatgtggaatcaatagttttatttgttcattaatttattcattcagcaaacatttgttgaacatttaatgtgtaccagatattgccaggatcaggaaataaagaactaaaaatggacattcagactgcaattgctagtacaggggtcaaacaaaatcagtgattagaatttagtgcgttaagttccctgatgccttcacagccagaagaggctgtgaagggataaacacttctgagagtgggtggtagtagaactgagtattcaagactgaatgttaggcaggtagacagtgactggttaggctgagaaacttacaagtattttcgttgagttctgcttccactattatttactttacaatggatatgaagttcagatttcatcttatttactgaaggtggagaaaggatgtggaagtaggggttatgggctctcaaaagtagatttagagagatttttttatcactgttttatgatatagttcactgagcacttacatagattaacagttacaagtttccataaatcagttagaatatgactagcttcagggaaggaattttcaacaactgcaatctttgattgttttactgtgggaacttgcagtgatataattgacaacattatttaacaataataggtaaagtaggccgggtgtggtggctcacgcctgtaatcctagcactttgggaggccgaggtgggtggatcacaaggtcaggagttcgagaccagcctggccaatatggtgaaaccccgtctcttctaaaaaaatacaaaaattagccgggtatggtggcgcatgcctgtagtcccagctactggggaggctgaggcaagagaattgcttgaactcgggaggcggaggtcgcagtgagccgagatcgtgccactgcactccagcctgggtgacagagtgagactttgtctcaaagaaaaaaaaacaataataggtaaagtatttaaggaattctcagatgccttatggacctcttcaaaaatgtggttagccaattgattcaacttttataggtttatatgctctcatgtaaacctatttgtttccgagatcagacgagatcgggcgcgttcagggtggtatggccgtagacaacctatttgttaaaaacccttggaaacacatcttttagtagaggttcttatttacttataaagattaataatcaaattactacaattaatatccatttagccttttcagtagtctaaatatttggtaactccctagccatctataacactagttcaaaacaaggctaattcataacctgtcttaaaaatgtttgaagtggtatcaagagcattgtttatgcatgttgtgatactatttgtggaactgtttaatgagctatttcaaactgctagaagaaaatgaaataaaaatggaaaaatactgtc

SEQ ID NO: 13681 - DNA, 2015 bp, Homo sapiens
  source 1..2015: mol_type = unassigned DNA
ttaatcaattgcgtgtgtttcagaaagtctgtataaaattctctgcagtggcagatcatagcaagggatggtttaacaaaatgaaggcactcattgcagcactgcttttgatcacattgcagtattcgtgtgccgtgagtcccactgactgcagtgctgttgagccggaggctgagaaagctctagacctgatcaataaaaggcgacgggatggctaccttttccaattgctgcggattgctgatgcccacttggacagagtggaaaatacaactgtatattacttagtcttagatgtgcaagaatcggactgttcggtcctatccaggaaatactggaatgactgtgagccacctgattccagacgtccatctgaaatagtgatcggacaatgtaaggtaatagctacaagacattcccatgaatctcaggacctcagagtgattgactttaactgcaccacaagttctgtctcttcagcactggccaataccaaagatagtccggtcctcatagatttctttgaggatactgagcgctacagaaaacaagccaacaaagcccttgagaagtacaaagaggagaatgatgactttgcctctttcagagtggaccgaatcgagagagttgcaagagtgagaggaggggaaggaactggttacttcgtggacttctctgtgcggaactgccccagacaccatttccccagacaccccaatgtctttggattctgcagagcagatttgttctatgatgtagaagccttggacttggaaagcccgaaaaaccttgtcataaactgtgaagtcttcgaccctcaggaacatgagaacatcaatggtgtaccgcctcatttgggacatcccttccactggggtgggcatgagcgttcttctaccaccaagcctccattcaagccccatggatctagagatcatcatcatccccacaagccacacgaacatggacccccacctcctccagatgaaagagatcactcacatggacccccacttccacaaggccctcctccactattgcccatgtcctgctcaagttgtcaacatgccacttttggcacaaatggggcccaaagacattctcataataataattccagtgacctccatccccataagcatcattcccatgaacagcatccccatggacaccatccccatgcacaccatcctcatgaacatgatacccatagacagcatccccatggacaccacccccatggacaccatcctcatggacaccacccccatggacaccatccccatggacaccatccccactgccatgatttccaagactatggaccttgtgacccaccaccccataaccaaggtcactgttgccatggccacggcccaccacctgggcacttaagaaggcgaggcccaggtaaaggaccccgtcccttccattgcagacaaattggatctgtgtaccgactccctcctctaagaaaaggtgaggtgctgccacttcctgaggccaattttcccagcttcccattgccgcaccacaaacatcctctaaagccagacaatcagccctttcctcaatcagtctctgaatcatgtccagggaagttcaagagtgggtttccacaagtttccatgttttttacacatacatttccaaaataaaatgtgattcctttgaagaggaaaatgaataatacattgaattagaaacataaataaaatgaccagtaattgtgaaaattacagttcttttcaacctactttcatactgaagatgcagcaaaatgtgaatgggaaaagagatggcctgagaagagagatcaaatggaaaggagaggaaagaactcagtgctgcctattagtagttaattctgtcactcaccactacatcacttgagacaaatctatgccactcagaatctccttctttcctggacttaactctaattctagagtctctgttactgcttgggctatacctgggcatactaataaagtatggtattgaaactattgtta

SEQ ID NO: 13682 - DNA, 1401 bp, Homo sapiens
  source 1..1401: mol_type = unassigned DNA
aggtcgagacagcaggcggctcaagtggacagccgggatggcagagcgtgcggcgctggaggagctggtgaaacttcagggagagcgcgtgcgaggcctcaagcagcagaaggccagcgccgagctgatcgaggaggaggtggcgaaactcctgaaactgaaggcacagctgggtcctgatgaaagcaaacagaaatttgtgctcaaaacccccaagggcacaagagactatagtccccggcagatggcagttcgcgagaaggtgtttgacgtaatcatccgttgcttcaagcgccacggtgcagaagtcattgatacacctgtatttgaactaaaggattttgacattgctgggaactttgatcccatgatccctgatgcagagtgcctgaagatcatgtgcgagatcctgagttcacttcagataggcgacttcctggtcaaggtaaacgatcgacgcattctagatgggatgtttgctatctgtggtgtttctgacagcaagttccgtaccatctgctcctcagtagacaagctggacaaggtgtcctgggaagaggtgaagaatgagatggtgggagagaagggccttgcacctgaggtggctgaccgcattggggactatgtccagcaacatggtggggtatccctggtggaacagctgctccaggatcctaaactatcccaaaacaagcaggccttggagggcctgggagacctgaagttgctctttgagtacctgaccctatttggcattgatgacaaaatctcctttgacctgagccttgctcgagggctggattactacactggggtgatctatgaggcagtgctgctacagaccccagcccaggcaggggaagagcccctgggtgtgggcagtgtggctgctggaggacgctatgatgggctagtgggcatgttcgaccccaaagggcgcaaggtgccatgtgtggggctcagcattggggtggagcggattttctccatcgtggaacagagactagaggctttggaggagaagatacggaccacggagacacaggtgcttgtggcatctgcacagaagaagctgctagaggaaagactaaagcttgtctcagaactgtgggatgctgggatcaaggctgagctgctgtacaagaagaacccaaagctactgaaccagttacagtactgtgaggaggcaggcatcccactggtggctatcatcggcgagcaggaactcaaggatggggtcatcaagctccgttcagtgacgagcagggaagaggtggatgtccgaagagaagaccttgtggaggaaatcaaaaggagaacaggccagcccctctgcatctgctgaactgaacaaactatcagaggaaaggaagtgggactggcactatttgaggttaagac

SEQ ID NO: 13683 - DNA, 1774 bp, Homo sapiens
  source 1..1774: mol_type = unassigned DNA
gaaaactcgggcgtttgcgcacctcactagtcacgaaggctgaggtgggatcctcccaagttcccttagtagccagcttcggcacttccgggaggagccggaaataatttttgtgctcggcggaggctctctaggcgtgcgacccagcgactcgatagccggaagtcatccttgctgaggctggggcaaccaccgcaggtcgagacagcaggcggctcaagtggacagccgggatggcagagcgtgcggcgctggaggagctggtgaaacttcagggagagcgcgtgcgaggcctcaagcagcagaaggccagcgccgagctgatcgaggaggaggtggcgaaactcctgaaactgaaggcacagctgggtcctgatgaaagcaaacagaaatttgtgctcaaaacccccaaggattttgacattgctgggaactttgatcccatgatccctgatgcagagtgcctgaagatcatgtgcgagatcctgagttcacttcagataggcgacttcctggtcaaggtaaacgatcgacgcattctagatgggatgtttgctatctgtggtgtttctgacagcaagttccgtaccatctgctcctcagtagacaagctggacaaggtgtcctgggaagaggtgaagaatgagatggtgggagagaagggccttgcacctgaggtggctgaccgcattggggactatgtccagcaacatggtggggtatccctggtggaacagctgctccaggatcctaaactatcccaaaacaagcaggccttggagggcctgggagacctgaagttgctctttgagtacctgaccctatttggcattgatgacaaaatctcctttgacctgagccttgctcgagggctggattactacactggggtgatctatgaggcagtgctgctacagaccccagcccaggcaggggaagagcccctgggtgtgggcagtgtggctgctggaggacgctatgatgggctagtgggcatgttcgaccccaaagggcgcaaggtgccatgtgtggggctcagcattggggtggagcggattttctccatcgtggaacagagactagaggctttggaggagaagatacggaccacggagacacaggtgcttgtggcatctgcacagaagaagctgctagaggaaagactaaagcttgtctcagaactgtgggatgctgggatcaaggctgagctgctgtacaagaagaacccaaagctactgaaccagttacagtactgtgaggaggcaggcatcccactggtggctatcatcggcgagcaggaactcaaggatggggtcatcaagctccgttcagtgacgagcagggaagaggtggatgtccgaagagaagaccttgtggaggaaatcaaaaggagaacaggccagcccctctgcatctgctgaactgaacaaactatcagaggaaaggaagtgggactggcactatttgaggttaagacaaactgcatatgtacttcaattgctttgcacttttccgtttcagcggaagacctgaagagtggtcagaacagagcctttgatttttattatggttattttattgattattactggcaaaaacggccaggtacaacacctttttcatacaaggcccaggaggcttagtccagtctgtgctcctgggctacaaggacccagcctgagatggtcccatctgcagggccccgcaccagttggagcagatgcctccccaccaccaattgccaaaggtccaataaaatgcctcaaccacggag

SEQ ID NO: 13684 - DNA, 1789 bp, Homo sapiens
  source 1..1789: mol_type = unassigned DNA
aggtcgagacagcaggcggctcaagtggacagccgggatggcagagcgtgcggcgctggaggagctggtgaaacttcagggagagcgcgtgcgaggcctcaagcagcagaaggccagcgccgagctgatcgaggaggaggtggcgaaactcctgaaactgaaggcacagctgggtcctgatgaaagcaaacagaaatttgtgctcaaaacccccaaggaaacactgatgggaaagtatggggaagactccaagcttatctatgacctgaaggaccagggcggggagctcctgtcccttcgctatgacctcactgttccttttgctcggtatttggcaatgaataaactgaccaacattaaacgctaccacatagcaaaggtatatcggcgggataacccagccatgacccgtggccgataccgggaattctaccagtgtgattttgacattgctgggaactttgatcccatgatccctgatgcagagtgcctgaagatcatgtgcgagatcctgagttcacttcagataggcgacttcctggtcaaggtaaacgatcgacgcattctagatgggatgtttgctatctgtggtgtttctgacagcaagttccgtaccatctgctcctcagtagacaagctggacaaggtgtcctgggaagaggtgaagaatgagatggtgggagagaagggccttgcacctgaggtggctgaccgcattggggactatgtccagcaacatggtggggtatccctggtggaacagctgctccaggatcctaaactatcccaaaacaagcaggccttggagggcctgggagacctgaagttgctctttgagtacctgaccctatttggcattgatgacaaaatctcctttgacctgagccttgctcgagggctggattactacactggggtgatctatgaggcagtgctgctacagaccccagcccaggcaggggaagagcccctgggtgtgggcagtgtggctgctggaggacgctatgatgggctagtgggcatgttcgaccccaaagggcgcaaggtgccatgtgtggggctcagcattggggtggagcggattttctccatcgtggaacagagactagaggctttggaggagaagatacggaccacggagacacaggtgcttgtggcatctgcacagaagaagctgctagaggaaagactaaagcttgtctcagaactgtgggatgctgggatcaaggctgagctgctgtacaagaagaacccaaagctactgaaccagttacagtactgtgaggaggcaggcatcccactggtggctatcatcggcgagcaggaactcaaggatggggtcatcaagctccgttcagtgacgagcagggaagaggtggatgtccgaagagaagaccttgtggaggaaatcaaaaggagaacaggccagcccctctgcatctgctgaactgaacaaactatcagaggaaaggaagtgggactggcactatttgaggttaagacaaactgcatatgtacttcaattgctttgcacttttccgtttcagcggaagacctgaagagtggtcagaacagagcctttgatttttattatggttattttattgattattactggcaaaaacggccaggtacaacacctttttcatacaaggcccaggaggcttagtccagtctgtgctcctgggctacaaggacccagcctgagatggtcccatctgcagggccccgcaccagttggagcagatgcctccccaccaccaattgccaaaggtccaataaaatgcct

SEQ ID NO: 13685 - DNA, 1810 bp, Homo sapiens
  source 1..1810: mol_type = unassigned DNA
cagcaggcggctcaagtggacagccgggatggcagagcgtgcggcgctggaggagctggtgaaacttcagggagagcgcgtgcgaggcctcaagcagcagaaggccagcgccgagctgatcgaggaggaggtggcgaaactcctgaaactgaaggcacagctgggtcctgatgaaagcaaacagaaatttgtgctcaaaacccccaagggcacaagagactatagtccccggcagatggcagttcgcgagaaggtgtttgacgtaatcatccgttgcttcaagcgccacggtgcagaagtcattgatacacctgtatttgaactaaaggaaacactgatgggaaagtatggggaagactccaagcttatctatgacctgaaggaccagggcggggagctcctgtcccttcgctatgacctcactgttccttttgctcggtatttggcaatgaataaactgaccaacattaaacgctaccacatagcaaaggtatatcggcgggataacccagccatgacccgtggccgataccgggaattctaccagtgtgattttgacattgctgggaactttgatcccatgatccctgatgcagagtgcctgaagatcatgtgcgagatcctgagttcacttcagataggcgacttcctggtcaaggtgtcctgggaagaggtgaagaatgagatggtgggagagaagggccttgcacctgaggtggctgaccgcattggggactatgtccagcaacatggtggggtatccctggtggaacagctgctccaggatcctaaactatcccaaaacaagcaggccttggagggcctgggagacctgaagttgctctttgagtacctgaccctatttggcattgatgacaaaatctcctttgacctgagccttgctcgagggctggattactacactggggtgatctatgaggcagtgctgctacagaccccagcccaggcaggggaagagcccctgggtgtgggcagtgtggctgctggaggacgctatgatgggctagtgggcatgttcgaccccaaagggcgcaaggtgccatgtgtggggctcagcattggggtggagcggattttctccatcgtggaacagagactagaggctttggaggagaagatacggaccacggagacacaggtgcttgtggcatctgcacagaagaagctgctagaggaaagactaaagcttgtctcagaactgtgggatgctgggatcaaggctgagctgctgtacaagaagaacccaaagctactgaaccagttacagtactgtgaggaggcaggcatcccactggtggctatcatcggcgagcaggaactcaaggatggggtcatcaagctccgttcagtgacgagcagggaagaggtggatgtccgaagagaagaccttgtggaggaaatcaaaaggagaacaggccagcccctctgcatctgctgaactgaacaaactatcagaggaaaggaagtgggactggcactatttgaggttaagacaaactgcatatgtacttcaattgctttgcacttttccgtttcagcggaagacctgaagagtggtcagaacagagcctttgatttttattatggttattttattgattattactggcaaaaacggccaggtacaacacctttttcatacaaggcccaggaggcttagtccagtctgtgctcctgggctacaaggacccagcctgagatggtcccatctgcagggccccgcaccagttggagcagatgcctccccaccaccaattgccaaaggtccaataaaatgcctcaaccacgg

SEQ ID NO: 13686 - DNA, 3334 bp, Homo sapiens
  source 1..3334: mol_type = unassigned DNA
cccttactacatatccgtgtataagtcattcatttaatcttgcagcctccgtttcctcaactgcagaatggaaatcaaaactccaacctctcaagattgctccaaggattaaatgaccaggcatccaaatcgcttagttcagtgtcagtacatagtgggcactcgataaaaaccgattgtaacactactggaatacaggccgcgaggctatgcgttcagatctggagaccctgctgggacagaccagagataattctgtctcgctcacctggctttggcaacggaccgccccggtgcacgaagcgcagggcggtcgcaggagctggctgagcagcgaagcccaggccctcctgggaagaagtccgagcaggggcatcgcgcggcaggacgccggctttccgggacaggaacaaaaggcctgggaaggaggcgggtcagacaccaggaagggtggagggcactgcaaaggcggaacccgcgcaccagggaaaactcgggcgtttgcgcacctcactagtcacgaaggctgaggtgggatcctcccaagttcccttagtagccagcttcggcacttccgggaggagccggaaataatttttgtgctcggcggaggctctctaggcgtgcgacccagcgactcgatagccggaagtcatccttgctgaggctggggcaaccaccgcaggtcgagacagcaggcggctcaagtggacagccgggatggcagagcgtgcggcgctggaggagctggtgaaacttcagggagagcgcgtgcgaggcctcaagcagcagaaggccagcgccgagctgatcgaggaggaggtggcgaaactcctgaaactgaaggcacagctgggtcctgatgaaagcaaacagaaatttgtgctcaaaacccccaagggcacaagagactatagtccccggcagatggcagttcgcgagaaggtgtttgacgtaatcatccgttgcttcaagcgccacggtgcagaagtcattgatacacctgtatttgaactaaaggaaacactgatgggaaagtatggggaagactccaagcttatctatgacctgaaggaccagggcggggagctcctgtcccttcgctatgacctcactgttccttttgctcggtatttggcaatgaataaactgaccaacattaaacgctaccacatagcaaaggtatatcggcgggataacccagccatgacccgtggccgataccgggaattctaccagtgtgattttgacattgctgggaactttgatcccatgatccctgatgcagagtgcctgaagatcatgtgcgagatcctgagttcacttcagataggcgacttcctggtcaaggtaaacgatcgacgcattctagatgggatgtttgctatctgtggtgtttctgacagcaagttccgtaccatctgctcctcagtagacaagctggacaaggtgtcctgggaagaggtgaagaatgagatggtgggagagaagggccttgcacctgaggtggctgaccgcattggggactatgtccagcaacatggtggggtatccctggtggaacagctgctccaggatcctaaactatcccaaaacaagcaggccttggagggcctgggagacctgaagttgctctttgagtacctgaccctatttggcattgatgacaaaatctcctttgacctgagccttgctcgagggctggattactacactggggtgatctatgaggcagtgctgctacagaccccagcccaggcaggggaagagcccctgggtgtgggcagtgtggctgctggaggacgctatgatgggctagtgggcatgttcgaccccaaagggcgcaaggtgccatgtgtggggctcagcattggggtggagcggattttctccatcgtggaacagagactagaggctttggaggagaagatacggaccacggagacacaggtgcttgtggcatctgcacagaagaagctgctagaggaaagactaaagcttgtctcagaactgtgggatgctgggatcaaggctgagctgctgtacaagaagaacccaaagctactgaaccagttacagtactgtgaggaggcaggcatcccactggtggctatcatcggcgagcaggaactcaaggatggggtcatcaagctccgttcagtgacgagcagggaagaggtggatgtccgaagagaagaccttgtggaggaaatcaaaaggagaacaggccagcccctctgcatctgctgaactgaacaaactatcagaggaaaggaagtgggactggcactatttgaggttaagacaaactgcatatgtacttcaattgctttgcacttttccgtttcagcggaagacctgaagagtggtcagaacagagcctttgatttttattatggttattttattgattattactggcaaaaacggccaggtacaacacctttttcatacaaggcccaggaggcttagtccagtctgtgctcctgggctacaaggacccagcctgagatggtcccatctgcagggccccgcaccagttggagcagatgcctccccaccaccaattgccaaaggtccaataaaatgcctcaaccacggagtctgcgtgtgtcagtgatgcctagccccgccttccccagcagaccaatgtagggatggaaaagggagaaaaacagtaaacttgtgaccctgaggttcttgtctccagcgtccaccctgcggcttgggagctcctcctcgggaggcagcccccgtacatacgcacccgcgactttgcagctttcacctgaaggtctgagcgaagcccgggcggcgcacgtgcagtggatacctccacccccctgggaggcggggtcgcgctcagagccaatgagagcttgcggggtggaggggtagggaagcttccagaggccggtggggaggaagttataaagagggtacgagggggccagctggagagccatgcagtccaagcgggattgtgaggtaagcggctggcgacttgggggccggcgagccccgccggagcgggggtcggctttagggaccccagtaccacaggagaggtgggggcgcgcttggcgatccgccattccaaccttcctttccctctcagctgtggtgtgagagggtgaatccagagaacaaggcggcgctggaggcgtgggtcagggagacaggcatccgcctggtgcaggtgaacgggcagaggaagtatggcgggccacccccaggtacggtagtcccagcccctccgcctgtccggctacaccagccccctttgggggaggggctgctccgagccttcactgtcagaaactgcgaactaccc

SEQ ID NO: 13687 - DNA, 3494 bp, Homo sapiens
  source 1..3494: mol_type = unassigned DNA
ttgaaactctgtacccattaaacaataactccccacttcaccctccctccagcccctggtaactgctatcctactttctactttctgtctctatggatttgactattctaggtactagataagtgagagactaattgttctttttttttttttttaagttcattgatctagctttcaaattccacattgcaaccaatctttaagaaacaaccacttgttggattctgatgtagtaccaaagaaaaatatccacagttagctgaaaagtttgttaaaatactcttccttttacaactacatatctgtgtaaggttagattttcgttatatacttcaaccagcacgacatatcacgacagattgaatgcaaaaatcacatatgagaatcctgctgtcttctattcagtcagacattaaagatttgcaaagatgtaaatcagtgccactcttctcactaaattgttttggaaaacagttacctttttctaaaatattatttgcgttaacatataatagatatattatttgtgttaacatatgttatttgttaaatgaataaatattttaaaatttttgccgttctaattctaatacagtaaatattgataggtataatccactttggggtcttgaatacatagtaagagtgtaaagaggtcctgaaaccaaagactttggagtagggtataaaagcccagattggaagctctgacctggaaggacaacacagttctagtcctgactgccacgaacatgctgaatggccttaagaaatgacttaacttctcaacatcctgtacttcatctgtaaaatttatctgcctagcctatgtcatagagttgttaccagaaacaaattagagaacaaacagttgtaactaagatttaaaagaaaagttatattgggagagaaacgttgcttataaaatttggaattcaattagttgagccagtttgagttggttatattgcctataatcatgtaggtatttttttgttgttattatttttgtttgtttggttgggtttgtttttgtttttgtttttgttttgacagagtcttgctctgtctcccaggctggagtgcagtggcactatctcagctcactgcaagctccacctgccgggttcacgccattctcctgcctcagcctcccaagtagctgggactacaggcacctgccaccacgcccggctaatttttttgtatttttagtagagacggggtttcacagtgttcgccaggatggtcttgatctcctgacttcgtgatccgcccgcctcggcctccccaagtgctggcattacaggtgtgagccaccgcgcccggctggttggtttgttttgtttttgagacagagtctcgctctgtctctcagtctggagtgcagtggtgcaatcttggctcactgcaacctccgcctcccaggttcaagtgattctccctgccttgagcctcctgagtagctgggattacaggcacctgccaccaccatttgtttgttttattgagacagtctcactctgttgcccaggctggagtgcagtggcacaatctcggctcactgcaacctccacctcccaggttcaaggatcctcatgcatcagcctcccaagtagctgggactacaaggggcgtgtcgtcgcacccggctaatttctgtatttttagtagagacgaggtttcaccatgttggccaggctggtctcgaacccctgacctcaggcaatccatctgccttggcctcccgaagtgctgggattacaggcgtgagccactgtgcctggcctcagggcacaagagactatagtccccggcagatggcagttcgcgagaaggtgtttgacgtaatcatccgttgcttcaagcgccacggtgcagaagtcattgatacacctgtatttgaactaaaggaaacactgatgggaaagtatggggaagactccaagcttatctatgacctgaaggaccagggcggggagctcctgtcccttcgctatgacctcactgttccttttgctcggtatttggcaatgaataaactgaccaacattaaacgctaccacatagcaaaggtatatcggcgggataacccagccatgacccgtggccgataccgggaattctaccagtgtgattttgacattgctgggaactttgatcccatgatccctgatgcagagtgcctgaagatcatgtgcgagatcctgagttcacttcagataggcgacttcctggtcaaggtaaacgatcgacgcattctagatgggatgtttgctatctgtggtgtttctgacagcaagttccgtaccatctgctcctcagtagacaagctggacaaggtgtcctgggaagaggtgaagaatgagatggtgggagagaagggccttgcacctgaggtggctgaccgcattggggactatgtccagcaacatggtggggtatccctggtggaacagctgctccaggatcctaaactatcccaaaacaagcaggccttggagggcctgggagacctgaagttgctctttgagtacctgaccctatttggcattgatgacaaaatctcctttgacctgagccttgctcgagggctggattactacactggggtgatctatgaggcagtgctgctacagaccccagcccaggcaggggaagagcccctgggtgtgggcagtgtggctgctggaggacgctatgatgggctagtgggcatgttcgaccccaaagggcgcaaggtgccatgtgtggggctcagcattggggtggagcggattttctccatcgtggaacagagactagaggctttggaggagaagatacggaccacggagacacaggtgcttgtggcatctgcacagaagaagctgctagaggaaagactaaagcttgtctcagaactgtgggatgctgggatcaaggctgagctgctgtacaagaagaacccaaagctactgaaccagttacagtactgtgaggaggcaggcatcccactggtggctatcatcggcgagcaggaactcaaggatggggtcatcaagctccgttcagtgacgagcagggaagaggtggatgtccgaagagaagaccttgtggaggaaatcaaaaggagaacaggccagcccctctgcatctgctgaactgaacaaactatcagaggaaaggaagtgggactggcactatttgaggttaagacaaactgcatatgtacttcaattgctttgcacttttccgtttcagcggaagacctgaagagtggtcagaacagagcctttgatttttattatggttattttattgattattactggcaaaaacggccaggtacaacacctttttcatacaaggcccaggaggcttagtccagtctgtgctcctgggctacaaggacccagcctgagatggtcccatctgcagggccccgcaccagttggagcagatgcctccccaccaccaattgccaaaggtccaataaaatgcctcaaccacgg

SEQ ID NO: 13688 - DNA, 950 bp, Homo sapiens
  source 1..950: mol_type = unassigned DNA
gactcgatagccggaagtcatccttgctgaggctggggcaaccaccgcaggtcgagacagcaggcggctcaagtggacagccgggatggcagagcgtgcggcgctggaggagctggtgaaacttcagggagagcgcgtgcgaggcctcaagcagcagaaggccagcgccgagctgatcgaggaggaggtggcgaaactcctgaaactgaaggcacagctgggtcctgatgaaagcaaacagaaatttgtgctcaaaacccccaagggcacaagagactatagtccccggcagatggcagttcgcgagaaggtgtttgacgtaatcatccgttgcttcaagcgccacggtgcagaagtcattgatacacctgtatttgaactaaaggtaaacgatcgacgcattctagatgggatgtttgctatctgtggtgtttctgacagcaagttccgtaccatctgctcctcagtagacaagctggacaaggtgtcctgggaagaggtgaagaatgagatggtgggagagaagggccttgcacctgaggtggctgaccgcattggggactatgtccagcaacatggtggggtatccctggtggaacagctgctccaggatcctaaactatcccaaaacaagcaggccttggagggcctgggagacctgaagttgctctttgagtacctgaccctatttggcattgatgacaaaatctcctttgacctgagccttgctcgagggctggattactacactggggtgatctatgaggcagtgctgctacagaccccagcccaggcaggggaagagcccctgggtgtgggcagtgtggctgctggaggacgctatgatgggctagtgggcatgttcgaccccaaagggcgcaaggtgccatgtgtggggctcagcattggggtggagcggattttctccatcgtggaacagagactagagg

SEQ ID NO: 13689 - DNA, 1780 bp, Homo sapiens
  source 1..1780: mol_type = unassigned DNA
atagccggaagtcatccttgctgaggctggggcaaccaccgcaggtcgagacagcaggcggctcaagtggacagccgggatggcagagcgtgcggcgctggaggagctggtgaaacttcagggagagcgcgtgcgaggcctcaagcagcagaaggccagcgccgagctgatcgaggaggaggtggcgaaactcctgaaactgaaggcacagctgggtcctgatgaaagcaaacagaaatttgtgctcaaaacccccaaggaaacactgatgggaaagtatggggaagactccaagcttatctatgacctgaaggaccagggcggggagctcctgtcccttcgctatgacctcactgttccttttgctcggtatttggcaatgaataaactgaccaacattaaacgctaccacatagcaaaggattttgacattgctgggaactttgatcccatgatccctgatgcagagtgcctgaagatcatgtgcgagatcctgagttcacttcagataggcgacttcctggtcaaggtaaacgatcgacgcattctagatgggatgtttgctatctgtggtgtttctgacagcaagttccgtaccatctgctcctcagtagacaagctggacaaggtgtcctgggaagaggtgaagaatgagatggtgggagagaagggccttgcacctgaggtggctgaccgcattggggactatgtccagcaacatggtggggtatccctggtggaacagctgctccaggatcctaaactatcccaaaacaagcaggccttggagggcctgggagacctgaagttgctctttgagtacctgaccctatttggcattgatgacaaaatctcctttgacctgagccttgctcgagggctggattactacactggggtgatctatgaggcagtgctgctacagaccccagcccaggcaggggaagagcccctgggtgtgggcagtgtggctgctggaggacgctatgatgggctagtgggcatgttcgaccccaaagggcgcaaggtgccatgtgtggggctcagcattggggtggagcggattttctccatcgtggaacagagactagaggctttggaggagaagatacggaccacggagacacaggtgcttgtggcatctgcacagaagaagctgctagaggaaagactaaagcttgtctcagaactgtgggatgctgggatcaaggctgagctgctgtacaagaagaacccaaagctactgaaccagttacagtactgtgaggaggcaggcatcccactggtggctatcatcggcgagcaggaactcaaggatggggtcatcaagctccgttcagtgacgagcagggaagaggtggatgtccgaagagaagaccttgtggaggaaatcaaaaggagaacaggccagcccctctgcatctgctgaactgaacaaactatcagaggaaaggaagtgggactggcactatttgaggttaagacaaactgcatatgtacttcaattgctttgcacttttccgtttcagcggaagacctgaagagtggtcagaacagagcctttgatttttattatggttattttattgattattactggcaaaaacggccaggtacaacacctttttcatacaaggcccaggaggcttagtccagtctgtgctcctgggctacaaggacccagcctgagatggtcccatctgcagggccccgcaccagttggagcagatgcctccccaccaccaattgccaaaggtccaataaaatgcctcaaccacgg

SEQ ID NO: 13690 - DNA, 1896 bp, Homo sapiens
  source 1..1896: mol_type = unassigned DNA
ggaagtcatccttgctgaggctggggcaaccaccgcaggtcgagacagcaggcggctcaagtggacagccgggatggcagagcgtgcggcgctggaggagctggtgaaacttcagggagagcgcgtgcgaggcctcaagcagcagaaggccagcgccgagctgatcgaggaggaggtggcgaaactcctgaaactgaaggcacagctgggtcctgatgaaagcaaacagaaatttgtgctcaaaacccccaagggcacaagagactatagtccccggcagatggcagttcgcgagaaggtgtttgacgtaatcatccgttgcttcaagcgccacggtgcagaagtcattgatacacctgtatttgaactaaaggaaacactgatgggaaagtatggggaagactccaagcttatctatgacctgaaggaccagggcggggagctcctgtcccttcgctatgacctcactgttccttttgctcggtatttggcaatgaataaactgaccaacattaaacgctaccacatagcaaaggattttgacattgctgggaactttgatcccatgatccctgatgcagagtgcctgaagatcatgtgcgagatcctgagttcacttcagataggcgacttcctggtcaaggtaaacgatcgacgcattctagatgggatgtttgctatctgtggtgtttctgacagcaagttccgtaccatctgctcctcagtagacaagctggacaaggtgtcctgggaagaggtgaagaatgagatggtgggagagaagggccttgcacctgaggtggctgaccgcattggggactatgtccagcaacatggtggggtatccctggtggaacagctgctccaggatcctaaactatcccaaaacaagcaggccttggagggcctgggagacctgaagttgctctttgagtacctgaccctatttggcattgatgacaaaatctcctttgacctgagccttgctcgagggctggattactacactggggtgatctatgaggcagtgctgctacagaccccagcccaggcaggggaagagcccctgggtgtgggcagtgtggctgctggaggacgctatgatgggctagtgggcatgttcgaccccaaagggcgcaaggtgccatgtgtggggctcagcattggggtggagcggattttctccatcgtggaacagagactagaggctttggaggagaagatacggaccacggagacacaggtgcttgtggcatctgcacagaagaagctgctagaggaaagactaaagcttgtctcagaactgtgggatgctgggatcaaggctgagctgctgtacaagaagaacccaaagctactgaaccagttacagtactgtgaggaggcaggcatcccactggtggctatcatcggcgagcaggaactcaaggatggggtcatcaagctccgttcagtgacgagcagggaagaggtggatgtccgaagagaagaccttgtggaggaaatcaaaaggagaacaggccagcccctctgcatctgctgaactgaacaaactatcagaggaaaggaagtgggactggcactatttgaggttaagacaaactgcatatgtacttcaattgctttgcacttttccgtttcagcggaagacctgaagagtggtcagaacagagcctttgatttttattatggttattttattgattattactggcaaaaacggccaggtacaacacctttttcatacaaggcccaggaggcttagtccagtctgtgctcctgggctacaaggacccagcctgagatggtcccatctgcagggccccgcaccagttggagcagatgcctccccaccaccaattgccaaaggtccaataaaatgcctcaaccacggag

SEQ ID NO: 13691 - DNA, 2483 bp, Homo sapiens
  source 1..2483: mol_type = unassigned DNA
aaaaattatttccggctcctcccggaagtgccgaagctggctactaagggaacttgggaggatcccacctcagccttcgtgactagtgaggtgcgcaaacgcccgagttttccctggtgcgcgggttccgcctttgcagtgccctccacccttcctggtgtctgacccgcctccttcccaggccttttgttcctgtcccggaaagccggcgtcctgccgcgcgatgcccctgctcggacttcttcccaggagggcctgggcttcgctgctcagccagctcctgcgaccgccctgcgcttcgtgcaccggggcggtccgttgccaaagccaggttgcagaggcagtgttaacatcccaactgaaagcacatcaagagaaaccaaattttattatcaagaccccaaagggtaccagggatcttagtcctcagcatatggttgtgagggagaaaattcttgatttggttatcagctgctttaaacgtcatggagcaaaggggatggacaccccagcatttgagctgaaggaaaccctgactgagaagtatggagaggactctgggctcatgtatgatctgaaggatcaaggtggagagctgttgtccctccgctatgaccttactgttccctttgctcgttatctggccatgaataaggtgaagaagatgaaacgttatcatgttggaaaggtgtggcggcgagagagcccaaccatagtccaaggccgttatagggagttctgccagtgtgattttgacattgctggtcagtttgaccctatgatccccgatgcagagtgtttgaagatcatgtgtgaaatcctaagtggattgcagttgggagactttctcattaaggtaaatgaccggcggattgtggatgggatgtttgctgtctgtggtgttcctgaaagcaagttccgtgccatctgctcctccatagataaactagacaagatggcttggaaagatgtgagacatgagatggtggtgaagaaaggcctggctcctgaggtggctgatcgaattggggactatgtccagtgtcatggtggggtatccctagtagagcaaatgtttcaggatcccagactatcccagaacaagcaggccctggagggcctgggagacctaaagctgctatttgaatacctgactttatttggaattgctgataagatctcctttgacctcagcctggctcggggcctagactactatacaggagtgatctatgaagcagtgctgctgcagaccccaactcaggctggggaggagcccctgaatgtgggcagtgtggctgctggtgggcgctatgatgggctggtgggcatgtttgaccccaagggccacaaggtgccatgtgtgggactcagcattggggttgagcgaatcttctacattgtggagcagaggatgaagaccaaaggtgagaaggtgcggactacagagactcaagtgtttgtggccacaccacagaagaactttctccaagaacggttgaagcttattgcagagctttgggattctggaatcaaggcagagatgctatacaagaacaaccccaaactattaacccagctgcactattgtgagagcacaggcattccactggtggtcattattggtgagcaagaactgaaagaaggggtcatcaagatccgttcagtggccagcagagaggaggtggccattaaacgggaaaattttgtggctgaaattcagaagcgactgtctgagtcttgatccttgcctgattcccatctgctgctctttgtagaaaaggtttcctctagaactgaattcctctggaattgagtgatggacttcacaacaactagccaggaagggtgacaagtaccttctgcctcctccattcttcctgggtgcagaactgtagaagaccctgaggactcctgggctagtgtgagcagctattctgcatgggtgcagatggctggatgtgaaagagacatgctctagctgcagaggcaaatttgaagtgccacggaacgttgtcaagaggtagtgagattgttgctgtgagcaaggctctgggagagtcacctcaggctcaggattctgaaccattgagatcagaaaccagatacttagccttctactgtagctacggaaccagattctggtgaatttgtccacaatcagccattggcctgtctggggagtttttggaagacagcaaagaggggcaatggctgctttcagctttgaggacagatgctatcctaagggcatggcagtacccatgttgatttgacatctctctagcccatccattgcttacagtagaagagtggggctgtatgcttgataatcttgaacattgaacttaatagatgacttgacaaggtagagatctgatattttgagattttggagaccatttcctgtgccagaatcactgctctattccataccgtgccatggaggctgttttagaagtggttggataacatgttaaata

SEQ ID NO: 13692 - DNA, 1442 bp, Homo sapiens
  source 1..1442: mol_type = unassigned DNA
attcttgatttggttatcagctgctttaaacgtcatggagcaaaggggatggacaccccagcatttgagctgaaggaaaccctgactgagaagtatggagaggactctgggctcatgtatgatctgaaggatcaaggtggagagctgttgtccctccgctatgaccttacttgaggttccctttgctcgttatctggccatgaataaggtgaagaagatgaaacgttatcatgttggaaaggtgtggcggcgagagagcccaaccatagtccaaggccgttatagggagttctgccagtgtgattttgacattgctggtcagtttgaccctatgatccccgatgcagagtgtttgaagatcatgtgtgaaatcctaagtggattgcagttgggagactttctcattaagatggcttggaaagatgtgagacatgagatggtggtgaagaaaggcctggctcctgaggtggctgatcgaattggggactatgtccagtgtcatggtggggtatccctagtagagcaaatgtttcaggatcccagactatcccagaacaagcaggccctggagggcctgggagacctaaagctgctatttgaatacctgactttatttggaattgctgataagatctcctttgacctcagcctggctcggggcctagactactatacaggagtgatctatgaagcagtgctgctgcagaccccaactcaggctggggaggagcccctgaatgtgggcagtgtggctgctggtgggcgctatgatgggctggtgggcatgtttgaccccaagggccacaaggtgccatgtgtgggactcagcattggggttgagcgaatcttctacattgtggagcagaggatgaagaccaaaggtgagaaggtgcggactacagagactcaagtgtttgtggccacaccacagaagaactttctccaagaacggttgaagcttattgcagagctttgggattctggaatcaaggcagagatgctatacaagaacaaccccaaactattaacccagctgcactattgtgagagcacaggcattccactggtggtcattattggtgagcaagaactgaaagaaggggtcatcaagatccgttcagtggccagcagagaggaggtggccattaaacgggaaaattttgtggctgaaattcagaagcgactgtctgagtcttgatccttgcctgattcccatctgctgctctttgtagaaaaggtttcctctagaactgaattcctctggaattgagtgatggacttcacaacaactagccaggaagggtgacaagtaccttctgcctcctccattcttcctgggtgcagaactgtagaagaccctgaggactcctgggctagtgtgagcagctattctgcatgggtgcagatggctggatgtgaaagagacatgctctagctgcaga

SEQ ID NO: 13693 - DNA, 2118 bp, Homo sapiens
  source 1..2118: mol_type = unassigned DNA
ctggctactaagggaacttgggaggatcccacctcagccttcgtgactagtgaggtgcgcaaacgcccgagttttccctggtgcgcgggttccgcctttgcagtgccctccacccttcctggtgtctgacccgcctccttcccaggccttttgttcctgtcccggaaagccggcgtcctgccgcgcgatgcccctgctcggacttcttcccaggagggcctgggcttcgctgctcagccagctcctgcgaccgccctgcgcttcgtgcaccggggcggtccgttgccaaagccaggttgcagaggcagtgttaacatcccaactgaaagcacatcaagagaaaccaaattttattatcaagaccccaaaggattttgacattgctggtcagtttgaccctatgatccccgatgcagagtgtttgaagatcatgtgtgaaatcctaagtggattgcagttgggagactttctcattaaggtaaatgaccggcggattgtggatgggatgtttgctgtctgtggtgttcctgaaagcaagttccgtgccatctgctcctccatagataaactagacaagatggcttggaaagatgtgagacatgagatggtggtgaagaaaggcctggctcctgaggtggctgatcgaattggggactatgtccagtgtcatggtggggtatccctagtagagcaaatgtttcaggatcccagactatcccagaacaagcaggccctggagggcctgggagacctaaagctgctatttgaatacctgactttatttggaattgctgataagatctcctttgacctcagcctggctcggggcctagactactatacaggagtgatctatgaagcagtgctgctgcagaccccaactcaggctggggaggagcccctgaatgtgggcagtgtggctgctggtgggcgctatgatgggctggtgggcatgtttgaccccaagggccacaaggtgccatgtgtgggactcagcattggggttgagcgaatcttctacattgtggagcagaggatgaagaccaaaggtgagaaggtgcggactacagagactcaagtgtttgtggccacaccacagaagaactttctccaagaacggttgaagcttattgcagagctttgggattctggaatcaaggcagagatgctatacaagaacaaccccaaactattaacccagctgcactattgtgagagcacaggcattccactggtggtcattattggtgagcaagaactgaaagaaggggtcatcaagatccgttcagtggccagcagagaggaggtggccattaaacgggaaaattttgtggctgaaattcagaagcgactgtctgagtcttgatccttgcctgattcccatctgctgctctttgtagaaaaggtttcctctagaactgaattcctctggaattgagtgatggacttcacaacaactagccaggaagggtgacaagtaccttctgcctcctccattcttcctgggtgcagaactgtagaagaccctgaggactcctgggctagtgtgagcagctattctgcatgggtgcagatggctggatgtgaaagagacatgctctagctgcagaggcaaatttgaagtgccacggaacgttgtcaagaggtagtgagattgttgctgtgagcaaggctctgggagagtcacctcaggctcaggattctgaaccattgagatcagaaaccagatacttagccttctactgtagctacggaaccagattctggtgaatttgtccacaatcagccattggcctgtctggggagtttttggaagacagcaaagaggggcaatggctgctttcagctttgaggacagatgctatcctaagggcatggcagtacccatgttgatttgacatctctctagcccatccattgcttacagtagaagagtggggctgtatgcttgataatcttgaacattgaacttaatagatgacttgacaaggtagagatctgatattttgagattttggagaccatttcctgtgccagaatcactgctctattccataccgtgccatggaggctgttttagaagtggttggataacatgttaaataaaatattaagtgt

SEQ ID NO: 13694 - DNA, 2340 bp, Homo sapiens
  source 1..2340: mol_type = unassigned DNA
ctggctactaagggaacttgggaggatcccacctcagccttcgtgactagtgaggtgcgcaaacgcccgagttttccctggtgcgcgggttccgcctttgcagtgccctccacccttcctggtgtctgacccgcctccttcccaggccttttgttcctgtcccggaaagccggcgtcctgccgcgcgatgcccctgctcggacttcttcccaggagggcctgggcttcgctgctcagccagctcctgcgaccgccctgcgcttcgtgcaccggggcggtccgttgccaaagccaggttgcagaggcagtgttaacatcccaactgaaagcacatcaagagaaaccaaattttattatcaagaccccaaaggaaaccctgactgagaagtatggagaggactctgggctcatgtatgatctgaaggatcaaggtggagagctgttgtccctccgctatgaccttactgttccctttgctcgttatctggccatgaataaggtgaagaagatgaaacgttatcatgttggaaaggtgtggcggcgagagagcccaaccatagtccaaggccgttatagggagttctgccagtgtgattttgacattgctggtcagtttgaccctatgatccccgatgcagagtgtttgaagatcatgtgtgaaatcctaagtggattgcagttgggagactttctcattaaggtaaatgaccggcggattgtggatgggatgtttgctgtctgtggtgttcctgaaagcaagttccgtgccatctgctcctccatagataaactagacaagatggcttggaaagatgtgagacatgagatggtggtgaagaaaggcctggctcctgaggtggctgatcgaattggggactatgtccagtgtcatggtggggtatccctagtagagcaaatgtttcaggatcccagactatcccagaacaagcaggccctggagggcctgggagacctaaagctgctatttgaatacctgactttatttggaattgctgataagatctcctttgacctcagcctggctcggggcctagactactatacaggagtgatctatgaagcagtgctgctgcagaccccaactcaggctggggaggagcccctgaatgtgggcagtgtggctgctggtgggcgctatgatgggctggtgggcatgtttgaccccaagggccacaaggtgccatgtgtgggactcagcattggggttgagcgaatcttctacattgtggagcagaggatgaagaccaaaggtgagaaggtgcggactacagagactcaagtgtttgtggccacaccacagaagaactttctccaagaacggttgaagcttattgcagagctttgggattctggaatcaaggcagagatgctatacaagaacaaccccaaactattaacccagctgcactattgtgagagcacaggcattccactggtggtcattattggtgagcaagaactgaaagaaggggtcatcaagatccgttcagtggccagcagagaggaggtggccattaaacgggaaaattttgtggctgaaattcagaagcgactgtctgagtcttgatccttgcctgattcccatctgctgctctttgtagaaaaggtttcctctagaactgaattcctctggaattgagtgatggacttcacaacaactagccaggaagggtgacaagtaccttctgcctcctccattcttcctgggtgcagaactgtagaagaccctgaggactcctgggctagtgtgagcagctattctgcatgggtgcagatggctggatgtgaaagagacatgctctagctgcagaggcaaatttgaagtgccacggaacgttgtcaagaggtagtgagattgttgctgtgagcaaggctctgggagagtcacctcaggctcaggattctgaaccattgagatcagaaaccagatacttagccttctactgtagctacggaaccagattctggtgaatttgtccacaatcagccattggcctgtctggggagtttttggaagacagcaaagaggggcaatggctgctttcagctttgaggacagatgctatcctaagggcatggcagtacccatgttgatttgacatctctctagcccatccattgcttacagtagaagagtggggctgtatgcttgataatcttgaacattgaacttaatagatgacttgacaaggtagagatctgatattttgagattttggagaccatttcctgtgccagaatcactgctctattccataccgtgccatggaggctgttttagaagtggttggataacatgttaaataaaatattaagtgt

SEQ ID NO: 13695 - DNA, 1426 bp, Homo sapiens
  source 1..1426: mol_type = unassigned DNA
gttcctgtcccggaaagccggcgtcctgccgcgcgatgcccctgctcggacttcttcccaggagggcctgggcttcgctgctcagccagctcctgcgaccgccctgcgcttcgtgcaccggggcggtccgttgccaaagccaggattttgacattgctggtcagtttgaccctatgatccccgatgcagagtgtttgaagatcatgtgtgaaatcctaagtggattgcagttgggagactttctcattaagatggcttggaaagatgtgagacatgagatggtggtgaagaaaggcctggctcctgaggtggctgatcgaattggggactatgtccagtgtcatggtggggtatccctagtagagcaaatgtttcaggatcccagactatcccagaacaagcaggccctggagggcctgggagacctaaagctgctatttgaatacctgactttatttggaattgctgataagatctcctttgacctcagcctggctcggggcctagactactatacaggagtgatctatgaagcagtgctgctgcagaccccaactcaggctggggaggagcccctgaatgtgggcagtgtggctgctggtgggcgctatgatgggctggtgggcatgtttgaccccaagggccacaaggtgccatgtgtgggactcagcattggggttgagcgaatcttctacattgtggagcagaggatgaagaccaaaggtgagaaggtgcggactacagagactcaagtgtttgtggccacaccacagaagaactttctccaagaacggttgaagcttattgcagagctttgggattctggaatcaaggcagagatgctatacaagaacaaccccaaactattaacccagctgcactattgtgagagcacaggcattccactggtggtcattattggtgagcaagaactgaaagaaggggtcatcaagatccgttcagtggccagcagagaggaggtggccattaaacgggaaaattttgtggctgaaattcagaagcgactgtctgagtcttgatccttgcctgattcccatctgctgctctttgtagaaaaggtttcctctagaactgaattcctctggaattgagtgatggacttcacaacaactagccaggaagggtgacaagtaccttctgcctcctccattcttcctgggtgcagaactgtagaagaccctgaggactcctgggctagtgtgagcagctattctgcatgggtgcagatggctggatgtgaaagagacatgctctagctgcagaggcaaatttgaagtgccacggaacgttgtcaagaggtagtgagattgttgctgtgagcaaggctctgggagagtcacctcaggctcaggattctgaaccattgagatcagaaaccagatacttagccttctactgtagctac

SEQ ID NO: 13696 - DNA, 1562 bp, Homo sapiens
  source 1..1562: mol_type = unassigned DNA
cttttgttcctgtcccggaaagccggcgtcctgccgcgcgatgcccctgctcggacttcttcccaggagggcctgggcttcgctgctcagccagctcctgcgaccgccctgcgcttcgtgcaccggggcggtccgttgccaaagccagggtaccagggatcttagtcctcagcatatggttgtgagggagaaaattcttgatttggttatcagctgctttaaacgtcatggagcaaaggggatggacaccccagcatttgagctgaaggaaaccctgactgagaagtatggagaggactctgggctcatgtatgatctgaaggatcaaggtggagagctgttgtccctccgctatgaccttactgttccctttgctcgttatctggccatgaataaggtgaagaagatgaaacgttatcatgttggaaaggtgtggcggcgagagagcccaaccatagtccaaggccgttatagggagttctgccagtgtgattttgacattgctggtcagtttgaccctatgatccccgatgcagagtgtttgaagatcatgtgtgaaatcctaagtggattgcagttgggagactttctcattaaggtaaatgaccggcggattgtggatgggatgtttgctgtctgtggtgttcctgaaagcaagttccgtgccatctgctcctccatagataaactagacaagatggcttggaaagatgtgagacatgagatggtggtgaagaaaggcctggctcctgaggtggctgatcgaattggggactatgtccagtgtcatggtggggtatccctagtagagcaaatgtttcaggatcccagactatcccagaacaagcaggccctggagggcctgggagacctaaagctgctatttgaatacctgactttatttggaattgctgataagatctcctttgacctcagcctggctcggggcctagactactatacaggagtgatctatgaagcagtgctgctgcagaccccaactcaggctggggaggagcccctgaatgtgggcagtgtggctgctggtgggcgctatgatgggctggtgggcatgtttgaccccaagggccacaaggtgccatgtgtgggactcagcattggggttgagcgaatcttctacattgtggagcagaggatgaagaccaaaggtgagaaggtgcggactacagagactcaagtgtttgtggccacaccacagaagaactttctccaagaacggttgaagcttattgcagagctttgggattctggaatcaaggcagagatgctatacaagaacaaccccaaactattaacccagctgcactattgtgagagcacaggcattccactggtggtcattattggtgagcaagaactgaaagaaggggtcatcaagatccgttcagtggccagcagagaggaggtggccattaaacgggaaaattttgtggctgaaattcagaagcgactgtctgagtcttgatccttgcctgattcccatctgctgctctttgtagaaaaggtttcctctagaactgaattcctctggaattgagtga

SEQ ID NO: 13697 - DNA, 1809 bp, Homo sapiens
  source 1..1809: mol_type = unassigned DNA
ggagggagcacgtcacttcctgttgccttaggggaacgtggctttccctgcagagccggtgtctccgcctgcgtccctgctgcagcaaccggagctggagtcggatcccgaacgcaccctcgccatggactcggccctcagcgatccgcataacggcagtgccgaggcaggcggccccaccaacagcactacgcggccgccttccacgcccgagggcatcgcgctggcctacggcagcctcctgctcatggcgctgctgcccatcttcttcggcgccctgcgctccgtacgctgcgcccgcggcaagaatgcttcagacatgcctgaaacaatcaccagccgggatgccgcccgcttccccatcatcgccagctgcacactcttggggctctacctctttttcaaaatattctcccaggagtacatcaacctcctgctgtccatgtatttcttcgtgctgggaatcctggccctgtcccacaccatcagccccttcatgaataagttttttccagccagctttccaaatcgacagtaccagctgctcttcacacagggttctggggaaaacaaggaagagatcatcaattatgaatttgacaccaaggacctggtgtgcctgggcctgagcagcatcgttggcgtctggtacctgctgaggaagcactggattgccaacaacctttttggcctggccttctcccttaatggagtagagctcctgcacctcaacaatgtcagcactggctgcatcctgctgggcggactcttcatctacgatgtcttctgggtatttggcaccaatgtgatggtgacagtggccaagtccttcgaggcaccaataaaattggtgtttccccaggatctgctggagaaaggcctcgaagcaaacaactttgccatgctgggacttggagatgtcgtcattccagggatcttcattgccttgctgctgcgctttgacatcagcttgaagaagaatacccacacctacttctacaccagctttgcagcctacatcttcggcctgggccttaccatcttcatcatgcacatcttcaagcatgctcagcctgccctcctatacctggtccccgcctgcatcggttttcctgtcctggtggcgctggccaagggagaagtgacagagatgttcagctacgagtcctcggcggaaatcctgcctcataccccgaggctcacccacttccccacagtctcgggctccccagccagcctggccgactccatgcagcagaagctagctggccctcgccgccggcgcccgcagaatcccagcgccatgtaatgcccagcgggtgcccacctgcccgcttccccctactgccccggggcccaagttatgaggagtcaaatcctaaggatccagcggcagtgacagaatccaaagagggaacagaggcatcagcatcgaaggggctggagaagaaagagaaatgatgcagctggtgcccgagcctctcagggccagaccagacagatgggggctgggcccacacaggcgtgcaccggtagagggcacaggaggccaagggcagctccaggacagggcagggggcagcaggatacctccagccaggcctctgtggcctctgtttccttctccctttcttggccctcctctgctcctccccacaccctgcaggcaaaagaaacccccagcttcccccctccccgggagccaggtgggaaaagtgggtgtgatttttagattttgtattgtggactgattttgcctcacattaaaaactcatcccatggccagggcgggccactgtgctcctggaa

SEQ ID NO: 13698 - DNA, 1606 bp, Homo sapiens
  source 1..1606: mol_type = unassigned DNA
ggagggagcacgtcacttcctgttgccttaggggaacgtggctttccctgcagagccggtgtctccgcctgcgtccctgctgcagcaaccggagctggagtcggatcccgaacgcaccctcgccatggactcggccctcagcgatccgcataacggcagtgccgaggcaggcggccccaccaacagcactacgcggccgccttccacgcccgagggcatcgcgctggcctacggcagcctcctgctcatggcgctgctgcccatcttcttcggcgccctgcgctccgtacgctgcgcccgcggcaagaatgcttcagacatgcctgaaacaatcaccagccgggatgccgcccgcttccccatcatcgccagctgcacactcttggggctctacctctttttcaaaatattctcccaggagtacatcaacctcctgctgtccatgtatttcttcgtgctgggaatcctggccctgtcccacaccatcagccccttcatgaataagttttttccagccagctttccaaatcgacagtaccagctgctcttcacacagggttctggggaaaacaaggaagagatcatcaattatgaatttgacaccaaggacctggtgtgcctgggcctgagcagcatcgttggcgtctggtacctgctgaggaagcactggattgccaacaacctttttggcctggccttctcccttaatggagtagagctcctgcacctcaacaatgtcagcactggctgcatcctgctgggcggactcttcatctacgatgtcttctgggtatttggcaccaatgtgatggtgacagtggccaagtccttcgaggcaccaataaaattggtgtttccccaggatctgctggagaaaggcctcgaagcaaacaactttgccatgctgggacttggagatgtcgtcattccagggatcttcattgccttgctgctgcgctttgacatcagcttgaagaagaatacccacacctacttctacaccagctttgcagcctacatcttcggcctgggccttaccatcttcatcatgcacatcttcaagcatgctcagcctgccctcctatacctggtccccgcctgcatcggttttcctgtcctggtggcgctggccaagggagaagtgacagagatgttcagttatgaggagtcaaatcctaaggatccagcggcagtgacagaatccaaagagggaacagaggcatcagcatcgaaggggctggagaagaaagagaaatgatgcagctggtgcccgagcctctcagggccagaccagacagatgggggctgggcccacacaggcgtgcaccggtagagggcacaggaggccaagggcagctccaggacagggcagggggcagcaggatacctccagccaggcctctgtggcctctgtttccttctccctttcttggccctcctctgctcctccccacaccctgcaggcaaaagaaacccccagcttcccccctccccgggagccaggtgggaaaagtgggtgtgatttttagattttgtattgtggactgattttgcctcacattaaaaactcatcccatggccagggcgggccactgtgctcctggaa

SEQ ID NO: 13699 - DNA, 1424 bp, Homo sapiens
  source 1..1424: mol_type = unassigned DNA
gggaacgtggctttccctgcagagccggtgtctccgcctgcgtccctgctgcagcaaccggagctggagtcggatcccgaacgcaccctcgccatggactcggccctcagcgatccgcataacggcagtgccgaggcaggcggccccaccaacagcactacgcggccgccttccacgcccgagggcatcgcgctggcctacggcagcctcctgctcatggcgctgctgcccatcttcttcggcgccctgcgctccgtacgctgcgcccgcggcaagaatgcttcagacatgcctgaaacaatcaccagccgggatgccgcccgcttccccatcatcgccagctgcacactcttggggctctacctctttttcaaaatattctcccaggagtacatcaacctcctgctgtccatgtatttcttcgtgctgggaatcctggccctgtcccacaccatcagccccttcatgaataagttttttccagccagctttccaaatcgacagtaccagctgctcttcacacagggttctggggaaaacaaggaagagatcatcaattatgaatttgacaccaaggacctggtgtgcctgggcctgagcagcatcgttggcgtctggtacctgctgaggaaggtatttggcaccaatgtgatggtgacagtggccaagtccttcgaggcaccaataaaattggtgtttccccaggatctgctggagaaaggcctcgaagcaaacaactttgccatgctgggacttggagatgtcgtcattccagggatcttcattgccttgctgctgcgctttgacatcagcttgaagaagaatacccacacctacttctacaccagctttgcagcctacatcttcggcctgggccttaccatcttcatcatgcacatcttcaagcatgctcagcctgccctcctatacctggtccccgcctgcatcggttttcctgtcctggtggcgctggccaagggagaagtgacagagatgttcagttatgaggagtcaaatcctaaggatccagcggcagtgacagaatccaaagagggaacagaggcatcagcatcgaaggggctggagaagaaagagaaatgatgcagctggtgcccgagcctctcagggccagaccagacagatgggggctgggcccacacaggcgtgcaccggtagagggcacaggaggccaagggcagctccaggacagggcagggggcagcaggatacctccagccaggcctctgtggcctctgtttccttctccctttcttggccctcctctgctcctccccacaccctgcaggcaaaagaaacccccagcttcccccctccccgggagccaggtgggaaaagtgggtgtgatttttagattttgtattgtggactgattttgcctcacattaaaaactcatcccatggcc

SEQ ID NO: 13700 - DNA, 1753 bp, Homo sapiens
  source 1..1753: mol_type = unassigned DNA
ggagggagcacgtcacttcctgttgccttaggggaacgtggctttccctgcagagccggtgtctccgcctgcgtccctgctgcagcaaccggagctggagtcggatcccgaacgcaccctcgccatggactcggccctcagcgatccgcataacggcagtgccgaggcaggcggccccaccaacagcactacgcggccgccttccacgcccgagggcatcgcgctggcctacggcagcctcctgctcatggcgctgctgcccatcttcttcggcgccctgcgctccgtacgctgcgcccgcggcaagaatgcttcagacatgcctgaaacaatcaccagccgggatgccgcccgcttccccatcatcgccagctgcacactcttggggctctacctctttttcaaaatattctcccaggagtacatcaacctcctgctgtccatgtatttcttcgtgctgggaatcctggccctgtcccacaccatcagccccttcatgaataagttttttccagccagctttccaaatcgacagtaccagctgctcttcacacagggttctggggaaaacaaggaagagatcatcaattatgaatttgacaccaaggacctggtgtgcctgggcctgagcagcatcgttggcgtctggtacctgctgaggaagcactggattgccaacaacctttttggcctggccttctcccttaatggagtagagctcctgcacctcaacaatgtcagcactggctgcatcctgctgggcggactcttcatctacgatgtcttctgggtatttggcaccaatgtgatggtgacagtggccaagtccttcgaggcaccaataaaattggtgtttccccaggatctgctggagaaaggcctcgaagcaaacaactttgccatgctgggacttggagatgtcgtcattccagggatcttcattgccttgctgctgcgctttgacatcagcttgaagaagaatacccacacctacttctacaccagctttgcagcctacatcttcggcctgggccttaccatcttcatcatgcacatcttcaagcatgctcagcctgccctcctatacctggtccccgcctgcatcggttttcctgtcctggtggcgctggccaagggagaagtgacagagatgttcagctacgagtcctcggcggaaatcctgcctcataccccgaggctcacccacttccccacagtctcgggctccccagccagcctggccgactccatgcagcagaagctagctggccctcgccgccggcgcccgcagaatcccagcgccatttatgaggagtcaaatcctaaggatccagcggcagtgacagaatccaaagagggaacagaggcatcagcatcgaaggggctggagaagaaagagaaatgatgcagctggtgcccgagcctctcagggccagaccagacagatgggggctgggcccacacaggcgtgcaccggtagagggcacaggaggccaagggcagctccaggacagggcagggggcagcaggatacctccagccaggcctctgtggcctctgtttccttctccctttcttggccctcctctgctcctccccacaccctgcaggcaaaagaaacccccagcttcccccctccccgggagccaggtgggaaaagtgggtgtgatttttagattttgtattgtggactgattttgcctcacattaaaaactcatcccatggccagggcgggccactgtgctcctggaa

SEQ ID NO: 13701 - DNA, 4264 bp, Homo sapiens
  source 1..4264: mol_type = unassigned DNA
gagccgcaggctgaggccgggaagggtcgggggcgaggccgcgtcgccgcctccccgaagccttttcctgttggggggagggcccgccagtgacggccgggcctgtcacgtgggcctgacagctggggagggggtggccggcgacaatgtggtcccgaagcggccagcgccgggagctgcagcgctgagacccccagcccgccccctcgggctcccggccggggccccatcatgttctccaggaagaaacgagagctcatgaaaaccccttccatctcgaaaaagaaccgcgcgggaagccccagcccgcagccctcgggggagctgcccaggaaggatggggctgacgcggtgttccccggaccaagcctggagccgcccgctgggtcctccggcgtcaaggccacagggaccctcaagcggcccaccagcctgagccgccacgccagcgcggctggcttccccctgtcgggtgctgcctcctggacactgggccggagccaccggagcccactgacagccgccagcccgggcgagctgcccaccgagggtgccggcccggacgtcgtcgaggacatctcccatctgctggcggacgtggcccgcttcgctgagggccttgagaaacttaaggagtgtgtgttgcgtgacgacctccttgaggcccgccgcccgcgggcccacgagtgcctgggtgaggctctgcgtgtcatgcatcagatcatctccaagtacccgctgctgaacaccgtggagacgctcaccgcagccggcaccctcattgccaaggtcaaagccttccattatgagagcaacaatgatctggagaaacaggagttcgagaaggccctggagacgattgctgtggccttcagtagcacagtgtccgagttcctcatgggtgaagtggacagcagcaccctcctagcagtgcctcctggggactcgagccagtccatggaaagcctgtatggaccgggcagtgagggcacgcctcccagcctggaagactgtgacgccggctgcctgcccgccgaggaggtggacgtgctgctacagcgctgtgaggggggcgtggatgccgcactgctgtatgccaagaacatggccaagtacatgaaggacctcatcagctacctggagaagcggacgacgctggagatggagtttgccaagggcctgcagaagatcgctcacaactgcagacagagcgtcatgcaggagccccacatgccgctcctgtccatctactcgctggccctggagcaggacctggagttcggccacagcatggtgcaggcggtgggcaccttgcagacccagaccttcatgcagcccctgaccctgcggcggcttgaacacgagaagcgcaggaaggagatcaaggaggcctggcaccgtgcccagaggaagctgcaagaggcggagtccaacctgcgcaaggccaagcagggttacgtgcagcgctgcgaggaccacgacaaggctcgcttcctcgtggccaaggcggaggaggagcaggctggcagcgcgccgggagcaggcagcacggccaccaagaccctggacaagcggcggcggctggaggaggaggccaagaacaaggcggaggaagctatggccacctaccgcacctgcgtggccgacgcgaagacgcagaagcaggagctggaggataccaaggtgacggcgctgcggcagatccaggaggtcatccggcagagcgaccaaaccatcaagtcggccacgatctcctactaccagatgatgcatatgcagacggcgccgctgcccgtgcacttccagatgctgtgtgagagcagcaagctgtatgacccaggccagcagtacgcctcccacgtgcgccagctgcagcgggaccaggagcccgatgtgcactacgactttgagccccacgtctccgccaacgcctggtcccccgtcatgcgtgcccggaagagcagcttcaacgtgagtgatgtggcgcggccggaggctgccgggagccccccagaagaaggcgggtgcactgagggcacacctgccaaggaccacagggccgggcgaggacaccaggttcacaagtcatggccgctctcgatctcagactcggacagtgggctggaccccggccctggcgcaggggactttaagaagttcgagcggacgtcatccagtggtaccatgtcgtccacggaggagctggtggacccagacggtggagccggggcttcagcctttgagcaggctgacctcaacggcatgacccccgagctgccggtggccgtgcccagtggaccgttccgccacgaggggctgtccaaggcggcccgtactcaccggctccggaagctccgcacgcccgccaagtgccgcgagtgcaacagctacgtctacttccagggtgctgagtgtgaagagtgctgcctggcctgccacaagaaatgtctggagacgctggccatacagtgcgggcacaagaagctgcaaggccgcctgcagctgttcggccaggacttcagccacgcggcccgcagcgcccccgacggcgtgcccttcatcgtcaagaagtgcgtctgcgagatcgagcggcgggcgctgcgcaccaagggcatctaccgggtcaatggggtaaagacacgcgtggagaagctgtgccaggccttcgagaacggcaaggagctggtcgagctgtcgcaggcctcgccccacgacatcagcaacgtcctcaagctctacctgcgtcagcttcccgagccgctcatctccttccgcctctaccacgagctcgtagggctggccaaggacagcctgaaggcagaggccgaggccaaggcggcgtcccggggccggcaggacggctcggagagcgaggcagtggcggtggccctggcaggtcggctgcgggagctcctgcgggacctgccgcctgagaaccgggcctcgctgcagtacctgctgcgtcacctacgcaggatcgtggaggtggagcaggacaacaagatgacccccgggaacctgggcatcgtgttcgggcccacgctgcttcggccacggcccaccgaggccaccgtgtccctctcctccctggtggattatccccatcaggcccgcgtcatcgagactctcatcgtccactacggcctggtcttcgaggaggagccggaggagacccccgggggccaggacgagtcatccaaccagcgagctgaggtagtcgtccaggtgccgtacctggaggcgggcgaggcggtggtctacccgctgcaggaggcggcggcggacgggtgcagagaatcccgagttgtgtccaacgattcggactcggacctagaggaggcctccgagctgctgtcctcatcggaggccagtgccctgggccacctcagcttcctggagcagcagcagagcgaggccagcctagaggtggcttctggcagccacagcggcagtgaggagcagctggaggccacagcccgggaggacggggacggggacgaggacggcccggcccagcagctctcaggattcaacaccaaccagtccaacaacgtgctgcaggccccactgccccccatgaggctccgtggcgggcggatgacactgggctcctgcagggaaaggcagccggaattcgtgtgagctggggtggggctgggaccacaggtggcttctctcttgcctgctcctgtccctccagcacgtcccctgcaccacggcatagcttaggtgcgccgtcctggggtcgctgccgagagcgcctggacttcgacgtcccaccagcgggcgcctcctcccagaggcttccaggagcacgagggccttgcggcacaggactgtgccctgtgctgtcccctgcaccccggctcagctgagctggggaacactgctgtcgtgtgaagtcacagtggccttgttggtgcccacagggctgtgtggatggaggaagctgtccctgcccagtgcatcccccaggtcatcacggggacgcaggaggcaggccctgccctgccctctcctcacaggtctgttgcagggactccagaaaccattctgggagccgtggatgggggcggagctggggtttggtgcagtttccagggtgcagtacagcagggcctgaatactggccctggactcccttttccagaacaccaggtgtggccacctggggctcaggtacacagtggggtctctcggaagccaccgtgtggttctttcacaggcacgtttattttgctgaaataaaaagtttttaatcggg

SEQ ID NO: 13702 - DNA, 4015 bp, Homo sapiens
  source 1..4015: mol_type = unassigned DNA
agctacagcccctaccgggcgggacggcaggggccacagcagagaggccgggaccccggcattcagctcacggagctgcccaggaaggatggggctgacgcggtgttccccggaccaagcctggagccgcccgctgggtcctccggcgtcaaggccacagggaccctcaagcggcccaccagcctgagccgccacgccagcgcggctggcttccccctgtcgggtgctgcctcctggacactgggccggagccaccggagcccactgacagccgccagcccgggcgagctgcccaccgagggtgccggcccggacgtcgtcgaggacatctcccatctgctggcggacgtggcccgcttcgctgagggccttgagaaacttaaggagtgtgtgttgcgtgacgacctccttgaggcccgccgcccgcgggcccacgagtgcctgggtgaggctctgcgtgtcatgcatcagatcatctccaagtacccgctgctgaacaccgtggagacgctcaccgcagccggcaccctcattgccaaggtcaaagccttccattatgagagcaacaatgatctggagaaacaggagttcgagaaggccctggagacgattgctgtggccttcagtagcacagtgtccgagttcctcatgggtgaagtggacagcagcaccctcctagcagtgcctcctggggactcgagccagtccatggaaagcctgtatggaccgggcagtgagggcacgcctcccagcctggaagactgtgacgccggctgcctgcccgccgaggaggtggacgtgctgctacagcgctgtgaggggggcgtggatgccgcactgctgtatgccaagaacatggccaagtacatgaaggacctcatcagctacctggagaagcggacgacgctggagatggagtttgccaagggcctgcagaagatcgctcacaactgcagacagagcgtcatgcaggagccccacatgccgctcctgtccatctactcgctggccctggagcaggacctggagttcggccacagcatggtgcaggcggtgggcaccttgcagacccagaccttcatgcagcccctgaccctgcggcggcttgaacacgagaagcgcaggaaggagatcaaggaggcctggcaccgtgcccagaggaagctgcaagaggcggagtccaacctgcgcaaggccaagcagggttacgtgcagcgctgcgaggaccacgacaaggctcgcttcctcgtggccaaggcggaggaggagcaggctggcagcgcgccgggagcaggcagcacggccaccaagaccctggacaagcggcggcggctggaggaggaggccaagaacaaggcggaggaagctatggccacctaccgcacctgcgtggccgacgcgaagacgcagaagcaggagctggaggataccaaggtgacggcgctgcggcagatccaggaggtcatccggcagagcgaccaaaccatcaagtcggccacgatctcctactaccagatgatgcatatgcagacggcgccgctgcccgtgcacttccagatgctgtgtgagagcagcaagctgtatgacccaggccagcagtacgcctcccacgtgcgccagctgcagcgggaccaggagcccgatgtgcactacgactttgagccccacgtctccgccaacgcctggtcccccgtcatgcgtgcccggaagagcagcttcaacgtgagtgatgtggcgcggccggaggctgccgggagccccccagaagaaggcgggtgcactgagggcacacctgccaaggaccacagggccgggcgaggacaccaggttcacaagtcatggccgctctcgatctcagactcggacagtgggctggaccccggccctggcgcaggggactttaagaagttcgagcggacgtcatccagtggtaccatgtcgtccacggaggagctggtggacccagacggtggagccggggcttcagcctttgagcaggctgacctcaacggcatgacccccgagctgccggtggccgtgcccagtggaccgttccgccacgaggggctgtccaaggcggcccgtactcaccggctccggaagctccgcacgcccgccaagtgccgcgagtgcaacagctacgtctacttccagggtgctgagtgtgaagagtgctgcctggcctgccacaagaaatgtctggagacgctggccatacagtgcgggcacaagaagctgcaaggccgcctgcagctgttcggccaggacttcagccacgcggcccgcagcgcccccgacggcgtgcccttcatcgtcaagaagtgcgtctgcgagatcgagcggcgggcgctgcgcaccaagggcatctaccgggtcaatggggtaaagacacgcgtggagaagctgtgccaggccttcgagaacggcaaggagctggtcgagctgtcgcaggcctcgccccacgacatcagcaacgtcctcaagctctacctgcgtcagcttcccgagccgctcatctccttccgcctctaccacgagctcgtagggctggccaaggacagcctgaaggcagaggccgaggccaaggcggcgtcccggggccggcaggacggctcggagagcgaggcagtggcggtggccctggcaggtcggctgcgggagctcctgcgggacctgccgcctgagaaccgggcctcgctgcagtacctgctgcgtcacctacgcaggatcgtggaggtggagcaggacaacaagatgacccccgggaacctgggcatcgtgttcgggcccacgctgcttcggccacggcccaccgaggccaccgtgtccctctcctccctggtggattatccccatcaggcccgcgtcatcgagactctcatcgtccactacggcctggtcttcgaggaggagccggaggagacccccgggggccaggacgagtcatccaaccagcgagctgaggtagtcgtccaggtgccgtacctggaggcgggcgaggcggtggtctacccgctgcaggaggcggcggcggacgggtgcagagaatcccgagttgtgtccaacgattcggactcggacctagaggaggcctccgagctgctgtcctcatcggaggccagtgccctgggccacctcagcttcctggagcagcagcagagcgaggccagcctagaggtggcttctggcagccacagcggcagtgaggagcagctggaggccacagcccgggaggacggggacggggacgaggacggcccggcccagcagctctcaggattcaacaccaaccagtccaacaacgtgctgcaggccccactgccccccatgaggctccgtggcgggcggatgacactgggctcctgcagggaaaggcagccggaattcgtgtgagctggggtggggctgggaccacaggtggcttctctcttgcctgctcctgtccctccagcacgtcccctgcaccacggcatagcttaggtgcgccgtcctggggtcgctgccgagagcgcctggacttcgacgtcccaccagcgggcgcctcctcccagaggcttccaggagcacgagggccttgcggcacaggactgtgccctgtgctgtcccctgcaccccggctcagctgagctggggaacactgctgtcgtgtgaagtcacagtggccttgttggtgcccacagggctgtgtggatggaggaagctgtccctgcccagtgcatcccccaggtcatcacggggacgcaggaggcaggccctgccctgccctctcctcacaggtctgttgcagggactccagaaaccattctgggagccgtggatgggggcggagctggggtttggtgcagtttccagggtgcagtacagcagggcctgaatactggccctggactcccttttccagaacaccaggtgtggccacctggggctcaggtacacagtggggtctctcggaagccaccgtgtggttctttcacaggcacgtttattttgctgaaataaaaagtttttaatcggg

SEQ ID NO: 13703 - DNA, 3339 bp, Homo sapiens
  source 1..3339: mol_type = unassigned DNA
gacaatgtggtcccgaagcggccagcgccgggagctgcagcgctgagacccccagcccgccccctcgggctcccggccggggccccatcatgttctccaggaagaaacgagagctcatgaaaaccccttccatctcgaaaaagaaccgcgcgggaagccccagcccgcagccctcggggacctccttgaggcccgccgcccgcgggcccacgagtgcctgggtgaggctctgcgtgtcatgcatcagatcatctccaagtacccgctgctgaacaccgtggagacgctcaccgcagccggcaccctcattgccaaggtcaaagccttccattatgagagcaacaatgatctggagaaacaggagttcgagaaggccctggagacgattgctgtggccttcagtagcacagtgtccgagttcctcatgggtgaagtggacagcagcaccctcctagcagtgcctcctggggactcgagccagtccatggaaagcctgtatggaccgggcagtgagggcacgcctcccagcctggaagactgtgacgccggctgcctgcccgccgaggaggtggacgtgctgctacagcgctgtgaggggggcgtggatgccgcactgctgtatgccaagaacatggccaagtacatgaaggacctcatcagctacctggagaagcggacgacgctggagatggagtttgccaagggcctgcagaagatcgctcacaactgcagacagagcgtcatgcaggagccccacatgccgctcctgtccatctactcgctggccctggagcaggacctggagttcggccacagcatggtgcaggcggtgggcaccttgcagacccagaccttcatgcagcccctgaccctgcggcggcttgaacacgagaagcgcaggaaggagatcaaggaggcctggcaccgtgcccagaggaagctgcaagaggcggagtccaacctgcgcaaggccaagcagggttacgtgcagcgctgcgaggaccacgacaaggctcgcttcctcgtggccaaggcggaggaggagcaggctggcagcgcgccgggagcaggcagcacggccaccaagaccctggacaagcggcggcggctggaggaggaggccaagaacaaggcggaggaagctatggccacctaccgcacctgcgtggccgacgcgaagacgcagaagcaggagctggaggataccaaggtgacggcgctgcggcagatccaggaggtcatccggcagagcgaccaaaccatcaagtcggccacgatctcctactaccagatgatgcatatgcagacggcgccgctgcccgtgcacttccagatgctgtgtgagagcagcaagctgtatgacccaggccagcagtacgcctcccacgtgcgccagctgcagcgggaccaggagcccgatgtgcactacgactttgagccccacgtctccgccaacgcctggtcccccgtcatgcgtgcccggaagagcagcttcaacgtgagtgatgtggcgcggccggaggctgccgggagccccccagaagaaggcgggtgcactgagggcacacctgccaaggaccacaggggtgagtgtccggcggggcccaggggcggacgctggctccctgcgacccaccctggcccttcaccagagacgcctctttctccagccgggcgaggacaccaggttcacaagtcatggccgctctcgatctcagactcggacagtgggctggaccccggccctggcgcaggggactttaagaagttcgagcggacgtcatccagtggtaccatgtcgtccacggaggagctggtggacccagacggtggagccggggcttcagcctttgagcaggctgacctcaacggcatgacccccgagctgccggtggccgtgcccagtggaccgttccgccacgaggggctgtccaaggcggcccgtactcaccggctccggaagctccgcacgcccgccaagtgccgcgagtgcaacagctacgtctacttccagggtgctgagtgtgaagagtgctgcctggcctgccacaagaaatgtctggagacgctggccatacagtgcgggcacaagaagctgcaaggccgcctgcagctgttcggccaggacttcagccacgcggcccgcagcgcccccgacggcgtgcccttcatcgtcaagaagtgcgtctgcgagatcgagcggcgggcgctgcgcaccaagggcatctaccgggtcaatggggtaaagacacgcgtggagaagctgtgccaggccttcgagaacggcaaggagctggtcgagctgtcgcaggcctcgccccacgacatcagcaacgtcctcaagctctacctgcgtcagcttcccgagccgctcatctccttccgcctctaccacgagctcgtagggctggccaaggacagcctgaaggcagaggccgaggccaaggcggcgtcccggggccggcaggacggctcggagagcgaggcagtggcggtggccctggcaggtcggctgcgggagctcctgcgggacctgccgcctgagaaccgggcctcgctgcagtacctgctgcgtcacctacgcaggatcgtggaggtggagcaggacaacaagatgacccccgggaacctgggcatcgtgttcgggcccacgctgcttcggccacggcccaccgaggccaccgtgtccctctcctccctggtggattatccccatcaggcccgcgtcatcgagactctcatcgtccactacggcctggtcttcgaggaggagccggaggagacccccgggggccaggacgagtcatccaaccagcgagctgaggtagtcgtccaggtgccgtacctggaggcgggcgaggcggtggtctacccgctgcaggaggcggcggcggacgggtgcagagaatcccgagttgtgtccaacgattcggactcggacctagaggaggcctccgagctgctgtcctcatcggaggccagtgccctgggccacctcagcttcctggagcagcagcagagcgaggccagcctagaggtggcttctggcagccacagcggcagtgaggagcagctggaggccacagcccgggaggacggggacggggacgaggacggcccggcccagcagctctcaggattcaacaccaaccagtccaacaacgtgctgcaggccccactgccccccatgaggctccgtggcgggcggatgacactgggctcctgcagggaaaggcagccggaattcgtgtgagctggggtggggctgggaccacaggtggcttctctcttgcctgctcctgtccctccagcacgtcccctgcaccacggcatagctta

SEQ ID NO: 13704 - DNA, 3814 bp, Homo sapiens
  source 1..3814: mol_type = unassigned DNA
aggagcccggtgtcccggagcacaggccagggccgggccagaagcccatccgacatccagctgaccctcaccctctgaccccagccctcagcgccatgagtcgggggcaaagagttctcaagggtctgctgggctgggtttgcacttggacctgggcctggagagccagacttggagcaaggggctgtggccttcatgtcctgtgccccagagatctgcccctcccacccgaggagctgcccaggaaggatggggctgacgcggtgttccccggaccaagcctggagccgcccgctgggtcctccggcgtcaaggccacagggaccctcaagcggcccaccagcctgagccgccacgccagcgcggctggcttccccctgtcgggtgctgcctcctggacactgggccggagccaccggagcccactgacagccgccagcccgggcgagctgcccaccgagggtgccggcccggacgtcgtcgaggacatctcccatctgctggcggacgtggcccgcttcgctgagggccttgagaaacttaaggagtgtgtgttgcgtgacgacctccttgaggcccgccgcccgcgggcccacgagtgcctgggtgaggctctgcgtgtcatgcatcagatcatctccaagtacccgctgctgaacaccgtggagacgctcaccgcagccggcaccctcattgccaaggtcaaagccttccattatgagagcaacaatgatctggagaaacaggagttcgagaaggccctggagacgattgctgtggccttcagtagcacagtgtccgagttcctcatgggtgaagtggacagcagcaccctcctagcagtgcctcctggggactcgagccagtccatggaaagcctgtatggaccgggcagtgagggcacgcctcccagcctggaagactgtgacgccggctgcctgcccgccgaggaggtggacgtgctgctacagcgctgtgaggggggcgtggatgccgcactgctgtatgccaagaacatggccaagtacatgaaggacctcatcagctacctggagaagcggacgacgctggagatggagtttgccaagggcctgcagaagatcgctcacaactgcagacagagcgtcatgcaggagccccacatgccgctcctgtccatctactcgctggccctggagcaggacctggagttcggccacagcatggtgcaggcggtgggcaccttgcagacccagaccttcatgcagcccctgaccctgcggcggcttgaacacgagaagcgcaggaaggagatcaaggaggcctggcaccgtgcccagaggaagctgcaagaggcggagtccaacctgcgcaaggccaagcagggttacgtgcagcgctgcgaggaccacgacaaggctcgcttcctcgtggccaaggcggaggaggagcaggctggcagcgcgccgggagcaggcagcacggccaccaagaccctggacaagcggcggcggctggaggaggaggccaagaacaaggcggaggaagctatggccacctaccgcacctgcgtggccgacgcgaagacgcagaagcaggagctggaggataccaaggtgacggcgctgcggcagatccaggaggtcatccggcagagcgaccaaaccatcaagtcggccacgatctcctactaccagatgatgcatatgcagacggcgccgctgcccgtgcacttccagatgctgtgtgagagcagcaagctgtatgacccaggccagcagtacgcctcccacgtgcgccagctgcagcgggaccaggagcccgatgtgcactacgactttgagccccacgtctccgccaacgcctggtcccccgtcatgcgtgcccggaagagcagcttcaacgtgagtgatgtggcgcggccggaggctgccgggagccccccagaagaaggcgggtgcactgagggcacacctgccaaggaccacagggccgggcgaggacaccaggttcacaagtcatggccgctctcgatctcagactcggacagtgggctggaccccggccctggcgcaggggactttaagaagttcgagcggacgtcatccagtggtaccatgtcgtccacggaggagctggtggacccagacggtggagccggggcttcagcctttgagcaggctgacctcaacggcatgacccccgagctgccggtggccgtgcccagtggaccgttccgccacgaggggctgtccaaggcggcccgtactcaccggctccggaagctccgcacgcccgccaagtgccgcgagtgcaacagctacgtctacttccagggtgctgagtgtgaagagtgctgcctggcctgccacaagaaatgtctggagacgctggccatacagtgcgggcacaagaagctgcaaggccgcctgcagctgttcggccaggacttcagccacgcggcccgcagcgcccccgacggcgtgcccttcatcgtcaagaagtgcgtctgcgagatcgagcggcgggcgctgcgcaccaagggcatctaccgggtcaatggggtaaagacacgcgtggagaagctgtgccaggccttcgagaacggcaaggagctggtcgagctgtcgcaggcctcgccccacgacatcagcaacgtcctcaagctctacctgcgtcagcttcccgagccgctcatctccttccgcctctaccacgagctcgtagggctggccaaggacagcctgaaggcagaggccgaggccaaggcggcgtcccggggccggcaggacggctcggagagcgaggcagtggcggtggccctggcaggtcggctgcgggagctcctgcgggacctgccgcctgagaaccgggcctcgctgcagtacctgctgcgtcacctacgcaggatcgtggaggtggagcaggacaacaagatgacccccgggaacctgggcatcgtgttcgggcccacgctgcttcggccacggcccaccgaggccaccgtgtccctctcctccctggtggattatccccatcaggcccgcgtcatcgagactctcatcgtccactacggcctggtcttcgaggaggagccggaggagacccccgggggccaggacgagtcatccaaccagcgagctgaggtagtcgtccaggtgccgtacctggaggcgggcgaggcggtggtctacccgctgcaggaggcggcggcggacgggtgcagagaatcccgagttgtgtccaacgattcggactcggacctagaggaggcctccgagctgctgtcctcatcggaggccagtgccctgggccacctcagcttcctggagcagcagcagagcgaggccagcctagaggtggcttctggcagccacagcggcagtgaggagcagctggaggccacagcccgggaggacggggacggggacgaggacggcccggcccagcagctctcaggattcaacaccaaccagtccaacaacgtgctgcaggccccactgccccccatgaggctccgtggcgggcggatgacactgggctcctgcagggaaaggcagccggaattcgtgtgagctggggtggggctgggaccacaggtggcttctctcttgcctgctcctgtccctccagcacgtcccctgcaccacggcatagcttaggtgcgccgtcctggggtcgctgccgagagcgcctggacttcgacgtcccaccagcgggcgcctcctcccagaggcttccaggagcacgagggccttgcggcacaggactgtgccctgtgctgtcccctgcaccccggctcagctgagctggggaacactgctgtcgtgtgaag

SEQ ID NO: 13705 - DNA, 3750 bp, Homo sapiens
  source 1..3750: mol_type = unassigned DNA
cggagacccccatcggtcagctgccaggccccacgcgctcgcggtctccgcgccccgacggctgcgccatgtgtatctgcgggacggcgcacccggtgctggacgagggccccgtgcgctgccgggcgggcccccgagacctccttgaggcccgccgcccgcgggcccacgagtgcctgggtgaggctctgcgtgtcatgcatcagatcatctccaagtacccgctgctgaacaccgtggagacgctcaccgcagccggcaccctcattgccaaggtcaaagccttccattatgagagcaacaatgatctggagaaacaggagttcgagaaggccctggagacgattgctgtggccttcagtagcacagtgtccgagttcctcatgggtgaagtggacagcagcaccctcctagcagtgcctcctggggactcgagccagtccatggaaagcctgtatggaccgggcagtgagggcacgcctcccagcctggaagactgtgacgccggctgcctgcccgccgaggaggtggacgtgctgctacagcgctgtgaggggggcgtggatgccgcactgctgtatgccaagaacatggccaagtacatgaaggacctcatcagctacctggagaagcggacgacgctggagatggagtttgccaagggcctgcagaagatcgctcacaactgcagacagagcgtcatgcaggagccccacatgccgctcctgtccatctactcgctggccctggagcaggacctggagttcggccacagcatggtgcaggcggtgggcaccttgcagacccagaccttcatgcagcccctgaccctgcggcggcttgaacacgagaagcgcaggaaggagatcaaggaggcctggcaccgtgcccagaggaagctgcaagaggcggagtccaacctgcgcaaggccaagcagggttacgtgcagcgctgcgaggaccacgacaaggctcgcttcctcgtggccaaggcggaggaggagcaggctggcagcgcgccgggagcaggcagcacggccaccaagaccctggacaagcggcggcggctggaggaggaggccaagaacaaggcggaggaagctatggccacctaccgcacctgcgtggccgacgcgaagacgcagaagcaggagctggaggataccaaggtgacggcgctgcggcagatccaggaggtcatccggcagagcgaccaaaccatcaagtcggccacgatctcctactaccagatgatgcatatgcagacggcgccgctgcccgtgcacttccagatgctgtgtgagagcagcaagctgtatgacccaggccagcagtacgcctcccacgtgcgccagctgcagcgggaccaggagcccgatgtgcactacgactttgagccccacgtctccgccaacgcctggtcccccgtcatgcgtgcccggaagagcagcttcaacgtgagtgatgtggcgcggccggaggctgccgggagccccccagaagaaggcgggtgcactgagggcacacctgccaaggaccacagggccgggcgaggacaccaggttcacaagtcatggccgctctcgatctcagactcggacagtgggctggaccccggccctggcgcaggggactttaagaagttcgagcggacgtcatccagtggtaccatgtcgtccacggaggagctggtggacccagacggtggagccggggcttcagcctttgagcaggctgacctcaacggcatgacccccgagctgccggtggccgtgcccagtggaccgttccgccacgaggggctgtccaaggcggcccgtactcaccggctccggaagctccgcacgcccgccaagtgccgcgagtgcaacagctacgtctacttccagggtgctgagtgtgaagagtgctgcctggcctgccacaagaaatgtctggagacgctggccatacagtgcgggcacaagaagctgcaaggccgcctgcagctgttcggccaggacttcagccacgcggcccgcagcgcccccgacggcgtgcccttcatcgtcaagaagtgcgtctgcgagatcgagcggcgggcgctgcgcaccaagggcatctaccgggtcaatggggtaaagacacgcgtggagaagctgtgccaggccttcgagaacggcaaggagctggtcgagctgtcgcaggcctcgccccacgacatcagcaacgtcctcaagctctacctgcgtcagcttcccgagccgctcatctccttccgcctctaccacgagctcgtagggctggccaaggacagcctgaaggcagaggccgaggccaaggcggcgtcccggggccggcaggacggctcggagagcgaggcagtggcggtggccctggcaggtcggctgcgggagctcctgcgggacctgccgcctgagaaccgggcctcgctgcagtacctgctgcgtcacctacgcaggatcgtggaggtggagcaggacaacaagatgacccccgggaacctgggcatcgtgttcgggcccacgctgcttcggccacggcccaccgaggccaccgtgtccctctcctccctggtggattatccccatcaggcccgcgtcatcgagactctcatcgtccactacggcctggtcttcgaggaggagccggaggagacccccgggggccaggacgagtcatccaaccagcgagctgaggtagtcgtccaggtgccgtacctggaggcgggcgaggcggtggtctacccgctgcaggaggcggcggcggacgggtgcagagaatcccgagttgtgtccaacgattcggactcggacctagaggaggcctccgagctgctgtcctcatcggaggccagtgccctgggccacctcagcttcctggagcagcagcagagcgaggccagcctagaggtggcttctggcagccacagcggcagtgaggagcagctggaggccacagcccgggaggacggggacggggacgaggacggcccggcccagcagctctcaggattcaacaccaaccagtccaacaacgtgctgcaggccccactgccccccatgaggctccgtggcgggcggatgacactgggctcctgcagggaaaggcagccggaattcgtgtgagctggggtggggctgggaccacaggtggcttctctcttgcctgctcctgtccctccagcacgtcccctgcaccacggcatagcttaggtgcgccgtcctggggtcgctgccgagagcgcctggacttcgacgtcccaccagcgggcgcctcctcccagaggcttccaggagcacgagggccttgcggcacaggactgtgccctgtgctgtcccctgcaccccggctcagctgagctggggaacactgctgtcgtgtgaagtcacagtggccttgttggtgcccacagggctgtgtggatggaggaagctgtccctgcccagtgcatcccccaggtcatcacggggacgcaggaggcaggccctgccctgccctctcctcacaggtctgttgcagggactccagaaaccattctgggagccgtggatgggggcggagctggggtttggtgcagtttccagggtgcagtacagcagggcctgaatactggccctggactcccttttccagaacaccaggtgtggccacctggggctcaggtacacagtggggtctctcggaagccaccgtgtggttctttcacaggcacgtttattttgctgaaataaaaagtttttaatcggg

SEQ ID NO: 13706 - DNA, 3351 bp, Homo sapiens
  source 1..3351: mol_type = unassigned DNA
agctggggagggggtggccggcgacaatgtggtcccgaagcggccagcgccgggagctgcagcgctgagacccccagcccgccccctcgggctcccggccggggccccatcatgttctccaggaagaaacgagagctcatgaaaaccccttccatctcgaaaaagaaccgcgcgggaagccccagcccgcagccctcgggggagctgcccaggaaggatggggctgacgcggtgttccccggaccaagcctggagccgcccgctgggtcctccggcgtcaaggccacagggaccctcaagcggcccaccagcctgagccgccacgccagcgcggctggcttccccctgtcgggtgctgcctcctggacactgggccggagccaccggagcccactgacagccgccagcccgggcgagctgcccaccgagggtgccggcccggacgtcgtcgaggacatctcccatctgctggcggacgtggcccgcttcgctgagggccttgagaaacttaaggagtgtgtgttgcgtgacgacctccttgaggcccgccgcccgcgggcccacgagtgcctgggtgaggctctgcgtgtcatgcatcagatcatctccaagtacccgctgctgaacaccgtggagacgctcaccgcagccggcaccctcattgccaaggtcaaagccttccattatgagagcaacaatgatctggagaaacaggagttcgagaaggccctggagacgattgctgtggccttcagtagcacagtgtccgagttcctcatgggtgaagtggacagcagcaccctcctagcagtgcctcctggggactcgagccagtccatggaaagcctgtatggaccgggcagtgagggcacgcctcccagcctggaagactgtgacgccggctgcctgcccgccgaggaggtggacgtgctgctacagcgctgtgaggggggcgtggatgccgcactgctgtatgccaagaacatggccaagtacatgaaggacctcatcagctacctggagaagcggacgacgctggagatggagtttgccaagggcctgcagaagatcgctcacaactgcagacagagcgtcatgcaggagccccacatgccgctcctgtccatctactcgctggccctggagcaggacctggagttcggccacagcatggtgcaggcggtgggcaccttgcagacccagaccttcatgcagcccctgaccctgcggcggcttgaacacgagaagcgcaggaaggagatcaaggaggcctggcaccgtgcccagaggaagctgcaagaggcggagtccaacctgcgcaaggccaagcagggttacgtgcagcgctgcgaggaccacgacaaggctcgcttcctcgtggccaaggcggaggaggagcaggctggcagcgcgccgggagcaggcagcacggccaccaagaccctggacaagcggcggcggctggaggaggaggccaagaacaaggcggaggaagctatggccacctaccgcacctgcgtggccgacgcgaagacgcagaagcaggagctggaggataccaaggtgacggcgctgcggcagatccaggaggtcatccggcagagcgaccaaaccatcaagtcggccacgatctcctactaccagatgatgcatatgcagacggcgccgctgcccgtgcacttccagatgctgtgtgagagcagcaagctgtatgacccaggccagcagtacgcctcccacgtgcgccagctgcagcgggaccaggagcccgatgtgcactacgactttgagccccacgtctccgccaacgcctggtcccccgtcatgcgtgcccggaagagcagcttcaacgtgagtgatgtggcgcggccggaggctgccgggagccccccagaagaaggcgggtgcactgagggcacacctgccaaggaccacagggccgggcgaggacaccaggttcacaagtcatggccgctctcgatctcagactcggacagtgggctggaccccggccctggcgcaggggactttaagaagttcgagcggacgtcatccagtggtaccatgtcgtccacggaggagctggtggacccagacggtggagccggggcttcagcctttgagcaggctgacctcaacggcatgacccccgagctgccggtggccgtgcccagtggaccgttccgccacgaggggctgtccaaggcggcccgtactcaccggctccggaagctccgcacgcccgccaagtgccgcgagtgcaacagctacgtctacttccagggtgctgagtgtgaagagtgctgcctggcctgccacaagaaatgtctggagacgctggccatacagtgcgggcacaagaagctgcaaggccgcctgcagctgttcggccaggacttcagccacgcggcccgcagcgcccccgacggcgtgcccttcatcgtcaagaagtgcgtctgcgagatcgagcggcgggcgctgcgcaccaagggcatctaccgggtcaatggggtaaagacacgcgtggagaagctgtgccaggccttcgagaacggcaaggagctggtcgagctgtcgcaggcctcgccccacgacatcagcaacgtcctcaagctctacctgcgtcagcttcccgagccgctcatctccttccgcctctaccacgagctcgtagggctggccaaggacagcctgaaggcagaggccgaggccaaggcggcgtcccggggccggcaggacggctcggagagcgaggcagtggcggtggccctggcaggtcggctgcgggagctcctgcgggacctgccgcctgagaaccgggcctcgctgcagtacctgctgcgtcacctacgcaggatcgtggaggtggagcaggacaacaagatgacccccatgaggctccgtggcgggcggatgacactgggctcctgcagggaaaggcagccggaattcgtgtgagctggggtggggctgggaccacaggtggcttctctcttgcctgctcctgtccctccagcacgtcccctgcaccacggcatagcttaggtgcgccgtcctggggtcgctgccgagagcgcctggacttcgacgtcccaccagcgggcgcctcctcccagaggcttccaggagcacgagggccttgcggcacaggactgtgccctgtgctgtcccctgcaccccggctcagctgagctggggaacactgctgtcgtgtgaagtcacagtggccttgttggtgcccacagggctgtgtggatggaggaagctgtccctgcccagtgcatcccccaggtcatcacggggacgcaggaggcaggccctgccctgccctctcctcacaggtctgttgca

SEQ ID NO: 13707 - DNA, 4191 bp, Homo sapiens
  source 1..4191: mol_type = unassigned DNA
tcccgaagcggccagcgccgggagctgcagcgctgagacccccagcccgccccctcgggctcccggccggggccccatcatgttctccaggaagaaacgagagctcatgaaaaccccttccatctcgaaaaagaaccgcgcgggaagccccagcccgcagccctcggggccccacttcatttctggggaaactgaggccgtgtccaggccggaaaatccctttaacgagctcccctcggacctgcccaaggagctgcccaggaaggatggggctgacgcggtgttccccggaccaagcctggagccgcccgctgggtcctccggcgtcaaggccacagggaccctcaagcggcccaccagcctgagccgccacgccagcgcggctggcttccccctgtcgggtgctgcctcctggacactgggccggagccaccggagcccactgacagccgccagcccgggcgagctgcccaccgagggtgccggcccggacgtcgtcgaggacatctcccatctgctggcggacgtggcccgcttcgctgagggccttgagaaacttaaggagtgtgtgttgcgtgacgacctccttgaggcccgccgcccgcgggcccacgagtgcctgggtgaggctctgcgtgtcatgcatcagatcatctccaagtacccgctgctgaacaccgtggagacgctcaccgcagccggcaccctcattgccaaggtcaaagccttccattatgagagcaacaatgatctggagaaacaggagttcgagaaggccctggagacgattgctgtggccttcagtagcacagtgtccgagttcctcatgggtgaagtggacagcagcaccctcctagcagtgcctcctggggactcgagccagtccatggaaagcctgtatggaccgggcagtgagggcacgcctcccagcctggaagactgtgacgccggctgcctgcccgccgaggaggtggacgtgctgctacagcgctgtgaggggggcgtggatgccgcactgctgtatgccaagaacatggccaagtacatgaaggacctcatcagctacctggagaagcggacgacgctggagatggagtttgccaagggcctgcagaagatcgctcacaactgcagacagagcgtcatgcaggagccccacatgccgctcctgtccatctactcgctggccctggagcaggacctggagttcggccacagcatggtgcaggcggtgggcaccttgcagacccagaccttcatgcagcccctgaccctgcggcggcttgaacacgagaagcgcaggaaggagatcaaggaggcctggcaccgtgcccagaggaagctgcaagaggcggagtccaacctgcgcaaggccaagcagggttacgtgcagcgctgcgaggaccacgacaaggctcgcttcctcgtggccaaggcggaggaggagcaggctggcagcgcgccgggagcaggcagcacggccaccaagaccctggacaagcggcggcggctggaggaggaggccaagaacaaggcggaggaagctatggccacctaccgcacctgcgtggccgacgcgaagacgcagaagcaggagctggaggataccaaggtgacggcgctgcggcagatccaggaggtcatccggcagagcgaccaaaccatcaagtcggccacgatctcctactaccagatgatgcatatgcagacggcgccgctgcccgtgcacttccagatgctgtgtgagagcagcaagctgtatgacccaggccagcagtacgcctcccacgtgcgccagctgcagcgggaccaggagcccgatgtgcactacgactttgagccccacgtctccgccaacgcctggtcccccgtcatgcgtgcccggaagagcagcttcaacgtgagtgatgtggcgcggccggaggctgccgggagccccccagaagaaggcgggtgcactgagggcacacctgccaaggaccacagggccgggcgaggacaccaggttcacaagtcatggccgctctcgatctcagactcggacagtgggctggaccccggccctggcgcaggggactttaagaagttcgagcggacgtcatccagtggtaccatgtcgtccacggaggagctggtggacccagacggtggagccggggcttcagcctttgagcaggctgacctcaacggcatgacccccgagctgccggtggccgtgcccagtggaccgttccgccacgaggggctgtccaaggcggcccgtactcaccggctccggaagctccgcacgcccgccaagtgccgcgagtgcaacagctacgtctacttccagggtgctgagtgtgaagagtgctgcctggcctgccacaagaaatgtctggagacgctggccatacagtgcgggcacaagaagctgcaaggccgcctgcagctgttcggccaggacttcagccacgcggcccgcagcgcccccgacggcgtgcccttcatcgtcaagaagtgcgtctgcgagatcgagcggcgggcgctgcgcaccaagggcatctaccgggtcaatggggtaaagacacgcgtggagaagctgtgccaggccttcgagaacggcaaggagctggtcgagctgtcgcaggcctcgccccacgacatcagcaacgtcctcaagctctacctgcgtcagcttcccgagccgctcatctccttccgcctctaccacgagctcgtagggctggccaaggacagcctgaaggcagaggccgaggccaaggcggcgtcccggggccggcaggacggctcggagagcgaggcagtggcggtggccctggcaggtcggctgcgggagctcctgcgggacctgccgcctgagaaccgggcctcgctgcagtacctgctgcgtcacctacgcaggatcgtggaggtggagcaggacaacaagatgacccccgggaacctgggcatcgtgttcgggcccacgctgcttcggccacggcccaccgaggccaccgtgtccctctcctccctggtggattatccccatcaggcccgcgtcatcgagactctcatcgtccactacggcctggtcttcgaggaggagccggaggagacccccgggggccaggacgagtcatccaaccagcgagctgaggtagtcgtccaggtgccgtacctggaggcgggcgaggcggtggtctacccgctgcaggaggcggcggcggacgggtgcagagaatcccgagttgtgtccaacgattcggactcggacctagaggaggcctccgagctgctgtcctcatcggaggccagtgccctgggccacctcagcttcctggagcagcagcagagcgaggccagcctagaggtggcttctggcagccacagcggcagtgaggagcagctggaggccacagcccgggaggacggggacggggacgaggacggcccggcccagcagctctcaggattcaacaccaaccagtccaacaacgtgctgcaggccccactgccccccatgaggctccgtggcgggcggatgacactgggctcctgcagggaaaggcagccggaattcgtgtgagctggggtggggctgggaccacaggtggcttctctcttgcctgctcctgtccctccagcacgtcccctgcaccacggcatagcttaggtgcgccgtcctggggtcgctgccgagagcgcctggacttcgacgtcccaccagcgggcgcctcctcccagaggcttccaggagcacgagggccttgcggcacaggactgtgccctgtgctgtcccctgcaccccggctcagctgagctggggaacactgctgtcgtgtgaagtcacagtggccttgttggtgcccacagggctgtgtggatggaggaagctgtccctgcccagtgcatcccccaggtcatcacggggacgcaggaggcaggccctgccctgccctctcctcacaggtctgttgcagggactccagaaaccattctgggagccgtggatgggggcggagctggggtttggtgcagtttccagggtgcagtacagcagggcctgaatactggccctggactcccttttccagaacaccaggtgtggccacctggggctcaggtacacagtggggtctctcggaagccaccgtgtggttctttcacaggcacgtttattttgctgaaataaaaagtttttaatcg

SEQ ID NO: 13708 - DNA, 679 bp, Homo sapiens
  source 1..679: mol_type = unassigned DNA
attcactgggaactaacacccggcgccgctcagacatctctattcccgcctctccgacccggtctcacttcgctcctgggcagctgcgcggagaactggggctcaccgtcatggatgctctatcagaagcaaatggcacatttgcattaaaccttttgaaaaagctaggggaaaacaactcaaacaacttatttttttccccatgagcatatcatcagccttggccatggttttcatgggggcaaagggaaacactgcagctcagatgtctcaggcactttgttttagtaaaatcggaggtgaagatggagatattcatcgaggttttcagtcacttcttgttgcaattaacagaactgacactgaatatgtgcttagaactgccaacgggctctttggagaaaagtcttatgatttcctcacaggttttacagattcctgtggcaaattctaccaagcaacgataaaacagctagactttgtgaatgatacagagaagtccacaacacgtgtaaactcctgggttgctgataaaactaaaggtgaaaatatattgttattctatttcgataatattttaaacagttttatagtcagttctttacaaaactgtcaaatataaaaaggagtccttttttctctaaacaactatgcaaacattaaaacctttctttggaaa

SEQ ID NO: 13709 - DNA, 162 bp, Homo sapiens
  source 1..162: mol_type = unassigned DNA
atggagatattcatcgaggttttcagtcacttcttgttgcaattaacagaactgacactgaatatgtgcttagaactgccaacgggctctttggagaaaagtcttatgatttcctcacaggttttacagattcctgtggcaaattctaccaagcaacgataa

SEQ ID NO: 13710 - DNA, 781 bp, Homo sapiens
  source 1..781: mol_type = unassigned DNA
taggctgcgttggggcctttttttcgcatcctgcttcgtcaggtttataccactttatttggtgtgctgtgttagtcaccatgtctgaaacagtgcctcccgcccccgccgcttctgctgctcctgagaaacctttagctggcaagaaggcaaagaaacctgctaaggctgcagcagcctccaagaaaaaacccgctggcccttccgtgtcagagctgatcgtgcaggctgcttcctcctctaaggagcgtggtggtgtgtcgttggcagctcttaaaaaggcgctggcggccgcaggctacgacgtggagaagaacaacagccgcattaagctgggcattaagagcctggtaagcaagggaacgttggtgcagacaaagggtaccggagcctcgggttccttcaagctcaacaagaaggcgtcctccgtggaaaccaagcccggcgcctcaaaggtggctacaaaaactaaggcaacgggtgcatctaaaaagctcaaaaaggccacgggggctagcaaaaagagcgtcaagactccgaaaaaggctaaaaagcctgcggcaacaaggaaatcctccaagaatccaaaaaaacccaaaactgtaaagcccaagaaagtagctaaaagccctgctaaagctaaggctgtaaaacccaaggcggccaaggctagggtgacgaagccaaagactgccaaacccaagaaagcggcacccaagaaaaagtaaattcagttagaagtttcttctagtaacccaacggctcttttaagagccaccta

SEQ ID NO: 13711 - DNA, 790 bp, Homo sapiens
  source 1..790: mol_type = unassigned DNA
aacctgctctttagatttcgagcttattctcttctagcagtttcttgccaccatgtcggaaaccgctcctgccgagacagccaccccagcgccggtggagaaatccccggctaagaagaaggcaactaagaaggctgccggcgccggcgctgctaagcgcaaagcgacggggcccccagtctcagagctgatcaccaaggctgtggctgcttctaaggagcgcaatggcctttctttggcagcccttaagaaggccttagcggccggtggctacgacgtggagaagaataacagccgcattaagctgggcctcaagagcttggtgagcaagggcaccctggtgcagaccaagggcactggtgcttctggctcctttaaactcaacaagaaggcggcctccggggaagccaagcccaaagccaagaaggcaggcgccgctaaagctaagaagcccgcgggggccacgcctaagaaggccaagaaggctgcaggggcgaaaaaggcagtgaagaagactccgaagaaggcgaagaagcccgcggcggctggcgtcaaaaaggtggcgaagagccctaagaaggccaaggccgctgccaaaccgaaaaaggcaaccaagagtcctgccaagcccaaggcagttaagccgaaggcggcaaagcccaaagccgctaagcccaaagcagcaaaacctaaagctgcaaaggccaagaaggcggctgccaaaaagaagtaggaagctggcgtgtgaaaaccgcaacaaagccccaaaggctcttttcagagccaccca

SEQ ID NO: 13712 - DNA, 732 bp, Homo sapiens
  source 1..732: mol_type = unassigned DNA
catcggcgctttgccacttgtacccgagtttttgattctcaacatgtccgagactgctcctgccgctcccgctgccgcgcctcctgcggagaaggcccctgtaaagaagaaggcggccaaaaaggctgggggtacgcctcgtaaggcgtctggtcccccggtgtcagagctcatcaccaaggctgtggccgcctctaaagagcgtagcggagtttctctggctgctctgaaaaaagcgttggctgccgccggctatgatgtggagaaaaacaacagccgtatcaaacttggtctcaagagcctggtgagcaagggcactctggtgcaaacgaaaggcaccggtgcttctggctcctttaaactcaacaagaaggcagcctccggggaagccaagcccaaggttaaaaaggcgggcggaaccaaacctaagaagccagttggggcagccaagaagcccaagaaggcggctggcggcgcaactccgaagaagagcgctaagaaaacaccgaagaaagcgaagaagccggccgcggccactgtaaccaagaaagtggctaagagcccaaagaaggccaaggttgcgaagcccaagaaagctgccaaaagtgctgctaaggctgtgaagcccaaggccgctaagcccaaggttgtcaagcctaagaaggcggcgcccaagaagaaataggcgaacgcctacttctaaaacccaaaaggctcttttcagagccacca

SEQ ID NO: 13713 - DNA, 777 bp, Homo sapiens
  source 1..777: mol_type = unassigned DNA
catgctgttctgacagtttgagattacttattgtcttttctgggaagacaaaaacatgtcggagactgctccacttgctcctaccattcctgcacccgcagaaaaaacacctgtgaagaaaaaggcgaagaaggcaggcgcaactgctgggaaacgcaaagcatccggacccccagtatctgagcttatcaccaaggcagtggcagcttctaaggagcgcagcggcgtttctctggccgcgcttaagaaagcgcttgcggctgctggctacgatgtagaaaaaaacaacagccgtatcaagcttggcctcaagagcttggtgagcaaaggtactctggtgcagaccaaaggtaccggtgcttctggctccttcaaactcaacaagaaagcggcttccggggaaggcaaacccaaggccaaaaaggctggcgcagccaagcctaggaagcctgctggggcagccaagaagcccaagaaggtggctggcgccgctaccccgaagaaaagcatcaaaaagactcctaagaaggtaaagaagccagcaaccgctgctgggaccaagaaagtggccaagagtgcgaaaaaggtgaaaacacctcagccaaaaaaagctgccaagagtccagctaaggccaaagcccctaagcccaaggcggccaagcctaagtcggggaagccgaaggttacaaaggcaaagaaggcagctccgaagaaaaagtgaaactggcgggacgttcccctttgaaaattttaaacggctcttttcagagccaccca

SEQ ID NO: 13714 - DNA, 785 bp, Homo sapiens
  source 1..785: mol_type = unassigned DNA
agtcccggccagtgcctctgcttccggctcgaattgctctcgctcacgcttgccttcaacatgtccgagactgcgcctgccgcgcccgctgctccggcccctgccgagaagactcccgtgaagaagaaggcccgcaagtctgcaggtgcggccaagcgcaaagcgtctgggcccccggtgtccgagctcattactaaagctgttgccgcctccaaggagcgcagcggcgtatctttggccgctctcaagaaagcgctggcagccgctggctatgacgtggagaagaacaacagccgcatcaagctgggtctcaagagcctggtgagcaagggcaccctggtgcagaccaagggcaccggcgcgtcgggttccttcaaactcaacaagaaggcggcctctggggaagccaagcctaaggctaaaaaggcaggcgcggccaaggccaagaagccagcaggagcggcgaagaagcccaagaaggcgacgggggcggccacccccaagaagagcgccaagaagaccccaaagaaggcgaagaagccggctgcagctgctggagccaaaaaagcgaaaagcccgaaaaaggcgaaagcagccaagccaaaaaaggcgcccaagagcccagcgaaggccaaagcagttaaacccaaggcggctaaaccaaagaccgccaagcccaaggcagccaagccaaagaaggcggcagccaagaaaaagtagaaagttcctttggccaactgcttagaagcccaacacaacccaaaggctcttttcagagccaccca

SEQ ID NO: 13715 - DNA, 725 bp, Homo sapiens
  source 1..725: mol_type = unassigned DNA
catgcttttcgctggttattacatcttgcgtttctctgttgttatgtctgaaaccgtgcctgcagcttctgccagtgctggtgtagccgctatggagaaacttccaaccaagaagcgagggaggaagccggctggcttgataagtgcaagtcgcaaagtgccgaacctctctgtgtccaagttgatcaccgaggccctttcagtgtcacaggaacgagtaggtatgtctttggttgcgctcaagaaggcattggccgctgctggctacgacgtagagaagaataacagccgcatcaaactgtccctcaagagcttagtgaacaagggaatcctggtgcaaaccaggggtactggtgcttccggttcctttaagcttagtaagaaggtgattcctaaatctaccagaagcaaggctaaaaagtcagtttctgccaagaccaagaagctggttttatccagggactccaagtcaccaaagactgctaaaaccaataagagagccaagaagccgagagcgacaactcctaaaactgttaggagcgggagaaaggctaaaggagccaagggtaagcaacagcagaagagcccagtgaaggcaagggcttcgaagtcaaaattgacccaacatcatgaagttaatgttagaaaggccacatctaagaagtaaagagctttccgggaggccaatttggaaagaacccaaaggctcttttaagagccaccca

SEQ ID NO: 13716 - DNA, 477 bp, Homo sapiens
  source 1..477: mol_type = unassigned DNA
atgtctggtcgcggcaaacaaggcggtaaagctcgcgccaaggctaagactcggtcttctcgtgcaggtttgcagtttcctgtgggccgagtgcaccgcctgctccgcaaaggcaactactccgagcgcgtcggggctggcgcgccggtgtatctcgcggcggtgcttgagtacctgaccgccgagatcctggagctggcgggcaatgcggcccgcgacaacaagaagacccgcatcatcccgcgccacctgcaattggccatccgcaatgacgaggagcttaataaactcttggggcgtgtgaccatcgcgcagggtggcgttttgcctaatattcaggcggtgctgctgcctaagaaaactgagagccatcataaggccaagggaaagtgaagagttaacgcttcatgcactgctgtttttctgtcagcagacaaaatcagcctaacagcaaaggctcttttcagagccacctac

SEQ ID NO: 13717 - DNA, 1615 bp, Homo sapiens
  source 1..1615: mol_type = unassigned DNA
gtgagcttaggccgctggttttggtgatttttgtctgattgcaatgtctggacgtggtaagcaaggaggcaaagctcgcgccaaagcgaaatcccgctcttctcgcgctggtctccagttcccggtgggccgagtgcaccgcctgctccgtaaaggcaactacgcagagcgggttggggcaggcgcgccggtgtacctggcggcggtgttagagtacctgaccgccgagatcctggagctggccggcaacgcggctcgcgacaacaagaagactcgcatcatcccgcgccacttgcagctggccatccgcaacgacgaggagctcaacaaactgctaggccgggtgaccattgctcagggcggcgtccttcctaacatccaggccgtgcttctgcctaagaagaccgagagtcaccacaaggccaagggcaagtgatttgacaggtatctgagctcccggaaacgctatcaaacccaaaggctcttttcagagcccccctaccgtttcaaaggaagagctaacctcactgcttgtaggtagaaggaaaaaaggcactaaggttgcaaaagcttctcatttcagagagatgccaggatcctaagtgcctgccaaacttaccaattctaaggaataagtggatggatggcattactgattcctacattactgattgattctgcatccgcaaattgttttattaaaaacattctacatcatgtgtggggagataaggaggataaaatgaagagaaagaatattattgaggggaagttcttctgaatacaaaatgtgtttaattttttaaataagtattacattcacagggttcaaactatttgaagtaaagagattatatataaagaatccatccctcaacttacccaggtggtcacttttctttttcttgtgtatctgcccagtattcattcctgctgatatcagtcaataatgaatgatacgtgttttcttcacttttttcattcttgtcaggtagcagactgtgtagacttttctgcacttgcccttttcataacaatctatcttggagaactttccctatgagaacatacagagcttcctgtacacagttgcatgtactgcattatgcaaatgcattatattttatgtaacctgtccactgttggtaggcacttgagttgttttagtcttttgctatcaaacagttctgggatgattaaccctgatttactgcaaaattgaaattgctctgctattctgctggaatggtggtaagtgaactgaaaattccagtcactcttgggctagactcaacgttcttaaaaactatgtggccatcaccaaattagttattttgaaccttaatttcttcacctctaaaatggaggtaatacttaccttaagtggctatgagaatgaagatcatgtgtatgaattgttggtgctctaaagaacagcacaaataaaattattttcaaatttaattttaattgaactatgtgtaatttcttaattttgaaataattttatttgtaatgtgcataatcttatttaatgtataatgtatacattgtaatagaaacagatttcccaaattccagcctggcatgaggtaataaaaggtaatgcaaaggg

SEQ ID NO: 13718 - DNA, 546 bp, Homo sapiens
  source 1..546: mol_type = unassigned DNA
aaagcggccatgttttacatatttcttgattttgtttgttttctcgtgagcttaggccgctggttttggtgatttttgtctgattgcaatgtctggacgtggtaagcaaggaggcaaagctcgcgccaaagcgaaatcccgctcttctcgcgctggtctccagttcccggtgggccgagtgcaccgcctgctccgtaaaggcaactacgcagagcgggttggggcaggcgcgccggtgtacctggcggcggtgttagagtacctgaccgccgagatcctggagctggccggcaacgcggctcgcgacaacaagaagactcgcatcatcccgcgccacttgcagctggccatccgcaacgacgaggagctcaacaaactgctaggccgggtgaccattgctcagggcggcgtccttcctaacatccaggccgtgcttctgcctaagaagaccgagagtcaccacaaggccaagggcaagtgatttgacaggtatctgagctcccggaaacgctatcaaacccaaaggctcttttcagagccccccta

SEQ ID NO: 13719 - DNA, 393 bp, Homo sapiens
  source 1..393: mol_type = unassigned DNA
atgtccggacgcggcaagcaaggcggaaaggcccgagctaaggctaagacccgctcttcgcgggccggactccagttccctgtgggccgcgtacaccgcttgctccgcaagggcaactactccgagcgagtcggggccggcgcgccagtgtatctggcggcggtgttggagtacctgaccgccgagatcctggagctggcgggcaacgccgcccgcgacaacaagaagacccgcatcatcccccgacacctgcagctggccatccgcaacgacgaggagctaaacaagttgctgggtaaagtcacaattgctcagggcggtgttctgcccaacatccaggctgtactgctccccaagaagactgagagtcaccacaaggccaagggcaagtaa

SEQ ID NO: 13720 - DNA, 547 bp, Homo sapiens
  source 1..547: mol_type = unassigned DNA
cagtggattgttagttcttctgctgttaggaagccactatgtctggacgtggaaagcaaggcggcaaagctcgggcaaaagctaaaacgcgttcttccagggccggtcttcagtttccagttggccgtgtgcaccgcctcctccgcaaaggcaactactccgaacgagtcggggccggcgctccagtgtacctggcagcggtgctggaatatctgacggccgagatcttagagctagctggcaacgcggctcgcgacaataagaagacccgcatcatcccgcgccacctgcagctagccatccgcaacgacgaggagctaaataagcttctaggtcgcgtgaccatcgcgcagggcggtgtcctgcccaacatccaggccgtattgctgcctaagaagacggagagccaccataaggccaagggcaagtgaaatgattactagtcaaatccgtcagtgatcccgagtcccagaaaccaaaggctcttttcagagccacccaccttttctgtaaagtgctggaatacacatacgatgcctgaaatctc

SEQ ID NO: 13721 - DNA, 531 bp, Homo sapiens
  source 1..531: mol_type = unassigned DNA
cttttcgcgcccagtagaggctataaaatgtacgtttttctagtttcacttcagtctttcttgaccgtatagataataggccttttgccatgtctgggcgtggcaagcagggaggcaaagctcgcgccaaggccaagacccgctcttctcgggccgggcttcagtttcccgtaggccgagtgcatcgcctgctccgcaaaggcaactatgcggagcgggtcggtgctggagcgccggtgtacctggcggcggtgctggagtacctgaccgccgagatcctggagctggctggcaacgcggcccgcgacaacaagaagactcgcatcatcccgcgtcacctccagctggccatccgcaacgatgaggagctcaacaagcttctgggcaaagtcaccatcgcacagggtggcgtcctgcccaacatccaggccgtgctactgcccaagaagaccgagagccaccacaaggcgaagggcaagtagaagcctggattagtttgcagcaactcaatcccaaaggaaccaaaggctc

SEQ ID NO: 13722 - DNA, 496 bp, Homo sapiens
  source 1..496: mol_type = unassigned DNA
cttttcgcgcccagtagaggctataaaatgtacgtttttccaatttcatttcagtctttcttgaccgtaaaggtaatagaccttttgccatgtctgggcgtggtaagcagggaggcaaagctcgcgccaaggccaagacccgctcttctcgggccgggcttcagtttcccgtaggccgagtgcatcgcctgctccgcaaaggcaactatgcggagcgggtcggtgctggagcgccggtgtacctggcggcggtgctggagtacctgaccgccgagatcctggagctggctggcaacgcggcccgcgacaacaagaagactcgcatcatcccgcgtcacctccagctggccatccgcaacgatgaggagctcaacaagcttctgggcaaagtcaccatcgcacagggtggcgtcctgcccaacatccaggccgtgctgctgccaaagaaaactgagagccaccacaagactaagtaaagaccgagttgaaaagcgca

SEQ ID NO: 13723 - DNA, 460 bp, Homo sapiens
  source 1..460: mol_type = unassigned DNA
atgtcgggacgtggcaagcagggcggcaaagctcgcgccaaggctaagacccgttcttcaagggcgggtcttcagttcccagtgggccgagtgcaccgactgctccgcaagggcaactacgctgagcgggtcggtgccggagcgccggtgtacctggcggcggtgttggagtacctaaccgccgagatcctggaactggctggcaacgcggcccgcgacaacaagaagacccgcatcatcccgcgccacttgcagctggccatccgcaacgacgaggagctcaacaagctgcttggtaaagtgaccatcgcccagggtggtgtcctgcccaatatccaggccgtgctgctgcctaagaaaactgagagccaccacaaggccaagggcaagtagcggggctggagcagttcattactcatacctcggtccaaaccaaaaaggttcttttcagagccaccta

SEQ ID NO: 13724 - DNA, 573 bp, Homo sapiens
  source 1..573: mol_type = unassigned DNA
cacagctttattttcgcgcccagtattgactataagtagtggagctctggtgaacttctctcggctgttctcagttcctccatttatcgtttcttcgtcatgtcgggacgcggcaagcagggaggcaaagctcgcgccaaagccaagacccgctcttctcgtgccggtctccagttccccgtgggccgagtgcaccgactgctccgcaagggcaactatgctgagcgggtcggggccggcgcgccggtgtacctggcggcggtgctggagtacctgactgccgagatcctggagctggcgggcaacgccgcccgcgacaacaagaagacccgcattatcccgcgccacttgcagctggccatccgcaacgacgaggagctcaacaagctgctgggcaaagtaaccatcgctcagggtggtgtcctgcccaacatccaggctgtgctactgcccaagaagaccgagagtcaccacaaggccaaaggcaaataatgtctccatagaatcactttccaatacaacggctcttttcagagccacctactatttctgcgggagagctgggccactggt

SEQ ID NO: 13725 - DNA, 487 bp, Homo sapiens
  source 1..487: mol_type = unassigned DNA
actcactttctgacttaggccacaggtcgttttaccatgtctggacgtggcaagcagggcggcaaggctcgcgccaaggccaaaacccgctcctctagagctgggctccaatttcctgtaggacgagtgcaccgcctgctccgcaagggcaactacgctgagcgggtcggggccggcgcgccggtttacctggcggcggtgctggagtacctaactgccgagatcctggagctggcgggcaacgcagcccgcgacaacaaaaagacccgcatcatcccgcgccacttgcagctggccatccgcaacgacgaggagctcaacaagctgcttggtaaagttaccatcgctcagggcggtgttctgcctaacatccaggccgtactgctccccaagaagactgagagccaccacaaagctaagggcaagtaagggctgaactttaaaaatgtaaacttacaagacaaaaggctcttttcagagccaccca

SEQ ID NO: 13726 - DNA, 437 bp, Homo sapiens
  source 1..437: mol_type = unassigned DNA
atgccggaggtgtcatctaaaggtgctaccatttccaagaagggctttaagaaagctgtcgttaagacccagaaaaaggaaggcaaaaagcgcaagaggacccgtaaggagagttattctatttacatctacaaagtgctaaagcaggtccatccggacactggcatctcttcgaaagctatgagcattatgaattccttcgtcactgatatctttgagcgtatagcgagcgaggcatcacgtttggctcactacagcaagcgctccaccatttcttccagagagattcagacagcagtgcgcttgctactgccgggagagctggctaaacatgctgtgtctgagggcaccaaggctgtcactaagtacaccagctccaagtaagcctgctaagtaaacgtcatttctaacccaaaggctcttttcagagccactta

SEQ ID NO: 13727 - DNA, 431 bp, Homo sapiens
  source 1..431: mol_type = unassigned DNA
atgcctgaaccctctaagtctgctccagcccctaaaaagggttctaagaaggctatcactaaggcgcagaagaaggatggtaagaagcgtaagcgcagccgcaaggagagctattctatctatgtgtacaaggttctgaagcaggtccaccccgacaccggcatctcatccaaggccatggggatcatgaattccttcgtcaacgacatcttcgagcgcatcgcgggcgaggcttctcgcctggctcactacaataagcgctcgaccatcacctccagggagattcagacggctgtgcgcctgctgctgcctggggagctggctaagcatgctgtgtccgagggcactaaggcagttaccaagtacactagctctaaataagtgcttatgtaagcacttccaaacccaaaggctcttttcagagccaccta

SEQ ID NO: 13728 - DNA, 647 bp, Homo sapiens
  source 1..647: mol_type = unassigned DNA
gacacatttctggtgttttaagatgcctgagccagccaagtctgctcccgccccgaagaagggctccaagaaggcagtgaccaaagcgcagaagaaagatggcaagaagcgcaagcgcagccgcaaggagagttactctgtgtacgtgtacaaggtgctgaaacaggtccatcccgacactggcatctcttccaaggccatgggcatcatgaattctttcgttaacgacatatttgagcgcatcgcgggcgaggcttcccgcctggcgcattacaacaagcgctcgaccatcacctccagggagatccagacggccgtgcgcctgctgcttcccggagagctggccaagcacgccgtgtcggagggcaccaaggccgtcaccaagtacaccagctccaagtaaacattccaaggggagacaacagcttttagacatatcttttccaacagtcgtcactgctggacactgtttcatcttgcaaataaaccaatgaaaatgagtgatcctagaagaagataaatggaggtattttgaacaatcaaagaaggacaaatgaacacctggctgagaaaaattagctcttttttctatgcataaaactattaaaatattcttcatagaaatttatgacacaggaaacataaag

SEQ ID NO: 13729 - DNA, 571 bp, Homo sapiens
  source 1..571: mol_type = unassigned DNA
gacacatttctggtgttttaagatgcctgagccagccaagtctgctcccgccccgaagaagggctccaagaaggcagtgaccaaagcgcagaagaaagatggcaagaagcgcaagcgcagccgcaaggagagttactctgtgtacgtgtacaaggtgctgaaacaggtccatcccgacactggcatctcttccaaggccatgggcatcatgaattctttcgttaacgacatatttgagcgcatcgcgggcgaggcttcccgcctggcgcattacaacaagcgctcgaccatcacctccagggagatccagacggccgtgcgcctgctgcttcccggagagctggccaagcacgccgtgtcggagggcaccaaggccgtcaccaagtacaccagctccaagtaaacattccaagtaagcgtcttaacacctaaccccaaaggctcttttaagagccacccagatacccactaaaagagctgtggccagacgccaaattttatttggcggcggaggggtattagaatataggaactggagaggggtggggacaagtgttgcagcttagagagg

SEQ ID NO: 13730 - DNA, 789 bp, Homo sapiens
  source 1..789: mol_type = unassigned DNA
agtgttctaactattaacgctacgatgcctgaacctaccaagtctgctcctgccccaaagaagggctccaagaaggcggtgactaaggctcagaagaaggacgggaagaagcgcaagcgcagccgcaaggagagctattcagtgtatgtgtacaaggtgctgaagcaggtccatcccgacaccggcatctcttccaaggcaatggggatcatgaattccttcgtcaacgacatcttcgagcgcatcgcaggcgaggcttcccgcctggcgcattacaacaagcgctcgaccatcacctccagggagatccagacggccgtgcgcctgctgcttccgggggagctggccaagcacgccgtgtcggagggcaccaaggccgtcaccaagtacaccagttccaagtaactttgccaagggagagacatgaagacagaggagaaatgaatgcataaaataactgataatatgaatctatacatagaacttaggaagtctcatctgcctgaaaatgactgtgtggatcccacccaaatccaactcatcctggtttgctgcacactggttcatcaaaagaaggttaccgaggggaaggaactaaaggtgtttgcacttcatgttactttttgagtttataaacataaaaacagaatttacttctgttacagacctagttactgggaattcattacttgccatggactacctttgctaagaaaagtctgaatgagaagatggcaggacgtctgaaaaaaaaagttataattaataaaatctgcggagaattgtaaa

SEQ ID NO: 13731 - DNA, 523 bp, Homo sapiens
  source 1..523: mol_type = unassigned DNA
gattattttctcaggtgtttgcaacagtgttctaactattaacgctacgatgcctgaacctaccaagtctgctcctgccccaaagaagggctccaagaaggcggtgactaaggctcagaagaaggacgggaagaagcgcaagcgcagccgcaaggagagctattcagtgtatgtgtacaaggtgctgaagcaggtccatcccgacaccggcatctcttccaaggcaatggggatcatgaattccttcgtcaacgacatcttcgagcgcatcgcaggcgaggcttcccgcctggcgcattacaacaagcgctcgaccatcacctccagggagatccagacggccgtgcgcctgctgcttccgggggagctggccaagcacgccgtgtcggagggcaccaaggccgtcaccaagtacaccagttccaagtaactttgccaagtaagcatctttacacctaatcccaaaggctcttttaagagccacgcatgttttcaataaatgagttgtaatcatttcattcaa

SEQ ID NO: 13732 - DNA, 497 bp, Homo sapiens
  source 1..497: mol_type = unassigned DNA
caaattccgaggatcaggagatgtagatttcattttctttcctaactgcagaacagcaaagatagcatgcctgagccagcgaaatccgctcccgccccgaagaagggctccaagaaggccgtgaccaaggcgcagaagaaggacggcaagaagcgcaagcgcagccgcaaggagagctactccgtatacgtgtacaaggtgctgaaacaggtccaccccgacaccggcatctcctctaaagccatggggatcatgaattcctttgtcaacgacatcttcgagcgcatcgccggcgaggcttcccgcctggcgcattacaacaagcgctcgaccatcacctccagggagatccagacggccgtgcgcctgctgcttcccggggagctggccaagcacgctgtgtcagagggcaccaaggccgttaccaagtacaccagctccaagtaaacttgtccctgcaactgccttagtaaacccaaaggctcttttcagagcca

SEQ ID NO: 13733 - DNA, 1195 bp, Homo sapiens
  source 1..1195: mol_type = unassigned DNA
gcatttctctttaggttgtggacgaagtgtttatttatcatgcctgaacctgctaagtccgctcctgctccaaaaaagggctccaaaaaggcggtgaccaaggcgcagaagaaggatggtaagaagcgcaagcgtagccgcaaggagagctattccgtgtacgtgtacaaggtgctaaagcaggtccaccccgacaccggcatctcatccaaggccatgggcatcatgaactccttcgtcaacgatatcttcgagcgcatcgctggcgaggcttcccgcctggcgcattacaacaagcgctccaccatcacctccagggagatccagacggccgtacgcctgctgctgcccggggagctggctaagcacgccgtgtcagagggcaccaaggccgtcaccaagtacaccagctctaagtaattctaacgtcttcatacccaatcccaaaggctcttttaagagccacccactttttcagctatagagttgtaattacctgcatattttccgtgtttaccaccaacaggtttggttttatcctcatttgagggggttgctgctgtgtaggtctagaccacagttcttttgactggttgaaggaaaatgctatacttaaccgtagcatgtttgttttaccccaagtgctggttagaaggctagcccattgtgctgataagcacatttttcttatgttgtgctgtgatgtgtcccttgtcaaattggtttcataagaaaagaacttttgaaatatctcttttgctactgacatagtgtgagggaaaggaatgtcttccttaattccggtttagtcatcgcagcattggcgaatttagctggttaaaataatgtaatcaaattctttaaaatataaggaaagcaagacaagtaatgtgcatgaaaactgaaaaaatgtgaacacccgagcctggatgcagcactaataatcaacattgttcttggtttagttaaagaaaatttggccactggcaaaataccatttgggagtaatgagacacacccctaatcctaaaatattttcttgtcacttcctcaaagttgtttttgactttttttccttcagggttgacttcatatgtgttcattttattctaataagcaaaagttgtaatttttaagtgaaaaaataatttatgtcattctacttacaaatacaatttttctattctatatactc

SEQ ID NO: 13734 - DNA, 445 bp, Homo sapiens
  source 1..445: mol_type = unassigned DNA
catgcctgaaccagctaagtcagctcctgctccgaagaagggttccaagaaggctgtgaccaaggcgcagaagaaggatggcaagaagcgcaagcgcagtcgtaaggagagctactccgtgtatgtgtacaaggtgctaaaacaggttcaccccgatactggcatctcatccaaggccatgggcatcatgaattccttcgttaacgacatcttcgaacgcatcgcaggcgaggcttcccgtctggcccactacaacaagcgctcgaccattacctccagggagatccagaccgccgtgcgtctgctgcttcccggagagctggccaagcacgcagtgtccgaaggtaccaaggctgtcaccaagtatacaagctccaagtaaatgtgtgcttaggtgctttaaaactcaaaggctcttttcagagccactcaagtctcacataaa

SEQ ID NO: 13735 - DNA, 425 bp, Homo sapiens
  source 1..425: mol_type = unassigned DNA
atgcctgatccagctaagtccgctcccgccccgaagaagggctccaagaaggcggtgaccaaggcgcagaagaaggatggcaagaagcgtaaacgcagccgcaaggagagctactccgtatacgtttacaaggtgctgaagcaagtccaccccgacaccggcatctcctccaaagccatggggatcatgaattcctttgtcaacgatatcttcgagcgcatcgccggcgaggcttcccgcctggctcattacaacaagcgttcgaccatcacctccagggagatccagacagccgtgcgcctgctgctgcctggggaactggccaagcacgccgtgtccgagggcactaaggccgtcaccaagtacaccagctccaaataaatggacgcatgttcaaacccaaaggctcttttcagagccactta

SEQ ID NO: 13736 - DNA, 479 bp, Homo sapiens
  source 1..479: mol_type = unassigned DNA
gcgtttgggctcaccagcattttcctgtggtcatttgacggtatcacttcggctgcgaacatgcctgaaccagctaagtcagctcccgccccgaagaagggctccaagaaggcggtgaccaaggcacagaagaaggatggcaagaagcgcaagcgcagccgcaaggagagctattccgtgtacgtgtacaaggtgctgaagcaggtccaccccgacaccggcatctcgtccaaggctatggggattatgaactccttcgtcaacgacattttcgagcgcattgcaggcgaggcttcccgcctggcgcattataacaagcgctcgaccatcacttccagggagatccaaacggctgtgcgcctgctgctacccggggagctggccaaacacgcggtgtcggagggcaccaaggcggtcaccaagtacaccagctccaagtaaactagttacctgggtaaaagcgctaacgacccaaaggc

SEQ ID NO: 13737 - DNA, 453 bp, Homo sapiens
  source 1..453: mol_type = unassigned DNA
ttggttttgccactattgtttcattatgcccgagctggccaagtctgctcccgccccgaagaagggctccaagaaggcggtgaccaaggcccagaagaaggatggcaagaagcgcaagcgcagccgcaaggagagctactccgtgtacgtgtacaaggtgctgaagcaggtccaccccgacaccggcatctcttctaaggccatgggaatcatgaactccttcgtcaacgacatcttcgagcgcatcgcaagcgaggcttcccgcctggcgcactacaacaagcgctcgaccatcacctccagggagatccagaccgccgtgcgcctgctgcttccgggggagctggccaagcacgcggtgtcggagggcaccaaggccgtcaccaagtacaccagctccaagtaaattctcaagctcttgtccaacccaaaggctcttttcagagccactca

SEQ ID NO: 13738 - DNA, 446 bp, Homo sapiens
  source 1..446: mol_type = unassigned DNA
atgcctgaaccagtcaaatctgctccagtccctaaaaaaggctccaagaaggccattaacaaggctcagaagaaggatggaaagaagcgcaaacgcagccgcaaggagagctactctgtgtatgtgtacaaggtgctgaagcaggtccaccccgacaccggcatctcttccaaggctatgggaatcatgaactccttcgtcaacgacatctttgagcgtatcgccggagaagcgtcacgcctggcgcattacaacaagcgctcgaccatcacttcgagggagatccagacggccgtgcgcctactgctacccggggaattggccaagcacgccgtgtccgagggcaccaaggccgtcaccaagtataccagctccaagtgagcctctcgctgcagtaacagttccgccgtgacccacaccccaaaggctcttttcagagccgtcca

SEQ ID NO: 13739 - DNA, 449 bp, Homo sapiens
  source 1..449: mol_type = unassigned DNA
atgcccgagccctcaaagtccgctcctgccccgaagaaaggctccaagaaggcagtgacaaaggcccagaagaaggacggcaagaagcgcaagcgcagccgcaaggagagctactccgtgtacgtgtacaaggtgctgaagcaggtccaccccgacaccggtatctcgtccaaggccatgggcatcatgaactccttcgtcaatgacatcttcgagcgcatcgccggcgaggcttcccgcctggcgcattacaacaagcgctcgaccatcacctccagggagatccagacggccgtgcgcctgctgctgccaggggagctggccaagcacgcggtgtcggagggcaccaaggccgtcaccaagtacaccagttccaagtgagcccgcccaccgcggaacgttcggtcagtctcggcccacaccccaaaggctcttttcagagccactca

SEQ ID NO: 13740 - DNA, 707 bp, Homo sapiens
  source 1..707: mol_type = unassigned DNA
acgcacaacttcattctctaccccacttgcgttaagaagcagtgaataagcggtaggttgacagagctaccgtcttcctgtttttttcctccaattttccggcagttactcccagtcatgcccgagccctcaaagtccgctcctgccccgaagaaaggctccaagaaggcagtgacaaaggcccagaagaaggacggcaagaagcgcaagcgcagccgcaaggagagctactccgtgtacgtgtacaaggtgctgaagcaggtccaccccgacaccggtatctcgtccaaggccatgggcatcatgaactccttcgtcaatgacatcttcgagcgcatcgccggcgaggcttcccgcctggcgcattacaacaagcgctcgaccatcacctccagggagatccagacggccgtgcgcctgctgctgccaggggagctggccaagcacgcggtgtcggagggcaccaaggccgtcaccaagtacaccagttccaagtgagcccgcccaccgcggaacgttcggaagagaaaaagaagattcacagagagcattaagaaggcccatggattcagaaagctcaagatttggctaaaattaagagtcagcaaccaatctccagatgacatttatattgcaagagattgaatgcagaaagaagaattcagctttcttttattaaacaaggcattagagagatttgcaaaatt

SEQ ID NO: 13741 - DNA, 467 bp, Homo sapiens
  source 1..467: mol_type = unassigned DNA
attcttgttatttgagtgctctttcactctcctccgccatgcccgacccggctaaatctgctcctgcccccaaaaagggctccaagaaagccgtaaccaaggcccagaaaaaggacggcaagaagcgcaagcgcagccgcaaagagagttactctatctacgtgtacaaggtgctgaagcaagtccaccccgacaccggcatctcatcgaaggccatgggcatcatgaactccttcgtcaatgacatctttgagcgcatcgctggcgaggcttcccgcctggcgcattacaacaagcgctcgaccatcacctccagggagatccagacggccgtgcgcctgctgctgcccggggagctggccaagcacgccgtgtccgagggcacaaaggccgtcaccaagtacaccagctccaagtgagctctcgcagctgccagcaatccaaaggctcttttcagagccactcac

SEQ ID NO: 13742 - DNA, 469 bp, Homo sapiens
  source 1..469: mol_type = unassigned DNA
atggctcgcactaagcaaactgctcggaagtctactggtggcaaggcgccacgcaaacagttggccactaaggcagcccgcaaaagcgctccggccaccggcggcgtgaaaaagccccaccgctaccggccgggcaccgtggctctgcgcgagatccgccgttatcagaagtccactgaactgcttattcgtaaactacctttccagcgcctggtgcgcgagattgcgcaggactttaaaacagacctgcgtttccagagctccgctgtgatggctctgcaggaggcgtgcgaggcctacttggtagggctatttgaggacactaacctgtgcgccatccacgccaagcgcgtcactatcatgcccaaggacatccagctcgcccgccgcatccgcggagagagggcgtgattactgtggtctctctgacggtccaagcaaaggctcttttcagagccaccaccttttc

SEQ ID NO: 13743 - DNA, 472 bp, Homo sapiens
  source 1..472: mol_type = unassigned DNA
atggctcgtactaaacagacagctcggaaatccaccggcggtaaagcgccacgcaagcagctggctaccaaggctgctcgcaagagcgcgccggctaccggcggcgtgaaaaagcctcaccgttaccgcccgggcactgtggctctgcgcgagatccgccgctaccaaaagtcgaccgagttgctgattcggaagctgccgttccagcgcctggtgcgagaaatcgcccaagacttcaagaccgatcttcgcttccagagctctgcggtgatggcgctgcaggaggcttgtgaggcctacttggtagggctctttgaggacacaaacctttgcgccatccatgctaagcgagtgactattatgcccaaagacatccagctcgctcgccgcattcgcggagaaagagcgtaaatgtaaagtcactttttcatcagtcttaaaacccaaaggctcttttcagagccacccactt

SEQ ID NO: 13744 - DNA, 459 bp, Homo sapiens
  source 1..459: mol_type = unassigned DNA
atggctcgtacgaagcaaacagctcgcaagtctaccggcggcaaagctccgcgcaagcagcttgctactaaagcagcccgtaagagcgctccggccaccggtggcgtgaagaaacctcatcgctaccgcccgggcaccgtggccttgcgcgaaatccgtcgctaccagaagtccaccgagctgctgatccggaagctgccgttccagcgcctggtgcgagaaatcgcccaggacttcaaaaccgacctgcgtttccagagctctgcggtgatggcgctgcaggaggcttgtgaggcctacctggtgggactcttcgaagacaccaatctgtgcgctattcacgctaaacgcgtcaccatcatgcccaaagatatccagctggcacgtcgcatccgtggggaaagggcataagtctgcccgtttcttcctcattgaaaaggctcttttcagagccactca

SEQ ID NO: 13745 - DNA, 411 bp, Homo sapiens
  source 1..411: mol_type = unassigned DNA
atggctcgtaccaagcagactgctcgcaagtccacgggtgggaaagcgccacgcaagcagctggccaccaaggctgctcgaaagagcgctccagccaccggcggcgtgaagaagccccaccgttaccggcccggcacggtggctctgcgcgagatccgccgctaccagaagtcgaccgagctgctgattcgcaaactgccattccagcgtctagtccgtgagatcgcgcaggacttcaagactgatctgcgttttcagagctcggcggtgatggcgctgcaggaggcctgcgaggcctacctggtggggctgtttgaggacaccaacctatgcgccattcacgccaagcgagtgactatcatgcccaaggacatccagcttgctcgccgcattcgtggggagagggcgtaa

SEQ ID NO: 13746 - DNA, 865 bp, Homo sapiens
  source 1..865: mol_type = unassigned DNA
acttttacatttttgtcttcattgcttaacatcgtttttaagaattcaaaatgtccggacgcggcaagcaaggcggaaaggcccgagctaaggctaagacccgctcttcgcgggccggactccagttccctgtgggccgcgtacaccgcttgctccgcaagggcaactactccgagcgagtcggggccggcgcgccagtgtatctggcggcggtgttggagtacctgaccgccgagatcctggagctggcgggcaacgccgcccgcgacaacaagaagacccgcatcatcccccgacacctgcagctggccatccgcaacgacgaggagctaaacaagttgctgggtaaagtcacaattgctcagggcggtgttctgcccaacatccaggctgtactgctccccaagaagactgagagtcaccacaaggccaaggcagggtttagaagttcgcaatggctcgtaccaagcagactgctcgcaagtccacgggtgggaaagcgccacgcaagcagctggccaccaaggctgctcgaaagagcgctccagccaccggcggcgtgaagaagccccaccgttaccggcccggcacggtggctctgcgcgagatccgccgctaccagaagtcgaccgagctgctgattcgcaaactgccattccagcgtctagtccgtgagatcgcgcaggacttcaagactgatctgcgttttcagagctcggcggtgatggcgctgcaggaggcctgcgaggcctacctggtggggctgtttgaggacaccaacctatgcgccattcacgccaagcgagtgactatcatgcccaaggacatccagcttgctcgccgcattcgtggggagagggcgtaa

SEQ ID NO: 13747 - DNA, 462 bp, Homo sapiens
  source 1..462: mol_type = unassigned DNA
atggcgcgtactaagcagacggctcgtaaatccacaggcggtaaagcaccgcgcaaacagctggccactaaggcagctcgcaagagcgctccggccacgggcggcgtgaagaagccccatcgctaccgccctggcaccgtggctctgcgcgagatccgtcgctaccagaagtctaccgagcttctaatccggaagctgccgtttcagcgcctggtgcgagaaatagctcaggacttcaagaccgacctgcgcttccagagttccgcggtgatggcgctgcaggaggcctgcgaggcctacttggtggggcttttcgaggacaccaacctgtgcgctattcatgccaaacgcgtgaccatcatgcctaaagacatccagcttgcccgccgcattcgtggggagagggcgtgaattgttttgagtacaaaccttaaatccaaaggctcttctcagagccaacca

SEQ ID NO: 13748 - DNA, 466 bp, Homo sapiens
  source 1..466: mol_type = unassigned DNA
ctatggcacgcacgaagcaaacagctcgtaagtccactggcggcaaagccccgcgcaagcagctggccactaaggcggctcgcaaaagcgcgccagccaccggtggcgtgaagaagccccaccgctacaggcctggtactgtcgccctccgtgaaatccgccgctatcagaaatcgactgagctactgattcgcaagctaccattccagcgtctggtacgtgagatcgcgcaggacttcaagaccgacctgcgcttccagagctcggctgtgatggcgctgcaggaggcctgcgaggcttacctggtggggctctttgaggacaccaacctgtgtgctatccacgccaagcgagtgactatcatgcccaaggacatccagctcgctcgccgcattcgcggagagagggcataagttgtactgagggtgtgcgccaacttaaaccaaaggctcttttcagagccacc

SEQ ID NO: 13749 - DNA, 467 bp, Homo sapiens
  source 1..467: mol_type = unassigned DNA
atggcccgcaccaagcagactgcacgcaagtccaccggtggcaaagcgccgcgcaagcagctggccactaaggcggctcggaaaagcgcgccggccaccggcggcgtgaagaaacctcatcgctaccgtcccggcaccgtggctctgcgcgagattcgccgctatcagaagtcgactgagctgctgatccgcaagttgcctttccaacgcctggtgcgagaaatcgctcaggacttcaagacagatctgcgctttcagagttccgcggtgatggccctgcaggaggcctgcgaggcctacttggtggggctctttgaggataccaacctgtgtgccatccatgctaagcgagtgactatcatgcccaaggacattcagctcgctcgccgcattcgtggggagagagcgtagaggtttccgggcagtaattctatccaacttaaaaaggctcttttaagagccgccta

SEQ ID NO: 13750 - DNA, 473 bp, Homo sapiens
  source 1..473: mol_type = unassigned DNA
ctctgaaggcatggcgcgtacgaagcagactgctcgcaagtccaccggcggcaaggctccgcgcaagcagctggccaccaaggcggctcggaagagcgctccggccaccggcggtgtcaagaagccccatcgctatcggcctggtacagtggctctccgcgagattcgccgctaccagaagtccaccgagctgctgatcagaaagctgccttttcagcgtctggtgcgtgagatcgcgcaggacttcaagaccgacttgcgcttccagagctccgcggtgatggcgctgcaagaggcatgcgaggcctacctggtggggctctttgaggacaccaacctgtgcgccatccacgccaagcgggtgactatcatgcccaaggacatccagctcgcacgtcgtatccgcggcgagagggcttgagtctcaaggactcactgattacatacccaaaggctcttttcagagccaccca

SEQ ID NO: 13751 - DNA, 477 bp, Homo sapiens
  source 1..477: mol_type = unassigned DNA
ttagccatggcacgaacaaagcaaacagctcgcaagtccaccggcggcaaagcgccgcgcaagcagctggccaccaaggcggctcgcaagagcgctccggccaccggtggcgtcaagaagccccaccgctaccgccccggcaccgtggccctgcgcgagatccgccgctaccagaagtcgaccgagctgctaatccggaagctaccttttcagcgcttggtacgggagatcgcacaggactttaagaccgatctgcgcttccagagctcggcggtgatggcgctgcaggaggcttgcgaggcctacctggtggggctatttgaggataccaacctgtgcgccattcacgccaaacgcgtcactattatgcctaaagacatccagcttgcgcgccgcatccgaggggagagggcataaatattcctatcagcccaagaagtctgtccaaccccaaaaggctcttttcagagcccctca

SEQ ID NO: 13752 - DNA, 478 bp, Homo sapiens
  source 1..478: mol_type = unassigned DNA
atggcccggacgaagcagacagctcgcaagtctaccggcggcaaggcaccgcggaagcagctggccaccaaggcagcgcgcaaaagcgctccagcgactggcggtgtgaagaagccccaccgctacaggccaggcaccgtggccttgcgtgagatccgccgttatcagaagtcgactgagctgctcatccgcaaactgccatttcagcgcctggtgcgagaaatcgcgcaggatttcaaaaccgaccttcgtttccagagctcggcggtgatggcgctgcaagaggcgtgcgaggcctatctggtgggtctctttgaagacaccaacctctgtgctattcacgccaagcgtgtcactattatgcctaaggacatccagcttgcgcgtcgtatccgtggcgagcgagcataatcccctgctctatcttgggtttcttaattgcttccaagcttccaaaggctcttttcagagccactta

SEQ ID NO: 13753 - DNA, 339 bp, Homo sapiens
  source 1..339: mol_type = unassigned DNA
atgtctggacgtggtaagggcgggaagggtttggctaaagcaaaaacttgttcgtcgctaccgggcttgcagttcccaggcagagtccgtcatctttttcgaaagggcaattattttgagccggtcggagccggtgcgccagtgtacttacaatacctggccgccgagatcttagaactggtgggcagcgccatacgtgacaagacccgcagcatcatcccccgccacctgcagctggccatccgaaacgacgaggaggtcaacaagcagctgggcaacgtcactattgctcagggaggcgtcctgtccaatattcaggccgtcctgttgccaaaataa

SEQ ID NO: 13754 - DNA, 372 bp, Homo sapiens
  source 1..372: mol_type = unassigned DNA
atgtctggacgtggtaagggcgggaagggtttgggtaaggggggtgccaagcgccaccgcaaggtgttgcgtgacaacatccagggcatcaccaagccggccatccggcgtctggcccggcgtggcggtgtgaagcggatctctggtctgatctacgaggagactcgcggggtgctcaaggtgtttttggagaacgtgatccgtgacgctgtcacctatacggagcacgccaagcgcaagacagtcactgccatggacgtggtctacgcgcttaagcgccagggacgcaccctttatggctttggcggttaaggttgctgatttctccacagcttgcatttctgaaccaaaggcccttttcagggccgccca

SEQ ID NO: 13755 - DNA, 357 bp, Homo sapiens
  source 1..357: mol_type = unassigned DNA
atgtctggtcgcggcaaaggcggtaaaggtttgggtaagggaggtgccaagcgtcaccgaaaagtgctgcgggataacatccaaggcatcaccaaaccggccattcggcgccttgctaggcgtggtggggttaagcgaatttccggtttgatttatgaggagactcgtggcgttctcaaggtgtttctggagaacgtgatccgggacgccgtgacctacacggagcacgccaagcgcaagactgtcactgccatggatgtggtttacgcgctcaagcgtcaaggacgcactctgtacggcttcggcggttaatcttttcgtcagttttcttccaatggcccttttcagggccgccca

SEQ ID NO: 13756 - DNA, 415 bp, Homo sapiens
  source 1..415: mol_type = unassigned DNA
ttttcaatcaggtccgccaagtttgtatttaaggaactgtttcagttcataccttccactgcgataggaatcatgtctggtcgcggcaaaggcggaaaaggcttggggaagggtggtgctaagcgccatcgtaaggtgctccgggataacatccagggcattacaaaaccggctattcgccgtttggctcggcgcggtggcgtcaagcgcatttccggtcttatctatgaggagactcgaggtgtgcttaaggttttcttagagaacgttattcgagacgccgtcacctatacggagcacgccaagcgcaaaactgtcacagccatggatgtagtatatgccctaaaacgtcaggggcgcactctgtatggcttcggcggctgaatctaagaatacgcggtctcctgagaacttc

SEQ ID NO: 13757 - DNA, 367 bp, Homo sapiens
  source 1..367: mol_type = unassigned DNA
atgtctggccgcggtaagggcggaaagggtctaggtaagggtggcgccaagcgtcaccgtaaggtattgcgtgacaatatccaaggaatcaccaagcccgctatccgccgcctggctcgccgcggcggcgtcaagcgtatttctggcctcatttatgaggaaactcgcggagtgctgaaagttttcctggaaaatgtaatccgcgatgctgtcacctacacggaacacgccaaacgcaagacagtcacagccatggacgtggtgtacgcgctcaagcgccagggacgcactctttatggcttcggcggctgagcttacctctacagtacactaccgcaaaaccaacggcccttttcagggccaccta

SEQ ID NO: 13758 - DNA, 1409 bp, Homo sapiens
  source 1..1409: mol_type = unassigned DNA
gttggtgtgttggtcatgtctggtcgcggcaaaggcggaaagggactgggtaaaggaggcgctaagcgtcaccgtaaggtcctgcgagataacatccagggcattaccaagcctgccatccggcgccttgctcgtcgcgggggtgtcaagcgcatttctggtctcatctacgaggagactcgcggggttctgaaggtgtttctggaaaacgtgattcgtgatgctgtgacttacacggagcacgccaaacgcaagacagtgacagcgatggatgtggtctacgcgctgaagagacagggacgcactctttacggcttcggcggctaatgctaccgcttaaacgactcagcatctcgacttcccaaatcaaaggcccttttcagggccgcccacagttttccgcaaaagagctcatgacttgttagacgattggttggtctctttataagttaattgttcctgtcaacaggtacgtatatttttcagccgttttttttttttcgttccaaattacatttggggtttcggcatacgattttttaggctacgatccttttatgtttattgtagtagggccttagattgcactgaaaaggctagggtaatagtgtctgtttaccttaccacttttattttgagtacctaaaaatgcatggttttcgacataagtgggaaaaccgcaagacactgcgtaaccgctcaaaatggcggagagcgaagaacaaagccggtgcctggcaatgggccggacccgcgaattagcgcaaccaatcatcttcctggaaaggagtgtgggccttaaattctagcggcctgttttctattacttaacctaacgaccgagtttaggtgtgtagaagttcctggggtagataagctcacgcaaggagaggttgcaagcattcatttcggaattctattaagccaacccagttgtcccttagaagttatgatatttgctgttttttgaataaaagaatttgactctctttaaaccctaaagcttgaaatttagcatttatctcacatgagacaaatgtttaggaactcatgtttaggaactcatgttcctgcctgaggcaggaactgaaacaccagatcacttgcatcgagaccgtgagactccctatgtttcatccatcatgattgcgtccttatccctccctgatttcctgttttctcgcccttctcgctacataagccccccaattttggtcggggagacggatttgtgatttcatctcctccctcatgaatactcatagaatttttccaaacctactgaatctgtatgtaaggttgactctgtaaggcatatatatattccagctccccttcactgccacagagcgctcattccatcctgggattacttctccctctgaaaataaagtctttgttacttcctg

SEQ ID NO: 13759 - DNA, 416 bp, Homo sapiens
  source 1..416: mol_type = unassigned DNA
tcagtctccaaaaaggtccgcataattgatatataaggggcttcagtgtgtagcaaagttgcaaaagttaagagttgttgtttgtcttcgatcatgtctggtagaggcaaaggtggtaaaggtttaggaaagggaggcgccaagcgccatcgcaaagtgctgcgtgacaacatacagggcatcacgaagcccgccatccgtcgcttggcccgacgcggcggcgtgaaacgcatttcgggcctcatttatgaggagacccgcggtgttcttaaggtgttcctggagaatgtgatacgggacgccgtaacctacacggagcacgccaagcgtaagacagtcactgcaatggatgttgtctacgcgctcaagcgccagggacgcactctgtacggctttggtggctgagcctcaccccg

SEQ ID NO: 13760 - DNA, 374 bp, Homo sapiens
  source 1..374: mol_type = unassigned DNA
ggctgcggaaagcgagtaatcgttttgtttagagatagttctgacttgtttatcatgtctgttcggggcaaggccggaaaaggccttgggaaaggcggtgccaagtgccatcgcaaggtactgagcgataatattcagggcattaccaagtgcactatccggcgcttggcccggcatggcggtgtcaagcgcatcttgggcctcatttatgaggagacccgccgggtgttcaaggtgttcctggaaaatgtgatctggtacgccgtgaccaacacggagcacgccaagcgcaagacggtcaccgccatggccgtggtctacgtgctcaaacgccagggaagaaccctgtaaggctttggcggttaagtgaggcc

SEQ ID NO: 13761 - DNA, 1034 bp, Homo sapiens
  source 1..1034: mol_type = unassigned DNA
aggtttcttaagttggttttagaagttgcttagtcatgtctggccgtggtaaaggtggaaaaggtttgggtaagggaggagctaagcgtcatcgcaaggttttgcgcgataacatccagggcatcactaagccagctatccggcgccttgctcgtcgcggcggtgtcaagcgaatttctggccttatctatgaggagactcgtggtgttctgaaggtgttcctggagaacgtgattcgtgacgctgtcacttacacagagcacgccaaacgcaagaccgtgacagcaatggatgtggtctacgcgctgaagcgacagggacgcactctttacggcttcggtggctaaggctcctgcttgctgcactcttattttcattttcaaccaaaggcccttttcagggccgcccacttttttcataaaagagcagacatcttgttatcctgctttgttccagatttttgctgagaagtagttactgtgcacatgtgtagatttgcagttctgtggctcctgatggatctgagaagatggacgtggaggatgaaaatctgtctgattattttgaactgatgtttgttgctatggagatgctgcctatatgttgatgttgcagacgttaagtcactagcccacagccttgtattccatactcagagaccctgctacttacttgacatctcaacttgaaagtccaattaatatgcacttcaaactttaataggcttcaaacagaatttctttcattatctctgcaaaacagcttctctcatcatcttgaaattagtgaatggcattttactgttttagttggagtcatttctgtggttttctttcacatcctacataacaatccatcagtaagttctatgagctcttctttgaaaacaaacagaatccaactgtttcattcccacttctgctctggtcaagccactgccaacactcacctttattattgtagcaccctcattgcctagttctgtcccacagatttccaataaaaggtgaataaaatcaggtcactcttctgct

SEQ ID NO: 13762 - DNA, 397 bp, Homo sapiens
  source 1..397: mol_type = unassigned DNA
ttgcttagtcatgtctggccgtggtaaaggtggaaaaggtttgggtaagggaggagctaagcgtcatcgcaaggttttgcgcgataacatccagggcatcactaagccagctatccggcgccttgctcgtcgcggcggtgtcaagcgaatttctggccttatctatgaggagactcgtggtgttctgaaggtgttcctggagaacgtgattcgtgacgctgtcacttacacagagcacgccaaacgcaagaccgtgacagcaatggatgtggtctacgcgctgaagcgacagggacgcactctttacggcttcggtggctaaggctcctgcttgctgcactcttattttcattttcaaccaaaggcccttttcagggccgcccacttttttcataaa

SEQ ID NO: 13763 - DNA, 1343 bp, Homo sapiens
  source 1..1343: mol_type = unassigned DNA
gaccacttgataatgtcaggacgcggcaaaggaggtaagggcctggggaaagggggtgccaagcgccaccgcaaggtgctgcgcgacaacatccagggtatcaccaagccagccattcggcgccttgctcgccgcggcggcgtgaagcgcatttctggcctcatctatgaggagacccgcggagtgttgaaggtgttcctggagaacgtgatccgggacgccgtgacctacacggagcacgccaagcgcaagacggtcaccgccatggacgtggtctacgcgctcaagcgccagggccgcaccctctatggcttcggcggctaaatggcattttgaagcccagtcattctctaaaaaggccctttttagggcccctaagctttcaacaaaagagttgaaatgactgcaaactgagtctcttaatagggccattgtcagtgagttctgtcatcctattttacaagattaactcgacgccgaaaatgggctgatgactacaggtgaccttgggccgagatttttccaaggccagaagagcctctgctggccagtaacttctggcggctgcctggaaattgcctgcagccggtttaccgctcggattagtttagaaagccaaggggtctgcggtccaaataggggcgggctagataattaacttccctctggaccttcaaatacgtctcaggagataatgagtttgatgggctccactaaatgctagaacctccaggaaaacttcgtggtggctggtttaagaggacttggcgggcacagagctctgcatgggggggagggggacagaccatgcttttactactgtagaacagtagggcagtcttaagagtcttagtaataatattcctttatatgtttgccttttaaatactggaatatatcaagtatacaaaatgcgctggtgaccacaccacttattcaagtgcatctaaaatccttatgtccctttctcagtagcacagccctccctttttcctatctagaattaactaatattctaggataaactgatattctaaatttgtttactgttcccacgcgttttaactttagatgcacatacccctaatctattttaatcgtcatgaatttttacatttgctcttgaaatatatccgtgttgaaatgtgcagttctaggttatttttaccattaatctagttttctaatgtgtcagtaaatactttattcatttctctgttgattttttttcctcattacaaaacagcactgtatacagctgtgcattttctggttacatggaagtggaattatttggtaaatgtgcatattcaacatgaataaaaatgaacaatttgctttcc

SEQ ID NO: 13764 - DNA, 374 bp, Homo sapiens
  source 1..374: mol_type = unassigned DNA
gagactcctcttgctcgtcatgtctggccgcggcaaaggcgggaagggtcttggcaaaggcggcgctaagcgccaccgtaaagtactgcgcgacaatatccagggcatcaccaagccggccatccggcgccttgctcgccgcggcggcgtgaagcgcatctccggcctcatctacgaggagactcgcggggtgctgaaggtgttcctggagaacgtgatccgggacgccgtgacctatacagagcacgccaagcgcaagacggtcaccgccatggatgtggtctacgcgctcaagcgccagggccgcaccctctacggtttcggtggttgagcgtccctttctatcaataaaaggcccttttcagggccaccct

SEQ ID NO: 13765 - DNA, 354 bp, Homo sapiens
  source 1..354: mol_type = unassigned DNA
atgtctggccgcggcaaaggcgggaagggtcttggcaaaggcggcgctaagcgccaccgtaaagtactgcgcgacaatatccagggcatcaccaagccggccatccggcgccttgctcgccgcggcggcgtgaagcgcatctccggcctcatctacgaggagactcgcggggtgctgaaggtgttcctggagaacgtgatccgggacgccgtgacctatacagagcacgccaagcgcaagacggtcaccgccatggatgtggtctacgcgctcaagcgccagggccgcaccctctacggtttcggtggttgagcgtccctttctatcaacaaaaggccctttttagggccccca

SEQ ID NO: 13766 - DNA, 364 bp, Homo sapiens
  source 1..364: mol_type = unassigned DNA
catgtctgggcgcggcaaaggcgggaagggtctgggcaaaggaggcgctaagcgccaccgcaaagttctgcgcgacaacattcagggcatcaccaagcccgccatccgacgcctggcacggcgtggaggcgttaagcgcatctcaggccttatatacgaggagacacgcggagttcttaaagtgtttttggagaatgtaatccgcgatgcagttacctacacggagcacgccaaacgcaagacagtcacagccatggacgtggtttacgcgctcaagcgccagggccgcaccctgtatggctttggcggctgagtgttttacttacttacacggttcctcaaaggcccttctcagggccaccca

SEQ ID NO: 13767 - DNA, 437 bp, Homo sapiens
  source 1..437: mol_type = unassigned DNA
atgtctggtcgtggcaaacaaggaggcaaggcccgcgccaaggccaagtcgcgctcgtcccgcgctggcctccagttcccggtagggcgagtgcaccgcttgctgcgcaaaggcaactacgcggagcgggtgggggccggcgcgcccgtctacatggcggcggtcctcgagtacctgaccgccgagatcctggagctggcgggcaacgcggctcgggacaacaagaagacgcgcatcatccctcgtcacctccagctggccatccgcaacgacgaggaactgaacaagctgctgggcaaagtcaccatcgcccagggcggcgttttgcctaacatccaggccgttctgttaccaaagaaaaccgaaagccacaaagccaaaagcaaataaatgcagacaaacaaaccaagaccaaaggctctttttagagccaccca

SEQ ID NO: 13768 - DNA, 2223 bp, Homo sapiens
  source 1..2223: mol_type = unassigned DNA
acttcttttcttggctaagccgcgtttgtactgtgtcttaccatgcctgaaccggcaaaatccgctccggcccctaaaaagggctccaagaaagccgtcaccaaagcccagaagaaagacggcaagaagcgcaagcgcagccgcaaagagagctactccatctacgtgtacaaggtgctgaagcaggtccaccccgacaccggcatctcgtccaaggccatgggcatcatgaactccttcgtcaacgacatcttcgagcgcatcgcgggagaggcttcccgcctggcgcactacaacaagcgctccaccatcacatcccgcgagatccagacggccgtgcgcctgctgctgcccggcgagctggccaagcacgccgtgtccgagggcaccaaggcggtcaccaagtacaccagctccaagtgagtccctgccgggacctggcgctcgctcgctcgagtcgccggctgcttgactccaaaggctcttttcagagccacccacctaatcactagaaaagagcttgttcacttattcccttagtttcttttcataaagtaagttattttagtgtgaaggtcatgggaaatggcatacgtagctttttaactatttggaactcgaggtccccagtgcgtcattggatttgcttttgaatctagagcgtgtctttactcattgtgctgcttagccttcccaggagtcggttctcaattaggctgttgggaatccgcctctttacccgcccccactcccgccccacacgcgccctggtggctccttgggtctgtttcattctaaaacgaagtggctgagttcggctgtcatttaagagaactccaggacacaattcagcccgggttccgcaaacactgcgtgacagctctgtatgactgacgcttggcagcagcttttgtgtccggtcaccagttctgccgtgcgatggggcctcctgtggataccagccgttctgtgtattttggacgaaggccgcgcagccgggtcccagccttgtcctgattgggcgacaagaatattcaaaattctgcgcctttttctaatttgtagatttcagtttccgtcgttcactttgagactttgaaattcctatttctcattttgttgataatttctgcatttaatggtctgtgctttaaatggtaacgctacggccccaggtcactgcgaggcacttaccatgtagatacgggctcaaaagtcacctctcagagacctacgtcatccactcaggaattcgcgcctctcatacttgcctgtctcattttatcttccttctagcagctgtctgaaattggttcgtctgttttcttgtttatggtattctcaagcccttgacagaccggctagtgtggttttcccgtgcatcttcagcctggcacattatggacacttaaatactacgtattgatctaatattgttgggttaatttttccatcccacccttttcttaatcgcttccgtggatggatgaagggtgctgttcatttccattagatgtatgtgaaggcacagtgaaaatggaaatgttcttggagctacttcctcaaaatgtatccttagtcacctcagtgcaacagctgggagggggccgtgttaagattttttttgctacaaagaggaggtggcaatggtagatccacccttatgcttctcagtttagcataacctcttatggattttcatcaaattcagcgtgttggtcactggaaagagccttttccttctccttttcttactctcccctcatggtgttcccctcttaaaggagaggagcttttaatttacacttaccacctcatttgcttttctggaggccatgcaatataggcgggactacagagttaatctcctttttacaaatgaggccaagagaagcctcattggttcacagtcatgcagctcatactgtccacccttgtattctcagatgcaggacaattgcattttagttttattttgtggaggtgcagaatatttactctttctgtccaacccttgattctgccgaggaagacactgatggtttgatgagtgattcagctgtttttggctaagggcttttggagctgatggcaggggtttgatgaatccaaatgagctctagacattatcacagactgaatagatcttaactgtctcctacatgtgtgttttcaaatgtgtatagatgctattgttattaataaagttaccaattaatttaa

SEQ ID NO: 13769 - DNA, 1656 bp, Homo sapiens
  source 1..1656: mol_type = unassigned DNA
cgccgctgcgctggtaagcctgtgttttggttcgctatggcccgtactaagcagactgctcgcaagtcgaccggcggcaaggccccgaggaagcagctggccaccaaggcggcccgcaagagcgcgccggccacgggcggggtgaagaagccgcaccgctaccggcccggcaccgtagccctgcgggagatccggcgctaccagaagtccacggagctgctgatccgcaagctgcccttccagcggctggtacgcgagatcgcgcaggactttaagacggacctgcgcttccagagctcggccgtgatggcgctgcaggaggccagcgaggcctacctggtggggctgttcgaagacacgaacctgtgcgccatccacgccaagcgcgtgaccattatgcccaaggacatccagctggcccgccgcatccgtggagagcgggcttaagaagtggcggttcggccggaggttccatcgtatccaaaaggctcttttcagagccacccacatcagcacttggaagaagctgtaccgcttgccctccgtgctcctccggcattagagcggggaaggcacttccgcttaggctcccaacaaaacggggtcgggtccccctgctgcggtgccgtcttgagctttgccgacttcggccaattggcctatccgcactggccgggctgcggacgctttcctgggcgccggctcgcgggctttggcggtccggctccccccgcgcgtgaccggggccctgcgtggcgggggggccggggcaggagagacggggcgtcgggcacgaggccaggggtcactagggggacgctcagggctcgcggtcctgagcgcggctggcctttgcggaagtggagcgccacacgcccgtgcttcgcgcccaaaccggcctcacccggcgcggccatccggctagggagggaaatgaccacctcggcctcgccggggttctgcggacaaacgtggggagaactgcgctggggctgccgttcagtccccgcgccacctccactagcacagtggtaacccccatatcctgcccctaagccaaaattcccgggggcacggggtgtgggcggaattttgtgaatctgggctttatcgagccgttccctgtccatgtccacagaaggagattcactattccagtgaaggcactcggtcctcttagaagctgcatggtatgtctggattttctgtccagactcagtagttcctttacgttgttttcgtcggacatgtgggcagacgctggtgcccgagttcagatccttgggaagacagtagatcagacaggaagaacgtgggcctccgttgggcaaatgaagctcttcgccttaggaaatcgtgacaggaggccacagaggtgatctctacagtctctgggagctgggaagtccaaggcctcttagtgggaaagtgaggcagggtcttgcagagcccactctacacacggccagatacaaatggctgtagaggtcttagataacaccttctcggtcatttatttgcacctcagaagaagccagggcttcggttttctgtttgtttcatcacagttgacaggttaaaagcattcactgcagcgatctatgagaattaagaggggagaaggggaaatggaataaaacttcgttttgtaaagct

SEQ ID NO: 13770 - DNA, 481 bp, Homo sapiens
  source 1..481: mol_type = unassigned DNA
atggcccgaaccaagcagactgcgcgcaagtcaacgggtggcaaggcgccgcgcaagcagctggccaccaaggtggctcgcaagagcgcacctgccactggcggcgtgaagaagccgcaccgctaccggcccggcacggtggcgcttcgcgagatccgccgctaccagaagtccactgagctgctaatccgcaagttgcccttccagcggctgatgcgcgagatcgctcaggactttaagaccgacctgcgcttccagagctcggccgtgatggcgctgcaggaggcgtgcgagtcttacctggtggggctgtttgaggacaccaacctgtgtgtcatccatgccaaacgggtcaccatcatgcctaaggacatccagctggcacgccgtatccgcggggagcgggcctaggagggctatctcgccacctgagaggttgcgcaacgttcaccccaaaggctcttttaagagccacccacct

SEQ ID NO: 13771 - DNA, 5327 bp, Homo sapiens
  source 1..5327: mol_type = unassigned DNA
cgaatgttgttgttggtggcggcggcgagcggagccggaggagccgccgcaaagatggaggagccgtcgaggaggtgctgccgccgctgccgccgccgctgctgccgccgccgcccgcgaagccggagctcgagccgcagcggggatgccgttctgagtgcctgactgcctcgccccgaaggatggcctcggatgggcattagaggcacggcggccccgggctcccgtcccgtccgtctgtctgttatcgtctgtctctcttgacatcaccgcagctccaccccctcccgtcccagcccccaacgccagcttcctgcaggcccagagccggcatgaactctcccaacgagtcggcagatgggatgtcaggtcgggaaccatccttggaaatcctgccgcggacttctctgcacagcatccctgtgacagtggaggtgaagccggtgctgccaagagccatgcccagttccatggggggtgggggtggaggcagccccagccctgtggagctacggggggctctggtgggctctgtggaccccacactgcgggagcagcaactgcagcaggagctcctggcgctcaagcagcagcagcagctgcagaagcagctcctgttcgctgagttccagaaacagcatgaccacctgacaaggcagcatgaggtccagctgcagaagcacctcaagcagcagcaggagatgctggcagccaagcagcagcaggagatgctggcagccaagcggcagcaggagctggagcagcagcggcagcgggagcagcagcggcaggaagagctggagaagcagcggctggagcagcagctgctcatcctgcggaacaaggagaagagcaaagagagtgccattgccagcactgaggtaaagctgaggctccaggaattcctcttgtcgaagtcaaaggagcccacaccaggcggcctcaaccattccctcccacagcaccccaaatgctggggagcccaccatgcttctttggaccagagttcccctccccagagcggcccccctgggacgcctccctcctacaaactgcctttgcctgggccctacgacagtcgagacgacttccccctccgcaaaacagcctctgaacccaacttgaaagtgcgttcaaggctaaaacagaaggtggctgagcggagaagcagtcccctcctgcgtcgcaaggatgggactgttattagcacctttaagaagagagctgttgagatcacaggtgccgggcctggggcgtcgtccgtgtgtaacagcgcacccggctccggccccagctctcccaacagctcccacagcaccatcgctgagaatggctttactggctcagtccccaacatccccactgagatgctccctcagcaccgagccctccctctggacagctcccccaaccagttcagcctctacacgtctccttctctgcccaacatctccctagggctgcaggccacggtcactgtcaccaactcacacctcactgcctccccgaagctgtcgacacagcaggaggccgagaggcaggccctccagtccctgcggcagggtggcacgctgaccggcaagttcatgagcacatcctctattcctggctgcctgctgggcgtggcactggagggcgacgggagcccccacgggcatgcctccctgctgcagcatgtgctgttgctggagcaggcccggcagcagagcaccctcattgctgtgccactccacgggcagtccccactagtgacgggtgaacgtgtggccaccagcatgcggacggtaggcaagctcccgcggcatcggcccctgagccgcactcagtcctcaccgctgccgcagagtccccaggccctgcagcagctggtcatgcaacaacagcaccagcagttcctggagaagcagaagcagcagcagctacagctgggcaagatcctcaccaagacaggggagctgcccaggcagcccaccacccaccctgaggagacagaggaggagctgacggagcagcaggaggtcttgctgggggagggagccctgaccatgccccgggagggctccacagagagtgagagcacacaggaagacctggaggaggaggacgaggaagacgatggggaggaggaggaggattgcatccaggttaaggacgaggagggcgagagtggtgctgaggaggggcccgacttggaggagcctggtgctggatacaaaaaactgttctcagatgcccagccgctgcagcctttgcaggtgtaccaggcgcccctcagcctggccactgtgccccaccaggccctgggccgtacccagtcctcccctgctgcccctgggggcatgaagagccccccagaccagcccgtcaagcacctcttcaccacaggtgtggtctacgacacgttcatgctaaagcaccagtgcatgtgcgggaacacacacgtgcaccctgagcatgctggccggatccagagcatctggtcccggctgcaggagacaggcctgcttagcaagtgcgagcggatccgaggtcgcaaagccacgctagatgagatccagacagtgcactctgaataccacaccctgctctatgggaccagtcccctcaaccggcagaagctagacagcaagaagttgctcggccccatcagccagaagatgtatgctgtgctgccttgtgggggcatcggggtggacagtgacaccgtgtggaatgagatgcactcctccagtgctgtgcgcatggcagtgggctgcctgctggagctggccttcaaggtggctgcaggagagctcaagaatggatttgccatcatccggcccccaggacaccacgccgaggaatccacagccatgggattctgcttcttcaactctgtagccatcaccgcaaaactcctacagcagaagttgaacgtgggcaaggtcctcatcgtggactgggacattcaccatggcaatggcacccagcaggcgttctacaatgacccctctgtgctctacatctctctgcatcgctatgacaacgggaacttctttccaggctctggggctcctgaagaggttggtggaggaccaggcgtggggtacaatgtgaacgtggcatggacaggaggtgtggacccccccattggagacgtggagtaccttacagccttcaggacagtggtgatgcccattgcccacgagttctcacctgatgtggtcctagtctccgccgggtttgatgctgttgaaggacatctgtctcctctgggtggctactctgtcaccgccagatgttttggccacttgaccaggcagctgatgaccctggcagggggccgggtggtgctggccctggagggaggccatgacttgaccgccatctgtgatgcctctgaggcttgtgtctcggctctgctcagtgtagagctgcagcccttggatgaggcagtcttgcagcaaaagcccaacatcaacgcagtggccacgctagagaaagtcatcgagatccagagcaaacactggagctgtgtgcagaagttcgccgctggtctgggccggtccctgcgagaggcccaagcaggtgagaccgaggaggccgagactgtgagcgccatggccttgctgtcggtgggggccgagcaggcccaggctgcggcagcccgggaacacagccccaggccggcagaggagcccatggagcaggagcctgccctgtgacgccccggcccccatccctctgggcttcaccattgtgattttgtttattttttctattaaaaacaaaaagtcacacattcaacaaggtgtgccgtgtgggtctctcagccttgcccctcctgctcctctacgctgcctcaggcccccagccctgtggcttccacctcagctctagaagcctgctccctctgcagggggtggtggtgtcttcccagccctgtcccatgtgtccctccccccattttcctgcattctgtctgtccttttcctccttggagcctgggccagctcaaggtgggcacgggggcccagacagtactctccagttctggggccccccgagtgaggagggaacgggaagtcggtgccttggtttcagctgatttggggggaaatgccttaatttcactctcctcccttctccagcctcaggggaggatctggaggatccactactgtctttaagatgcagagtggaggggaggtgggcacccaccctgcgattctccaccctttccccttctttcgtcctcaccatctctgcagacccctctcctcctccttcctcttggtctcagcactgatgggaggctggtgcccaagctgtggcctgcagtctgtgaggagggctgtcttgcctcacactcctcacagcctacttccccttccccggggctgagagggtgaaagtgtgtggggaaggagaggactggtttcctgggttctcaggggccaggaggagtaacagaaccaggtctgctccccaccttactcggatggcctccctgcccctctgctggcacagcctgggcaaggggagaaggtggtccctgcagaggggctccaggctggtgagagcccccctgctgtcaggaccagattttcccagccatccagcatgctgcggggagaaggggcagaggctcacctccctcctggggccttttgttttggatcctggggatggtgagaatggaggttctagaaggggtaaggccagaacccagggatccaggagtcggctctcagctggagcttccataccttctgggctccctttgctgaccaccagcccaagggagctaagaccaggagggggctgggcgctgtcccttctctttcccaggagccctgccaggggctgtgggcctacaaggcttccaggggatgccatccagcctgtaggaaaccaaagatgggaagtggctcctagggggctgactcttccttcctcctcctccccagtaccacatatactttctctccttctatctccagggccccaccaatctgtttacatatttattatcctatgggggcctgagcaggattgagggagccaggggaggggcaggagtcccagcaccatcggttcatagtgtgcttgtgtgtttgttttagatcctcctgggggatggggatggggccaggctcagtgtactaggcctctctgtgctgagccccaggctcccggccccttacccactctctccctgtggctggtctggttctcatgtaaacccactccttgctttgtctccctggatatggatttcagttaagtattttgtaacccgttacactgtgtgtccttgtgtaaataaacttgtttctggcagtgcc

SEQ ID NO: 13772 - DNA, 5069 bp, Homo sapiens
  source 1..5069: mol_type = unassigned DNA
cgaatgttgttgttggtggcggcggcgagcggagccggaggagccgccgcaaagatggaggagccgtcgaggaggtgctgccgccgctgccgccgccgctgctgccgccgccgcccgcgaagccggagctcgagccgcagcggggatgccgttctgagtgcctgactgcctcgccccgaaggatggcctcggatgggcattagaggcacggcggccccgggctcccgtcccgtccgtctgtctgttatcgtctgtctctcttgacatcaccgcagctccaccccctcccgtcccagcccccaacgccagcttcctgcaggcccagagccggcatgaactctcccaacgagtcggatgggatgtcaggtcgggaaccatccttggaaatcctgccgcggacttctctgcacagcatccctgtgacagtggaggtgaagccggtgctgccaagagccatgcccagttccatggggggtgggggtggaggcagccccagccctgtggagctacggggggctctggtgggctctgtggaccccacactgcgggagcagcaactgcagcaggagctcctggcgctcaagcagcagcagcagctgcagaagcagctcctgttcgctgagttccagaaacagcatgaccacctgacaaggcagcatgaggtccagctgcagaagcacctcaagcagcagcaggagatgctggcagccaagcagcagcaggagatgctggcagccaagcggcagcaggagctggagcagcagcggcagcgggagcagcagcggcaggaagagctggagaagcagcggctggagcagcagctgctcatcctgcggaacaaggagaagagcaaagagagtgccattgccagcactgaggtaaagctgaggctccaggaattcctcttgtcgaagtcaaaggagcccacaccaggcggcctcaaccattccctcccacagcaccccaaatgctggggagcccaccatgcttctttggaccagagttcccctccccagagcggcccccctgggacgcctccctcctacaaactgcctttgcctgggccctacgacagtcgagacgacttccccctccgcaaaacagcctctgaacccaacttgaaagtgcgttcaaggctaaaacagaaggtggctgagcggagaagcagtcccctcctgcgtcgcaaggatgggactgttattagcacctttaagaagagagctgttgagatcacaggtgccgggcctggggcgtcgtccgtgtgtaacagcgcacccggctccggccccagctctcccaacagctcccacagcaccatcgctgagaatggctttactggctcagtccccaacatccccactgagatgctccctcagcaccgagccctccctctggacagctcccccaaccagttcagcctctacacgtctccttctctgcccaacatctccctagggctgcaggccacggtcactgtcaccaactcacacctcactgcctccccgaagctgtcgacacagcaggaggccgagaggcaggccctccagtccctgcggcagggtggcacgctgaccggcaagttcatgagcacatcctctattcctggctgcctgctgggcgtggcactggagggcgacgggagcccccacgggcatgcctccctgctgcagcatgtgctgttgctggagcaggcccggcagcagagcaccctcattgctgtgccactccacgggcagtccccactagtgacgggtgaacgtgtggccaccagcatgcggacggtaggcaagctcccgcggcatcggcccctgagccgcactcagtcctcaccgctgccgcagagtccccaggccctgcagcagctggtcatgcaacaacagcaccagcagttcctggagaagcagaagcagcagcagctacagctgggcaagatcctcaccaagacaggggagctgcccaggcagcccaccacccaccctgaggagacagaggaggagctgacggagcagcaggaggtcttgctgggggagggagccctgaccatgccccgggagggctccacagagagtgagagcacacaggaagacctggaggaggaggacgaggaagacgatggggaggaggaggaggattgcatccaggttaaggacgaggagggcgagagtggtgctgaggaggggcccgacttggaggagcctggtgctggatacaaaaaactgttctcagatgcccagccgctgcagcctttgcaggtgtaccaggcgcccctcagcctggccactgtgccccaccaggccctgggccgtacccagtcctcccctgctgcccctgggggcatgaagagccccccagaccagcccgtcaagcacctcttcaccacaggccccatcagccagaagatgtatgctgtgctgccttgtgggggcatcggggtggacagtgacaccgtgtggaatgagatgcactcctccagtgctgtgcgcatggcagtgggctgcctgctggagctggccttcaaggtggctgcaggagagctcaagaatggatttgccatcatccggcccccaggacaccacgccgaggaatccacagccatgggattctgcttcttcaactctgtagccatcaccgcaaaactcctacagcagaagttgaacgtgggcaaggtcctcatcgtggactgggacattcaccatggcaatggcacccagcaggcgttctacaatgacccctctgtgctctacatctctctgcatcgctatgacaacgggaacttctttccaggctctggggctcctgaagaggttggtggaggaccaggcgtggggtacaatgtgaacgtggcatggacaggaggtgtggacccccccattggagacgtggagtaccttacagccttcaggacagtggtgatgcccattgcccacgagttctcacctgatgtggtcctagtctccgccgggtttgatgctgttgaaggacatctgtctcctctgggtggctactctgtcaccgccagatgttttggccacttgaccaggcagctgatgaccctggcagggggccgggtggtgctggccctggagggaggccatgacttgaccgccatctgtgatgcctctgaggcttgtgtctcggctctgctcagtgtagagctgcagcccttggatgaggcagtcttgcagcaaaagcccaacatcaacgcagtggccacgctagagaaagtcatcgagatccagagcaaacactggagctgtgtgcagaagttcgccgctggtctgggccggtccctgcgagaggcccaagcaggtgagaccgaggaggccgagactgtgagcgccatggccttgctgtcggtgggggccgagcaggcccaggctgcggcagcccgggaacacagccccaggccggcagaggagcccatggagcaggagcctgccctgtgacgccccggcccccatccctctgggcttcaccattgtgattttgtttattttttctattaaaaacaaaaagtcacacattcaacaaggtgtgccgtgtgggtctctcagccttgcccctcctgctcctctacgctgcctcaggcccccagccctgtggcttccacctcagctctagaagcctgctccctctgcagggggtggtggtgtcttcccagccctgtcccatgtgtccctccccccattttcctgcattctgtctgtccttttcctccttggagcctgggccagctcaaggtgggcacgggggcccagacagtactctccagttctggggccccccgagtgaggagggaacgggaagtcggtgccttggtttcagctgatttggggggaaatgccttaatttcactctcctcccttctccagcctcaggggaggatctggaggatccactactgtctttaagatgcagagtggaggggaggtgggcacccaccctgcgattctccaccctttccccttctttcgtcctcaccatctctgcagacccctctcctcctccttcctcttggtctcagcactgatgggaggctggtgcccaagctgtggcctgcagtctgtgaggagggctgtcttgcctcacactcctcacagcctacttccccttccccggggctgagagggtgaaagtgtgtggggaaggagaggactggtttcctgggttctcaggggccaggaggagtaacagaaccaggtctgctccccaccttactcggatggcctccctgcccctctgctggcacagcctgggcaaggggagaaggtggtccctgcagaggggctccaggctggtgagagcccccctgctgtcaggaccagattttcccagccatccagcatgctgcggggagaaggggcagaggctcacctccctcctggggccttttgttttggatcctggggatggtgagaatggaggttctagaaggggtaaggccagaacccagggatccaggagtcggctctcagctggagcttccataccttctgggctccctttgctgaccaccagcccaagggagctaagaccaggagggggctgggcgctgtcccttctctttcccaggagccctgccaggggctgtgggcctacaaggcttccaggggatgccatccagcctgtaggaaaccaaagatgggaagtggctcctagggggctgactcttccttcctcctcctccccagtaccacatatactttctctccttctatctccagggccccaccaatctgtttacatatttattatcctatgggggcctgagcaggattgagggagccaggggaggggcaggagtcccagcaccatcggttcatagtgtgcttgtgtgtttgttttagatcctcctgggggatggggatggggccaggctcagtgtactaggcctctctgtgctgagccccaggctcccggccccttacccactctctccctgtggctggtctggttctcatgtaaacccactccttgctttgtctccctggatatggatttcagttaagtattttgtaacccgttacactgtgtgtccttgtgtaaataaacttgtttctggcagtgcc

SEQ ID NO: 13773 - DNA, 5324 bp, Homo sapiens
  source 1..5324: mol_type = unassigned DNA
cgaatgttgttgttggtggcggcggcgagcggagccggaggagccgccgcaaagatggaggagccgtcgaggaggtgctgccgccgctgccgccgccgctgctgccgccgccgcccgcgaagccggagctcgagccgcagcggggatgccgttctgagtgcctgactgcctcgccccgaaggatggcctcggatgggcattagaggcacggcggccccgggctcccgtcccgtccgtctgtctgttatcgtctgtctctcttgacatcaccgcagctccaccccctcccgtcccagcccccaacgccagcttcctgcaggcccagagccggcatgaactctcccaacgagtcggatgggatgtcaggtcgggaaccatccttggaaatcctgccgcggacttctctgcacagcatccctgtgacagtggaggtgaagccggtgctgccaagagccatgcccagttccatggggggtgggggtggaggcagccccagccctgtggagctacggggggctctggtgggctctgtggaccccacactgcgggagcagcaactgcagcaggagctcctggcgctcaagcagcagcagcagctgcagaagcagctcctgttcgctgagttccagaaacagcatgaccacctgacaaggcagcatgaggtccagctgcagaagcacctcaagcagcagcaggagatgctggcagccaagcagcagcaggagatgctggcagccaagcggcagcaggagctggagcagcagcggcagcgggagcagcagcggcaggaagagctggagaagcagcggctggagcagcagctgctcatcctgcggaacaaggagaagagcaaagagagtgccattgccagcactgaggtaaagctgaggctccaggaattcctcttgtcgaagtcaaaggagcccacaccaggcggcctcaaccattccctcccacagcaccccaaatgctggggagcccaccatgcttctttggaccagagttcccctccccagagcggcccccctgggacgcctccctcctacaaactgcctttgcctgggccctacgacagtcgagacgacttccccctccgcaaaacagcctctgaacccaacttgaaagtgcgttcaaggctaaaacagaaggtggctgagcggagaagcagtcccctcctgcgtcgcaaggatgggactgttattagcacctttaagaagagagctgttgagatcacaggtgccgggcctggggcgtcgtccgtgtgtaacagcgcacccggctccggccccagctctcccaacagctcccacagcaccatcgctgagaatggctttactggctcagtccccaacatccccactgagatgctccctcagcaccgagccctccctctggacagctcccccaaccagttcagcctctacacgtctccttctctgcccaacatctccctagggctgcaggccacggtcactgtcaccaactcacacctcactgcctccccgaagctgtcgacacagcaggaggccgagaggcaggccctccagtccctgcggcagggtggcacgctgaccggcaagttcatgagcacatcctctattcctggctgcctgctgggcgtggcactggagggcgacgggagcccccacgggcatgcctccctgctgcagcatgtgctgttgctggagcaggcccggcagcagagcaccctcattgctgtgccactccacgggcagtccccactagtgacgggtgaacgtgtggccaccagcatgcggacggtaggcaagctcccgcggcatcggcccctgagccgcactcagtcctcaccgctgccgcagagtccccaggccctgcagcagctggtcatgcaacaacagcaccagcagttcctggagaagcagaagcagcagcagctacagctgggcaagatcctcaccaagacaggggagctgcccaggcagcccaccacccaccctgaggagacagaggaggagctgacggagcagcaggaggtcttgctgggggagggagccctgaccatgccccgggagggctccacagagagtgagagcacacaggaagacctggaggaggaggacgaggaagacgatggggaggaggaggaggattgcatccaggttaaggacgaggagggcgagagtggtgctgaggaggggcccgacttggaggagcctggtgctggatacaaaaaactgttctcagatgcccagccgctgcagcctttgcaggtgtaccaggcgcccctcagcctggccactgtgccccaccaggccctgggccgtacccagtcctcccctgctgcccctgggggcatgaagagccccccagaccagcccgtcaagcacctcttcaccacaggtgtggtctacgacacgttcatgctaaagcaccagtgcatgtgcgggaacacacacgtgcaccctgagcatgctggccggatccagagcatctggtcccggctgcaggagacaggcctgcttagcaagtgcgagcggatccgaggtcgcaaagccacgctagatgagatccagacagtgcactctgaataccacaccctgctctatgggaccagtcccctcaaccggcagaagctagacagcaagaagttgctcggccccatcagccagaagatgtatgctgtgctgccttgtgggggcatcggggtggacagtgacaccgtgtggaatgagatgcactcctccagtgctgtgcgcatggcagtgggctgcctgctggagctggccttcaaggtggctgcaggagagctcaagaatggatttgccatcatccggcccccaggacaccacgccgaggaatccacagccatgggattctgcttcttcaactctgtagccatcaccgcaaaactcctacagcagaagttgaacgtgggcaaggtcctcatcgtggactgggacattcaccatggcaatggcacccagcaggcgttctacaatgacccctctgtgctctacatctctctgcatcgctatgacaacgggaacttctttccaggctctggggctcctgaagaggttggtggaggaccaggcgtggggtacaatgtgaacgtggcatggacaggaggtgtggacccccccattggagacgtggagtaccttacagccttcaggacagtggtgatgcccattgcccacgagttctcacctgatgtggtcctagtctccgccgggtttgatgctgttgaaggacatctgtctcctctgggtggctactctgtcaccgccagatgttttggccacttgaccaggcagctgatgaccctggcagggggccgggtggtgctggccctggagggaggccatgacttgaccgccatctgtgatgcctctgaggcttgtgtctcggctctgctcagtgtagagctgcagcccttggatgaggcagtcttgcagcaaaagcccaacatcaacgcagtggccacgctagagaaagtcatcgagatccagagcaaacactggagctgtgtgcagaagttcgccgctggtctgggccggtccctgcgagaggcccaagcaggtgagaccgaggaggccgagactgtgagcgccatggccttgctgtcggtgggggccgagcaggcccaggctgcggcagcccgggaacacagccccaggccggcagaggagcccatggagcaggagcctgccctgtgacgccccggcccccatccctctgggcttcaccattgtgattttgtttattttttctattaaaaacaaaaagtcacacattcaacaaggtgtgccgtgtgggtctctcagccttgcccctcctgctcctctacgctgcctcaggcccccagccctgtggcttccacctcagctctagaagcctgctccctctgcagggggtggtggtgtcttcccagccctgtcccatgtgtccctccccccattttcctgcattctgtctgtccttttcctccttggagcctgggccagctcaaggtgggcacgggggcccagacagtactctccagttctggggccccccgagtgaggagggaacgggaagtcggtgccttggtttcagctgatttggggggaaatgccttaatttcactctcctcccttctccagcctcaggggaggatctggaggatccactactgtctttaagatgcagagtggaggggaggtgggcacccaccctgcgattctccaccctttccccttctttcgtcctcaccatctctgcagacccctctcctcctccttcctcttggtctcagcactgatgggaggctggtgcccaagctgtggcctgcagtctgtgaggagggctgtcttgcctcacactcctcacagcctacttccccttccccggggctgagagggtgaaagtgtgtggggaaggagaggactggtttcctgggttctcaggggccaggaggagtaacagaaccaggtctgctccccaccttactcggatggcctccctgcccctctgctggcacagcctgggcaaggggagaaggtggtccctgcagaggggctccaggctggtgagagcccccctgctgtcaggaccagattttcccagccatccagcatgctgcggggagaaggggcagaggctcacctccctcctggggccttttgttttggatcctggggatggtgagaatggaggttctagaaggggtaaggccagaacccagggatccaggagtcggctctcagctggagcttccataccttctgggctccctttgctgaccaccagcccaagggagctaagaccaggagggggctgggcgctgtcccttctctttcccaggagccctgccaggggctgtgggcctacaaggcttccaggggatgccatccagcctgtaggaaaccaaagatgggaagtggctcctagggggctgactcttccttcctcctcctccccagtaccacatatactttctctccttctatctccagggccccaccaatctgtttacatatttattatcctatgggggcctgagcaggattgagggagccaggggaggggcaggagtcccagcaccatcggttcatagtgtgcttgtgtgtttgttttagatcctcctgggggatggggatggggccaggctcagtgtactaggcctctctgtgctgagccccaggctcccggccccttacccactctctccctgtggctggtctggttctcatgtaaacccactccttgctttgtctccctggatatggatttcagttaagtattttgtaacccgttacactgtgtgtccttgtgtaaataaacttgtttctggcagtgcc

SEQ ID NO: 13774 - DNA, 2533 bp, Homo sapiens
  source 1..2533: mol_type = unassigned DNA
gcagcgcgcaccgagccggccgcgccgcgcccgccgctctcgccgctttcgccgcggtctcctcctctagcgcccgccgcggccggtaaatctcggctggaggagcagcggcggcccccgagtcaactttcattccctttttgcttctgcctcaccattctcttctcctcctcgaaagatggctgtttggagaagggggagaagttaagaggtcgccagcgcggagcgaaggagggcgcgatagcctcagcaggagcgggcggaggtttctcctctgccaacccctcctggaccattgtcagcagttgaacgacaaaggctgtgaatctgcatcctagtcttagcagtccctctgattctcatgatgagctcacctgcacagtctcgatctcctgacctcatgtggaaccttgtaccatgggtgctattctgtggctgctgtaggatcttcccagatggggtggctggacgagagcagctcttggctcagcaaagaatgcacagtatgatcagctcagtggatgtgaagtcagaagttcctgtgggcctggagcccatctcacctttagacctaaggacagacctcaggatgatgatgcccgtggtggaccctgttgtccgtgagaagcaattgcagcaggaattacttcttatccagcagcagcaacaaatccagaagcagcttctgatagcagagtttcagaaacagcatgagaacttgacacggcagcaccaggctcagcttcaggagcatatcaaggaacttctagccataaaacagcaacaagaactcctagaaaaggagcagaaactggagcagcagaggcaagaacaggaagtagagaggcatcgcagagaacagcagcttcctcctctcagaggcaaagatagaggacgagaaagggcagtggcaagtacagaagtaaagcagaagcttcaagagttcctactgagtaaatcagcaacgaaagacactccaactaatggaaaaaatcattccgtgagccgccatcccaagctctggtacacggctgcccaccacacatcattggatcaaagctctccaccccttagtggaacatctccatcctacaagtacacattaccaggagcacaagatgcaaaggatgatttcccccttcgaaaaactgaatcctcagtcagtagcagttctccaggctctggtcccagttcaccaaacaatgggccaactggaagtgttactgaaaatgagacttcggttttgccccctacccctcatgccgagcaaatggtttcacagcaacgcattctaattcatgaagattccatgaacctgctaagtctttatacctctccttctttgcccaacattaccttggggcttcccgcagtgccatcccagctcaatgcttcgaattcactcaaagaaaagcagaagtgtgagacgcagacgcttaggcaaggtgttcctctgcctgggcagtatggaggcagcatcccggcatcttccagccaccctcatgttactttagagggaaagccacccaacagcagccaccaggctctcctgcagcatttattattgaaagaacaaatgcgacagcaaaagcttcttgtagctggtggagttcccttacatcctcagtctcccttggcaacaaaagagagaatttcacctggcattagaggtacccacaaattgccccgtcacagacccctgaaccgaacccagtctgcacctttgcctcagagcacgttggctcagctggtcattcaacagcaacaccagcaattcttggagaagcagaagcaataccagcagcagatccacatgaacaaactgctttcgaaatctattgaacaactgaagcaaccaggcagtcaccttgaggaagcagaggaagagcttcagggggaccaggcgatgcaggaagacagagcgccctctagtggcaacagcactaggagcgacagcagtgcttgtgtggatgacacactgggacaagttggggctgtgaaggtcaaggaggaaccagtggacagtgatgaagatgctcagatccaggaaatggaatctggggagcaggctgcttttatgcaacaggtaataggcaaagatttagctccaggatttgtaattaaagtcattatctgaacatgaaatgcattgcaggtttggtaaatggatatgatttcctatcagtttatatttctctatgatttgagttcagtgtttaaggattctacctaatgcagatatatgtatatatctatatagaggtctttctatatactgatctctatatagatatcaatgtttcattgaaaatccactggtaaggaaatacctgttatactaaaattatgatacataatatctgagcagttaataggctttaaatttatcccaaagcctgctacaccaattacttctaaagaaaacaaattcactgttattttgagtttatgtgttgagatcagtgactgctggatagtctcccagtctgatcaatgaagcattcgattagtttttgattttttgcaacatcta

SEQ ID NO: 13775 - DNA, 2834 bp, Homo sapiens
  source 1..2834: mol_type = unassigned DNA
ctccacaaactgagttctttagtggatgtgaagtcagaagttcctgtgggcctggagcccatctcacctttagacctaaggacagacctcaggatgatgatgcccgtggtggaccctgttgtccgtgagaagcaattgcagcaggaattacttcttatccagcagcagcaacaaatccagaagcagcttctgatagcagagtttcagaaacagcatgagaacttgacacggcagcaccaggctcagcttcaggagcatatcaaggaacttctagccataaaacagcaacaagaactcctagaaaaggagcagaaactggagcagcagaggcaagaacaggaagtagagaggcatcgcagagaacagcagcttcctcctctcagaggcaaagatagaggacgagaaagggcagtggcaagtacagaagtaaagcagaagcttcaagagttcctactgagtaaatcagcaacgaaagacactccaactaatggaaaaaatcattccgtgagccgccatcccaagctctggtacacggctgcccaccacacatcattggatcaaagctctccaccccttagtggaacatctccatcctacaagtacacattaccaggagcacaagatgcaaaggatgatttcccccttcgaaaaactgcctctgagcccaacttgaaggtgcggtccaggttaaaacagaaagtggcagagaggagaagcagccccttactcaggcggaaggatggaaatgttgtcacttcattcaagaagcgaatgtttgaggtgacagaatcctcagtcagtagcagttctccaggctctggtcccagttcaccaaacaatgggccaactggaagtgttactgaaaatgagacttcggttttgccccctacccctcatgccgagcaaatggtttcacagcaacgcattctaattcatgaagattccatgaacctgctaagtctttatacctctccttctttgcccaacattaccttggggcttcccgcagtgccatcccagctcaatgcttcgaattcactcaaagaaaagcagaagtgtgagacgcagacgcttaggcaaggtgttcctctgcctgggcagtatggaggcagcatcccggcatcttccagccaccctcatgttactttagagggaaagccacccaacagcagccaccaggctctcctgcagcatttattattgaaagaacaaatgcgacagcaaaagcttcttgtagctggtggagttcccttacatcctcagtctcccttggcaacaaaagagagaatttcacctggcattagaggtacccacaaattgccccgtcacagacccctgaaccgaacccagtctgcacctttgcctcagagcacgttggctcagctggtcattcaacagcaacaccagcaattcttggagaagcagaagcaataccagcagcagatccacatgaacaaacctttcctggaacccacgcacacacgtgcgctctctgtgcgccaagctccgctggctgcggttggcatggatggattagagaaacaccgtctcgtctccaggactcactcttcccctgctgcctctgttttacctcacccagcaatggaccgccccctccagcctggctctgcaactggaattgcctatgaccccttgatgctgaaacaccagtgcgtttgtggcaattccaccacccaccctgagcatgctggacgaatacagagtatctggtcacgactgcaagaaactgggctgctaaataaatgtgagcgaattcaaggtcgaaaagccagcctggaggaaatacagcttgttcattctgaacatcactcactgttgtatggcaccaaccccctggacggacagaagctggaccccaggatactcctaggtgatgactctcaaaagtttttttcctcattaccttgtggtggacttggggtggacagtgacaccatttggaatgagctacactcgtccggtgctgcacgcatggctgttggctgtgtcatcgagctggcttccaaagtggcctcaggagagctgaagaatgggtttgctgttgtgaggccccctggccatcacgctgaagaatccacagccatggggttctgcttttttaattcagttgcaattaccgccaaatacttgagagaccaactaaatataagcaagatattgattgtagatctggatgttcaccatggaaacggtacccagcaggccttttatgctgaccccagcatcctgtacatttcactccatcgctatgatgaagggaactttttccctggcagtggagccccaaatgaggttggaacaggccttggagaagggtacaatataaatattgcctggacaggtggccttgatcctcccatgggagatgttgagtaccttgaagcattcaggaccatcgtgaagcctgtggccaaagagtttgatccagacatggtcttagtatctgctggatttgatgcattggaaggccacacccctcctctaggagggtacaaagtgacggcaaaatgttttggtcatttgacgaagcaattgatgacattggctgatggacgtgtggtgttggctctagaaggaggacatgatctcacagccatctgtgatgcatcagaagcctgtgtaaatgcccttctaggaaatgagctggagccacttgcagaagatattctccaccaaagcccgaatatgaatgctgttatttctttacagaagatcattgaaattcaaagtatgtctttaaagttctcttaaaaattctaagcaggtaaaactaactaaaattatattgaaaattatagtacaaagaaacattt

SEQ ID NO: 13776 - DNA, 3254 bp, Homo sapiens
  source 1..3254: mol_type = unassigned DNA
atggggtggctggacgagagcagctcttggctcagcaaagaatgcacagtatgatcagctcagtggatgtgaagtcagaagttcctgtgggcctggagcccatctcacctttagacctaaggacagacctcaggatgatgatgcccgtggtggaccctgttgtccgtgagaagcaattgcagcaggaattacttcttatccagcagcagcaacaaatccagaagcagcttctgatagcagagtttcagaaacagcatgagaacttgacacggcagcaccaggctcagcttcaggagcatatcaagttgcaacaggaacttctagccataaaacagcaacaagaactcctagaaaaggagcagaaactggagcagcagaggcaagaacaggaagtagagaggcatcgcagagaacagcagcttcctcctctcagaggcaaagatagaggacgagaaagggcagtggcaagtacagaagtaaagcagaagcttcaagagttcctactgagtaaatcagcaacgaaagacactccaactaatggaaaaaatcattccgtgagccgccatcccaagctctggtacacggctgcccaccacacatcattggatcaaagctctccaccccttagtggaacatctccatcctacaagtacacattaccaggagcacaagatgcaaaggatgatttcccccttcgaaaaactgaatcctcagtcagtagcagttctccaggctctggtcccagttcaccaaacaatgggccaactggaagtgttactgaaaatgagacttcggttttgccccctacccctcatgccgagcaaatggtttcacagcaacgcattctaattcatgaagattccatgaacctgctaagtctttatacctctccttctttgcccaacattaccttggggcttcccgcagtgccatcccagctcaatgcttcgaattcactcaaagaaaagcagaagtgtgagacgcagacgcttaggcaaggtgttcctctgcctgggcagtatggaggcagcatcccggcatcttccagccaccctcatgttactttagagggaaagccacccaacagcagccaccaggctctcctgcagcatttattattgaaagaacaaatgcgacagcaaaagcttcttgtagctggtggagttcccttacatcctcagtctcccttggcaacaaaagagagaatttcacctggcattagaggtacccacaaattgccccgtcacagacccctgaaccgaacccagtctgcacctttgcctcagagcacgttggctcagctggtcattcaacagcaacaccagcaattcttggagaagcagaagcaataccagcagcagatccacatgaacaaactgctttcgaaatctattgaacaactgaagcaaccaggcagtcaccttgaggaagcagaggaagagcttcagggggaccaggcgatgcaggaagacagagcgccctctagtggcaacagcactaggagcgacagcagtgcttgtgtggatgacacactgggacaagttggggctgtgaaggtcaaggaggaaccagtggacagtgatgaagatgctcagatccaggaaatggaatctggggagcaggctgcttttatgcaacagcctttcctggaacccacgcacacacgtgcgctctctgtgcgccaagctccgctggctgcggttggcatggatggattagagaaacaccgtctcgtctccaggactcactcttcccctgctgcctctgttttacctcacccagcaatggaccgccccctccagcctggctctgcaactggaattgcctatgaccccttgatgctgaaacaccagtgcgtttgtggcaattccaccacccaccctgagcatgctggacgaatacagagtatctggtcacgactgcaagaaactgggctgctaaataaatgtgagcgaattcaaggtcgaaaagccagcctggaggaaatacagcttgttcattctgaacatcactcactgttgtatggcaccaaccccctggacggacagaagctggaccccaggatactcctaggtgatgactctcaaaagtttttttcctcattaccttgtggtggacttggggtggacagtgacaccatttggaatgagctacactcgtccggtgctgcacgcatggctgttggctgtgtcatcgagctggcttccaaagtggcctcaggagagctgaagaatgggtttgctgttgtgaggccccctggccatcacgctgaagaatccacagccatggggttctgcttttttaattcagttgcaattaccgccaaatacttgagagaccaactaaatataagcaagatattgattgtagatctggatgttcaccatggaaacggtacccagcaggccttttatgctgaccccagcatcctgtacatttcactccatcgctatgatgaagggaactttttccctggcagtggagccccaaatgaggttggaacaggccttggagaagggtacaatataaatattgcctggacaggtggccttgatcctcccatgggagatgttgagtaccttgaagcattcaggaccatcgtgaagcctgtggccaaagagtttgatccagacatggtcttagtatctgctggatttgatgcattggaaggccacacccctcctctaggagggtacaaagtgacggcaaaatgttttggtcatttgacgaagcaattgatgacattggctgatggacgtgtggtgttggctctagaaggaggacatgatctcacagccatctgtgatgcatcagaagcctgtgtaaatgcccttctaggaaatgagctggagccacttgcagaagatattctccaccaaagcccgaatatgaatgctgttatttctttacagaagatcattgaaattcaaagcaagtattggaagtcagtaaggatggtggctgtgccaaggggctgtgctctggctggtgctcagttgcaagaggagacagagaccgtttctgccctggcctccctaacagtggatgtggaacagccctttgctcaggaagacagcagaactgctggtgagcctatggaagaggagccagccttgtgaagtgccaagtccccctctgatatttcctgtgtgtgacatcattgtgtatccccccaccccagtaccctcagacatgtcttgtctgctgcctgggtggcacagattcaatggaacataaacactgggcacaaaatt

SEQ ID NO: 13777 - DNA, 4239 bp, Homo sapiens
  source 1..4239: mol_type = unassigned DNA
ggggaagagaggcacagacacagataggagaagggcaccggctggagccacttgcaggactgagggtttttgcaacaaaaccctagcagcctgaagaactctaagccagatggggtggctggacgagagcagctcttggctcagcaaagaatgcacagtatgatcagctcagtggatgtgaagtcagaagttcctgtgggcctggagcccatctcacctttagacctaaggacagacctcaggatgatgatgcccgtggtggaccctgttgtccgtgagaagcaattgcagcaggaattacttcttatccagcagcagcaacaaatccagaagcagcttctgatagcagagtttcagaaacagcatgagaacttgacacggcagcaccaggctcagcttcaggagcatatcaaggaacttctagccataaaacagcaacaagaactcctagaaaaggagcagaaactggagcagcagaggcaagaacaggaagtagagaggcatcgcagagaacagcagcttcctcctctcagaggcaaagatagaggacgagaaagggcagtggcaagtacagaagtaaagcagaagcttcaagagttcctactgagtaaatcagcaacgaaagacactccaactaatggaaaaaatcattccgtgagccgccatcccaagctctggtacacggctgcccaccacacatcattggatcaaagctctccaccccttagtggaacatctccatcctacaagtacacattaccaggagcacaagatgcaaaggatgatttcccccttcgaaaaactgcctctgagcccaacttgaaggtgcggtccaggttaaaacagaaagtggcagagaggagaagcagccccttactcaggcggaaggatggaaatgttgtcacttcattcaagaagcgaatgtttgaggtgacagaatcctcagtcagtagcagttctccaggctctggtcccagttcaccaaacaatgggccaactggaagtgttactgaaaatgagacttcggttttgccccctacccctcatgccgagcaaatggtttcacagcaacgcattctaattcatgaagattccatgaacctgctaagtctttatacctctccttctttgcccaacattaccttggggcttcccgcagtgccatcccagctcaatgcttcgaattcactcaaagaaaagcagaagtgtgagacgcagacgcttaggcaaggtgttcctctgcctgggcagtatggaggcagcatcccggcatcttccagccaccctcatgttactttagagggaaagccacccaacagcagccaccaggctctcctgcagcatttattattgaaagaacaaatgcgacagcaaaagcttcttgtagctggtggagttcccttacatcctcagtctcccttggcaacaaaagagagaatttcacctggcattagaggtacccacaaattgccccgtcacagacccctgaaccgaacccagtctgcacctttgcctcagagcacgttggctcagctggtcattcaacagcaacaccagcaattcttggagaagcagaagcaataccagcagcagatccacatgaacaaactgctttcgaaatctattgaacaactgaagcaaccaggcagtcaccttgaggaagcagaggaagagcttcagggggaccaggcgatgcaggaagacagagcgccctctagtggcaacagcactaggagcgacagcagtgcttgtgtggatgacacactgggacaagttggggctgtgaaggtcaaggaggaaccagtggacagtgatgaagatgctcagatccaggaaatggaatctggggagcaggctgcttttatgcaacaggtaataggcaaagatttagctccaggatttgtaattaaagtcattatctgaacatgaaatgcattgcaggtttggtaaatggatatgatttcctatcagtttatatttctctatgatttgagttcagtgtttaaggattctacctaatgcagatatatgtatatatctatatagaggtctttctatatactgatctctatatagatatcaatgtttcattgaaaatccactggtaaggaaatacctgttatactaaaattatgatacataatatctgagcagttaataggctttaaatttatcccaaagcctgctacaccaattacttctaaagaaaacaaattcactgttattttgagtttatgtgttgagatcagtgactgctggatagtctcccagtctgatcaatgaagcattcgattagtttttgattttttgcaacatctagaatttaattttcacatcactgtacataatgtatcatactatagtcttgaacactgttaaaggtagtctgccccttccttcctctctctttttttagttaagtagaaatgttctggtcaccatgccagtagtcctaggttattgtgtaggttgcaattgaacatattaggaatacaggtggttttaaatatatagatgcaaattgcagcactactttaaatattagattatgtctcacatagcactgctcattttacttttattttgtgtaatttgatgacactgtctatcaaaaaagagcaaatgaagcagatgcaaatgttagtgagaagtaatgtgcagcattatggtccaatcagatacaatattgtgtctacaattgcaaaaaacacagtaacaggatgaatattatctgatatcaagtcaaaatcagtttgaaaagaaggtgtatcatattttatattgtcactagaatctcttaagtataattccataatgacatgggcatataccgtaacattctggcaaataacaattagaaaagataggtttaacaaaaaaatttacttgtatataatgcaccttcaggaggactatgtcctttgatgctataaaatacaaacaactttgaaggcaacagaagacactgtttattcaagtcagttctttgtcaggttcctgctgttctcctacagaaaagtgattctgtgagggtgaacaggaaatgccttgtggaaacaggaagtccaagtgattcatgtactgaggaatgtaggaaaaaaaatctgaggatagtgctttactctttctgtttttaaagggcactctatgaattgatttattgtctaagaaaataacaccacaagtagggaaattgttacggaagcttttcactggaacatttccttcatattcccttttgatatgtttaccttgttttataggtttacttttgttaagctagttaaaggttcgttgtattaagacccctttaatatggataatccaaattgacctagaatctttgtgaggttttttctattaaaatatttatatttctaaatccgaggtatttcaaggtgtagtatcctatttcaaaggagatatagcagttttgccaaatgtagacattgttcaactgtatgttattggcacgtgttgtttacattttgctgtgacatttaaaaatatttctttaaaaatgttactgctaaagatacattatccttttttaaaaagtctccattcaaattaaattaacataactagaagttagaaagtttaaaagttttccacataatgaaagtccttctgataatttgacaaatagctataataggaacactccctatcaccaacatattttggttagtatattccttcatattaaaatgactttttgtcagttgttttgcattaaaaatatggcatgcctaagataaaattgtatattttttccatctcataaatattcattttcttcaaagtcttttttcaatctcataaaaaagggatagtgcatcttttaaaatacattttatttggggaggaacatgtggctgagcagacttttgtataatattacttcaaagatatgtaatcacaaacaaaaaaaactattttttataatgtcatttgagagagtttcatcagtacagttggtggacgttaattgtttgaatttgatagtctttgaatttaatcaagaaactacctggaaccagtgaaaaggaaagctggacttaaataatcttagaattaattgataaatgtctcttttaaaatctactgtatttattataatttacacccttgaaggtgatctcttgttttgtgttgtaaatatattgtttgtatgtttcccttcttgccttctgttataagtctcttcctttctcaaataaagttttttttaaaaga

SEQ ID NO: 13778 - DNA, 4102 bp, Homo sapiens
  source 1..4102: mol_type = unassigned DNA
gcactgagcagtgatgaatgtttcatgtagctgaagtaagagtgactggaatatgctgcagacaatttacgagagtgactcctgtttttcctcagatggggtggctggacgagagcagctcttggctcagcaaagaatgcacagtatgatcagctcagtggatgtgaagtcagaagttcctgtgggcctggagcccatctcacctttagacctaaggacagacctcaggatgatgatgcccgtggtggaccctgttgtccgtgagaagcaattgcagcaggaattacttcttatccagcagcagcaacaaatccagaagcagcttctgatagcagagtttcagaaacagcatgagaacttgacacggcagcaccaggctcagcttcaggagcatatcaagttgcaacaggaacttctagccataaaacagcaacaagaactcctagaaaaggagcagaaactggagcagcagaggcaagaacaggaagtagagaggcatcgcagagaacagcagcttcctcctctcagaggcaaagatagaggacgagaaagggcagtggcaagtacagaagtaaagcagaagcttcaagagttcctactgagtaaatcagcaacgaaagacactccaactaatggaaaaaatcattccgtgagccgccatcccaagctctggtacacggctgcccaccacacatcattggatcaaagctctccaccccttagtggaacatctccatcctacaagtacacattaccaggagcacaagatgcaaaggatgatttcccccttcgaaaaactgaatcctcagtcagtagcagttctccaggctctggtcccagttcaccaaacaatgggccaactggaagtgttactgaaaatgagacttcggttttgccccctacccctcatgccgagcaaatggtttcacagcaacgcattctaattcatgaagattccatgaacctgctaagtctttatacctctccttctttgcccaacattaccttggggcttcccgcagtgccatcccagctcaatgcttcgaattcactcaaagaaaagcagaagtgtgagacgcagacgcttaggcaaggtgttcctctgcctgggcagtatggaggcagcatcccggcatcttccagccaccctcatgttactttagagggaaagccacccaacagcagccaccaggctctcctgcagcatttattattgaaagaacaaatgcgacagcaaaagcttcttgtagctggtggagttcccttacatcctcagtctcccttggcaacaaaagagagaatttcacctggcattagaggtacccacaaattgccccgtcacagacccctgaaccgaacccagtctgcacctttgcctcagagcacgttggctcagctggtcattcaacagcaacaccagcaattcttggagaagcagaagcaataccagcagcagatccacatgaacaaactgctttcgaaatctattgaacaactgaagcaaccaggcagtcaccttgaggaagcagaggaagagcttcagggggaccaggcgatgcaggaagacagagcgccctctagtggcaacagcactaggagcgacagcagtgcttgtgtggatgacacactgggacaagttggggctgtgaaggtcaaggaggaaccagtggacagtgatgaagatgctcagatccaggaaatggaatctggggagcaggctgcttttatgcaacaggtaataggcaaagatttagctccaggatttgtaattaaagtcattatctgaacatgaaatgcattgcaggtttggtaaatggatatgatttcctatcagtttatatttctctatgatttgagttcagtgtttaaggattctacctaatgcagatatatgtatatatctatatagaggtctttctatatactgatctctatatagatatcaatgtttcattgaaaatccactggtaaggaaatacctgttatactaaaattatgatacataatatctgagcagttaataggctttaaatttatcccaaagcctgctacaccaattacttctaaagaaaacaaattcactgttattttgagtttatgtgttgagatcagtgactgctggatagtctcccagtctgatcaatgaagcattcgattagtttttgattttttgcaacatctagaatttaattttcacatcactgtacataatgtatcatactatagtcttgaacactgttaaaggtagtctgccccttccttcctctctctttttttagttaagtagaaatgttctggtcaccatgccagtagtcctaggttattgtgtaggttgcaattgaacatattaggaatacaggtggttttaaatatatagatgcaaattgcagcactactttaaatattagattatgtctcacatagcactgctcattttacttttattttgtgtaatttgatgacactgtctatcaaaaaagagcaaatgaagcagatgcaaatgttagtgagaagtaatgtgcagcattatggtccaatcagatacaatattgtgtctacaattgcaaaaaacacagtaacaggatgaatattatctgatatcaagtcaaaatcagtttgaaaagaaggtgtatcatattttatattgtcactagaatctcttaagtataattccataatgacatgggcatataccgtaacattctggcaaataacaattagaaaagataggtttaacaaaaaaatttacttgtatataatgcaccttcaggaggactatgtcctttgatgctataaaatacaaacaactttgaaggcaacagaagacactgtttattcaagtcagttctttgtcaggttcctgctgttctcctacagaaaagtgattctgtgagggtgaacaggaaatgccttgtggaaacaggaagtccaagtgattcatgtactgaggaatgtaggaaaaaaaatctgaggatagtgctttactctttctgtttttaaagggcactctatgaattgatttattgtctaagaaaataacaccacaagtagggaaattgttacggaagcttttcactggaacatttccttcatattcccttttgatatgtttaccttgttttataggtttacttttgttaagctagttaaaggttcgttgtattaagacccctttaatatggataatccaaattgacctagaatctttgtgaggttttttctattaaaatatttatatttctaaatccgaggtatttcaaggtgtagtatcctatttcaaaggagatatagcagttttgccaaatgtagacattgttcaactgtatgttattggcacgtgttgtttacattttgctgtgacatttaaaaatatttctttaaaaatgttactgctaaagatacattatccttttttaaaaagtctccattcaaattaaattaacataactagaagttagaaagtttaaaagttttccacataatgaaagtccttctgataatttgacaaatagctataataggaacactccctatcaccaacatattttggttagtatattccttcatattaaaatgactttttgtcagttgttttgcattaaaaatatggcatgcctaagataaaattgtatattttttccatctcataaatattcattttcttcaaagtcttttttcaatctcataaaaaagggatagtgcatcttttaaaatacattttatttggggaggaacatgtggctgagcagacttttgtataatattacttcaaagatatgtaatcacaaacaaaaaaaactattttttataatgtcatttgagagagtttcatcagtacagttggtggacgttaattgtttgaatttgatagtctttgaatttaatcaagaaactacctggaaccagtgaaaaggaaagctggacttaaataatcttagaattaattgataaatgtctcttttaaaatctactgtatttattataatttacacccttgaaggtgatctcttgttttgtgttgtaaatatattgtttgtatgtttcccttcttgccttctgttataagtctcttcctttctcaaataaagttttttttaaaaga

SEQ ID NO: 13779 - DNA, 4659 bp, Homo sapiens
  source 1..4659: mol_type = unassigned DNA
ggggaagagaggcacagacacagataggagaagggcaccggctggagccacttgcaggactgagggtttttgcaacaaaaccctagcagcctgaagaactctaagccagatggggtggctggacgagagcagctcttggctcagcaaagaatgcacagtatgatcagctcagtggatgtgaagtcagaagttcctgtgggcctggagcccatctcacctttagacctaaggacagacctcaggatgatgatgcccgtggtggaccctgttgtccgtgagaagcaattgcagcaggaattacttcttatccagcagcagcaacaaatccagaagcagcttctgatagcagagtttcagaaacagcatgagaacttgacacggcagcaccaggctcagcttcaggagcatatcaaggaacttctagccataaaacagcaacaagaactcctagaaaaggagcagaaactggagcagcagaggcaagaacaggaagtagagaggcatcgcagagaacagcagcttcctcctctcagaggcaaagatagaggacgagaaagggcagtggcaagtacagaagtaaagcagaagcttcaagagttcctactgagtaaatcagcaacgaaagacactccaactaatggaaaaaatcattccgtgagccgccatcccaagctctggtacacggctgcccaccacacatcattggatcaaagctctccaccccttagtggaacatctccatcctacaagtacacattaccaggagcacaagatgcaaaggatgatttcccccttcgaaaaactgcctctgagcccaacttgaaggtgcggtccaggttaaaacagaaagtggcagagaggagaagcagccccttactcaggcggaaggatggaaatgttgtcacttcattcaagaagcgaatgtttgaggtgacagaatcctcagtcagtagcagttctccaggctctggtcccagttcaccaaacaatgggccaactggaagtgttactgaaaatgagacttcggttttgccccctacccctcatgccgagcaaatggtttcacagcaacgcattctaattcatgaagattccatgaacctgctaagtctttatacctctccttctttgcccaacattaccttggggcttcccgcagtgccatcccagctcaatgcttcgaattcactcaaagaaaagcagaagtgtgagacgcagacgcttaggcaaggtgttcctctgcctgggcagtatggaggcagcatcccggcatcttccagccaccctcatgttactttagagggaaagccacccaacagcagccaccaggctctcctgcagcatttattattgaaagaacaaatgcgacagcaaaagcttcttgtagctggtggagttcccttacatcctcagtctcccttggcaacaaaagagagaatttcacctggcattagaggtacccacaaattgccccgtcacagacccctgaaccgaacccagtctgcacctttgcctcagagcacgttggctcagctggtcattcaacagcaacaccagcaattcttggagaagcagaagcaataccagcagcagatccacatgaacaaactgctttcgaaatctattgaacaactgaagcaaccaggcagtcaccttgaggaagcagaggaagagcttcagggggaccaggcgatgcaggaagacagagcgccctctagtggcaacagcactaggagcgacagcagtgcttgtgtggatgacacactgggacaagttggggctgtgaaggtcaaggaggaaccagtggacagtgatgaagatgctcagatccaggaaatggaatctggggagcaggctgcttttatgcaacagcctttcctggaacccacgcacacacgtgcgctctctgtgcgccaagctccgctggctgcggttggcatggatggattagagaaacaccgtctcgtctccaggactcactcttcccctgctgcctctgttttacctcacccagcaatggaccgccccctccagcctggctctgcaactggaattgcctatgaccccttgatgctgaaacaccagtgcgtttgtggcaattccaccacccaccctgagcatgctggacgaatacagagtatctggtcacgactgcaagaaactgggctgctaaataaatgtgagcgaattcaaggtcgaaaagccagcctggaggaaatacagcttgttcattctgaacatcactcactgttgtatggcaccaaccccctggacggacagaagctggaccccaggatactcctaggtgatgactctcaaaagtttttttcctcattaccttgtggtggacttggggtggacagtgacaccatttggaatgagctacactcgtccggtgctgcacgcatggctgttggctgtgtcatcgagctggcttccaaagtggcctcaggagagctgaagaatgggtttgctgttgtgaggccccctggccatcacgctgaagaatccacagccatggggttctgcttttttaattcagttgcaattaccgccaaatacttgagagaccaactaaatataagcaagatattgattgtagatctggatgttcaccatggaaacggtacccagcaggccttttatgctgaccccagcatcctgtacatttcactccatcgctatgatgaagggaactttttccctggcagtggagccccaaatgaggttggaacaggccttggagaagggtacaatataaatattgcctggacaggtggccttgatcctcccatgggagatgttgagtaccttgaagcattcaggaccatcgtgaagcctgtggccaaagagtttgatccagacatggtcttagtatctgctggatttgatgcattggaaggccacacccctcctctaggagggtacaaagtgacggcaaaatgttttggtcatttgacgaagcaattgatgacattggctgatggacgtgtggtgttggctctagaaggaggacatgatctcacagccatctgtgatgcatcagaagcctgtgtaaatgcccttctaggaaatgagctggagccacttgcagaagatattctccaccaaagcccgaatatgaatgctgttatttctttacagaagatcattgaaattcaaagcaagtattggaagtcagtaaggatggtggctgtgccaaggggctgtgctctggctggtgctcagttgcaagaggagacagagaccgtttctgccctggcctccctaacagtggatgtggaacagccctttgctcaggaagacagcagaactgctggtgagcctatggaagaggagccagccttgtgaagtgccaagtccccctctgatatttcctgtgtgtgacatcattgtgtatccccccaccccagtaccctcagacatgtcttgtctgctgcctgggtggcacagattcaatggaacataaacactgggcacaaaattctgaacagcagcttcacttgttctttggatggacttgaaagggcattaaagattccttaaacgtaaccgctgtgattctagagttacagtaaaccacgattggaagaaactgcttccagcatgcttttaatatgctgggtgacccactcctagacaccaagtttgaactagaaacattcagtacagcactagatattgttaatttcagaagctatgacagccagtgaaattttgggcaaaacctgagacatagtcattcctgacattctgatcagctttttttggggtaatttgtttttcaaacagtcttaacttgtttacaagatttgcttttagctatgaacggatcgtaattccacccagaatgtaatgtttcttgtttgtttgttttgttttgttagggtttttttctcaactttaacacacagttcaactgttcctagtaaaagttcaagatggaggaactagcatgaggcttttttcagtatctcgaagtccaaatgccaaaggaacctcacacactgtttgtaatggtgcaatattttatatcacttttttttaaacatccccaacatctttgtgttctcacacacaggcaatttgcaatgttgcaattgtgttggagaatgaagtccccccacctcccagccacacacacatcctttgttctcatgacagtaggtctgagcaaatgttccaccaagcattttcagtgtctttgaaaagcacgtaacttttcaaaggtggtcttaatttgttgcatatctatcaaggacttattcactcacctttccttttctgccctctatcaattgatttcttcttacctttcatcattcattccttcctttagaaaaactgaagattacccataatctcctcttattacttgagggccttgactatttagtttattttgtttactttacaggttaacacagttgttttgtctgattgcattttattaactgtgaagccgttgaaatgaatatcacttaagcaacgttgctaaatttctatgtgtttgaaatgtgttaatgaaggcactgcttatttgtagtcaccttgaactgacttaacctagaagctgtgccttcttgtgaaaaaaaaaaaaaacaaaaacaaaaaacagcctttaaacaagtttccttagtgtcaaaagttaaaaataaa

SEQ ID NO: 13780 - DNA, 799 bp, Homo sapiens
  source 1..799: mol_type = unassigned DNA
gctttagccaacttgagctgagagagactgagaaagggggaagagaggcacagacacagataggagaagggcaccggctggagccacttgcaggactgagggtttttgcaacaaaaccctagcagcctgaagaactctaagccaggtttaattggtttctttttctcgtgggtagacttaataattttctacgtattctgacaaagaaataaccccgaagcacgttcctatttcccacctgcttgtagtttccgggataacctaaactccagagagctatagcatccactctgtcctttctgctttgcacacagatggggtggctggacgagagcagctcttggctcagcaaagaatgcacagtatgatcagctcagtggatgtgaagtcagaagttcctgtgggcctggagcccatctcacctttagacctaaggacagacctcaggatgatgatgcccgtggtggaccctgttgtccgtgagaagcaattgcagcaggaattacttcttatccagcagcagcaacaaatccagaagcagcttctgatagcagagtttcagaaacagcatgagaacttgacacggcagcaccaggctcagcttcaggagcatatcaagttgcaacaggaacttctagccataaaacagcaacaagaactcctagaaaaggagcagaaactggagcagcagaggcaagaacaggaagtagagaggcatcgcagagaacagcagcttcctcctctcagaggcaaagatagaggacgagaaagggcagtggcaagtacagaagtaaagcag

SEQ ID NO: 13781 - DNA, 550 bp, Homo sapiens
  source 1..550: mol_type = unassigned DNA
aatattataacggatacagaaaagttcagaaggactgagctagtttgcgaaaccacagcacactttggcaaagagggaatgcacaacaaaacggatggggtggctggacgagagcagctcttggctcagcaaagaatgcacagtatgatcagctcagtggatgtgaagtcagaagttcctgtgggcctggagcccatctcacctttagacctaaggacagacctcaggatgatgatgcccgtggtggaccctgttgtccgtgagaagcaattgcagcaggaattacttcttatccagcagcagcaacaaatccagaagcagcttctgatagcagagtttcagaaacagcatgagaacttgacacggcagcaccaggctcagcttcaggagcatatcaagttgcaacaggaacttctagccataaaacagcaacaagaactcctagaaaaggagcagaaactggagcagcagaggcaagaacaggaagtagagaggcatcgcagagaacagcagcttcctcctctcagaggcaaagatagaggacgagaaa

SEQ ID NO: 13782 - DNA, 2524 bp, Homo sapiens
  source 1..2524: mol_type = unassigned DNA
gcagcgcgcaccgagccggccgcgccgcgcccgccgctctcgccgctttcgccgcggtctcctcctctagcgcccgccgcggccggtaaatctcggctggaggagcagcggcggcccccgagtcaactttcattccctttttgcttctgcctcaccattctcttctcctcctcgaaagatggctgtttggagaagggggagaagttaagaggtcgccagcgcggagcgaaggagggcgcgatagcctcagcaggagcgggcggaggtttctcctctgccaacccctcctggaccattgtcagcagttgaacgacaaaggctgtgaatctgcatcctagtcttagcagtccctctgattctcatgatgagctcacctgcacagcctgacctcatgtggaaccttgtaccatgggtgctattctgtggctgctgtaggatcttcccagatggggtggctggacgagagcagctcttggctcagcaaagaatgcacagtatgatcagctcagtggatgtgaagtcagaagttcctgtgggcctggagcccatctcacctttagacctaaggacagacctcaggatgatgatgcccgtggtggaccctgttgtccgtgagaagcaattgcagcaggaattacttcttatccagcagcagcaacaaatccagaagcagcttctgatagcagagtttcagaaacagcatgagaacttgacacggcagcaccaggctcagcttcaggagcatatcaaggaacttctagccataaaacagcaacaagaactcctagaaaaggagcagaaactggagcagcagaggcaagaacaggaagtagagaggcatcgcagagaacagcagcttcctcctctcagaggcaaagatagaggacgagaaagggcagtggcaagtacagaagtaaagcagaagcttcaagagttcctactgagtaaatcagcaacgaaagacactccaactaatggaaaaaatcattccgtgagccgccatcccaagctctggtacacggctgcccaccacacatcattggatcaaagctctccaccccttagtggaacatctccatcctacaagtacacattaccaggagcacaagatgcaaaggatgatttcccccttcgaaaaactgaatcctcagtcagtagcagttctccaggctctggtcccagttcaccaaacaatgggccaactggaagtgttactgaaaatgagacttcggttttgccccctacccctcatgccgagcaaatggtttcacagcaacgcattctaattcatgaagattccatgaacctgctaagtctttatacctctccttctttgcccaacattaccttggggcttcccgcagtgccatcccagctcaatgcttcgaattcactcaaagaaaagcagaagtgtgagacgcagacgcttaggcaaggtgttcctctgcctgggcagtatggaggcagcatcccggcatcttccagccaccctcatgttactttagagggaaagccacccaacagcagccaccaggctctcctgcagcatttattattgaaagaacaaatgcgacagcaaaagcttcttgtagctggtggagttcccttacatcctcagtctcccttggcaacaaaagagagaatttcacctggcattagaggtacccacaaattgccccgtcacagacccctgaaccgaacccagtctgcacctttgcctcagagcacgttggctcagctggtcattcaacagcaacaccagcaattcttggagaagcagaagcaataccagcagcagatccacatgaacaaactgctttcgaaatctattgaacaactgaagcaaccaggcagtcaccttgaggaagcagaggaagagcttcagggggaccaggcgatgcaggaagacagagcgccctctagtggcaacagcactaggagcgacagcagtgcttgtgtggatgacacactgggacaagttggggctgtgaaggtcaaggaggaaccagtggacagtgatgaagatgctcagatccaggaaatggaatctggggagcaggctgcttttatgcaacaggtaataggcaaagatttagctccaggatttgtaattaaagtcattatctgaacatgaaatgcattgcaggtttggtaaatggatatgatttcctatcagtttatatttctctatgatttgagttcagtgtttaaggattctacctaatgcagatatatgtatatatctatatagaggtctttctatatactgatctctatatagatatcaatgtttcattgaaaatccactggtaaggaaatacctgttatactaaaattatgatacataatatctgagcagttaataggctttaaatttatcccaaagcctgctacaccaattacttctaaagaaaacaaattcactgttattttgagtttatgtgttgagatcagtgactgctggatagtctcccagtctgatcaatgaagcattcgattagtttttgattttttgcaacatcta

SEQ ID NO: 13783 - DNA, 2359 bp, Homo sapiens
  source 1..2359: mol_type = unassigned DNA
ggcacagacacagataggagaagggcaccggctggagccacttgcaggactgagggtttttgcaacaaaaccctagcagcctgaagaactctaagccagatggggtggctggacgagagcagctcttggctcagcaaagaatgcacagtatgatcagctcagtggatgtgaagtcagaagttcctgtgggcctggagcccatctcacctttagacctaaggacagacctcaggatgatgatgcccgtggtggaccctgttgtccgtgagaagcaattgcagcaggaattacttcttatccagcagcagcaacaaatccagaagcagcttctgatagcagagtttcagaaacagcatgagaacttgacacggcagcaccaggctcagcttcaggagcatatcaaggaacttctagccataaaacagcaacaagaactcctagaaaaggagcagaaactggagcagcagaggcaagaacaggaagtagagaggcatcgcagagaacagcagcttcctcctctcagaggcaaagatagaggacgagaaagggcagtggcaagtacagaagtaaagcagaagcttcaagagttcctactgagtaaatcagcaacgaaagacactccaactaatggaaaaaatcattccgtgagccgccatcccaagctctggtacacggctgcccaccacacatcattggatcaaagctctccaccccttagtggaacatctccatcctacaagtacacattaccaggagcacaagatgcaaaggatgatttcccccttcgaaaaactgaatcctcagtcagtagcagttctccaggctctggtcccagttcaccaaacaatgggccaactggaagtgttactgaaaatgagacttcggttttgccccctacccctcatgccgagcaaatggtttcacagcaacgcattctaattcatgaagattccatgaacctgctaagtctttatacctctccttctttgcccaacattaccttggggcttcccgcagtgccatcccagctcaatgcttcgaattcactcaaagaaaagcagaagtgtgagacgcagacgcttaggcaaggtgttcctctgcctgggcagtatggaggcagcatcccggcatcttccagccaccctcatgttactttagagggaaagccacccaacagcagccaccaggctctcctgcagcatttattattgaaagaacaaatgcgacagcaaaagcttcttgtagctggtggagttcccttacatcctcagtctcccttggcaacaaaagagagaatttcacctggcattagaggtacccacaaattgccccgtcacagacccctgaaccgaacccagtctgcacctttgcctcagagcacgttggctcagctggtcattcaacagcaacaccagcaattcttggagaagcagaagcaataccagcagcagatccacatgaacaaactgctttcgaaatctattgaacaactgaagcaaccaggcagtcaccttgaggaagcagaggaagagcttcagggggaccaggcgatgcaggaagacagagcgccctctagtggcaacagcactaggagcgacagcagtgcttgtgtggatgacacactgggacaagttggggctgtgaaggtcaaggaggaaccagtggacagtgatgaagatgctcagatccaggaaatggaatctggggagcaggctgcttttatgcaacaggtaataggcaaagatttagctccaggatttgtaattaaagtcattatctgaacatgaaatgcattgcaggtttggtaaatggatatgatttcctatcagtttatatttctctatgatttgagttcagtgtttaaggattctacctaatgcagatatatgtatatatctatatagaggtctttctatatactgatctctatatagatatcaatgtttcattgaaaatccactggtaaggaaatacctgttatactaaaattatgatacataatatctgagcagttaataggctttaaatttatcccaaagcctgctacaccaattacttctaaagaaaacaaattcactgttattttgagtttatgtgttgagatcagtgactgctggatagtctcccagtctgatcaatgaagcattcgattagtttttgattttttgcaacatctagaatttaattttcacatcactgtacataatgtatcatactatagtcttgaacactgttaaaggtagtctgccccttccttcctctctctttttttagttaagtagaaatgttctggtcaccatgccagtagtcctaggttattgtgtaggttgcaattgaacatattaggaatacaggtggt

SEQ ID NO: 13784 - DNA, 3099 bp, Homo sapiens
  source 1..3099: mol_type = unassigned DNA
atgcacagtatgatcagctcagtggatgtgaagtcagaagttcctgtgggcctggagcccatctcacctttagacctaaggacagacctcaggatgatgatgcccgtggtggaccctgttgtccgtgagaagcaattgcagcaggaattacttcttatccagcagcagcaacaaatccagaagcagcttctgatagcagagtttcagaaacagcatgagaacttgacacggcagcaccaggctcagcttcaggagcatatcaaggaacttctagccataaaacagcaacaagaactcctagaaaaggagcagaaactggagcagcagaggcaagaacaggaagtagagaggcatcgcagagaacagcagcttcctcctctcagaggcaaagatagaggacgagaaagggcagtggcaagtacagaagtaaagcagaagcttcaagagttcctactgagtaaatcagcaacgaaagacactccaactaatggaaaaaatcattccgtgagccgccatcccaagctctggtacacggctgcccaccacacatcattggatcaaagctctccaccccttagtggaacatctccatcctacaagtacacattaccaggagcacaagatgcaaaggatgatttcccccttcgaaaaactgcctctgagcccaacttgaaggtgcggtccaggttaaaacagaaagtggcagagaggagaagcagccccttactcaggcggaaggatggaaatgttgtcacttcattcaagaagcgaatgtttgaggtgacagaatcctcagtcagtagcagttctccaggctctggtcccagttcaccaaacaatgggccaactggaagtgttactgaaaatgagacttcggttttgccccctacccctcatgccgagcaaatggtttcacagcaacgcattctaattcatgaagattccatgaacctgctaagtctttatacctctccttctttgcccaacattaccttggggcttcccgcagtgccatcccagctcaatgcttcgaattcactcaaagaaaagcagaagtgtgagacgcagacgcttaggcaaggtgttcctctgcctgggcagtatggaggcagcatcccggcatcttccagccaccctcatgttactttagagggaaagccacccaacagcagccaccaggctctcctgcagcatttattattgaaagaacaaatgcgacagcaaaagcttcttgtagctggtggagttcccttacatcctcagtctcccttggcaacaaaagagagaatttcacctggcattagaggtacccacaaattgccccgtcacagacccctgaaccgaacccagtctgcacctttgcctcagagcacgttggctcagctggtcattcaacagcaacaccagcaattcttggagaagcagaagcaataccagcagcagatccacatgaacaaactgctttcgaaatctattgaacaactgaagcaaccaggcagtcaccttgaggaagcagaggaagagcttcagggggaccaggcgatgcaggaagacagagcgccctctagtggcaacagcactaggagcgacagcagtgcttgtgtggatgacacactgggacaagttggggctgtgaaggtcaaggaggaaccagtggacagtgatgaagatgctcagatccaggaaatggaatctggggagcaggctgcttttatgcaacagcctttcctggaacccacgcacacacgtgcgctctctgtgcgccaagctccgctggctgcggttggcatggatggattagagaaacaccgtctcgtctccaggactcactcttcccctgctgcctctgttttacctcacccagcaatggaccgccccctccagcctggctctgcaactggaattgcctatgaccccttgatgctgaaacaccagtgcgtttgtggcaattccaccacccaccctgagcatgctggacgaatacagagtatctggtcacgactgcaagaaactgggctgctaaataaatgtgagcgaattcaaggtcgaaaagccagcctggaggaaatacagcttgttcattctgaacatcactcactgttgtatggcaccaaccccctggacggacagaagctggaccccaggatactcctaggtgatgactctcaaaagtttttttcctcattaccttgtggtggacttggggtggacagtgacaccatttggaatgagctacactcgtccggtgctgcacgcatggctgttggctgtgtcatcgagctggcttccaaagtggcctcaggagagctgaagaatgggtttgctgttgtgaggccccctggccatcacgctgaagaatccacagccatggggttctgcttttttaattcagttgcaattaccgccaaatacttgagagaccaactaaatataagcaagatattgattgtagatctggatgttcaccatggaaacggtacccagcaggccttttatgctgaccccagcatcctgtacatttcactccatcgctatgatgaagggaactttttccctggcagtggagccccaaatgaggttggaacaggccttggagaagggtacaatataaatattgcctggacaggtggccttgatcctcccatgggagatgttgagtaccttgaagcattcaggaccatcgtgaagcctgtggccaaagagtttgatccagacatggtcttagtatctgctggatttgatgcattggaaggccacacccctcctctaggagggtacaaagtgacggcaaaatgttttggtcatttgacgaagcaattgatgacattggctgatggacgtgtggtgttggctctagaaggaggacatgatctcacagccatctgtgatgcatcagaagcctgtgtaaatgcccttctaggaaatgagctggagccacttgcagaagatattctccaccaaagcccgaatatgaatgctgttatttctttacagaagatcattgaaattcaaagtatgtctttaaagttctcttaaaaattctaagcaggtaaaactaactaaaattatattgaaaattatagtacaaagaaacattta

SEQ ID NO: 13785 - DNA, 602 bp, Homo sapiens
  source 1..602: mol_type = unassigned DNA
gagtatacttagagtatggagctgacaaacattctctttccttctcctcctcctcctcctcattctgttgaattgctggtttctgtagtctattaggcttcttattaatagtaataaaatgttcattcattaactctctcatgcctgcataccagctatagtaactgtctttgcccccaagttatgcagtctttataaagtcgttcagtagcagggcaatgagttgggaaaactgatattgcatctgtagcatcaggtactatttaaccagtgggagggactgataaaattagcaagttgactaaccacttcccttccttgtggctctttaatattataacggatacagaaaagttcagaaggactgagctagtttgcgaaaccacagcacactttggcaaagagggaatgcacaacaaaacgggagtacctggtaaaatgctgtggtgtatggagacagttatgagaaactggagggaggatgatagttgagatggggtggctggacgagagcagctcttggctcagcaaagaatgcacagtatgatcagctcagtggatgtgaagtcagaagttcctgtgggcctggagcccatctcacc

SEQ ID NO: 13786 - DNA, 3210 bp, Homo sapiens
  source 1..3210: mol_type = unassigned DNA
atgcacagtatgatcagctcagtggatgtgaagtcagaagttcctgtgggcctggagcccatctcacctttagacctaaggacagacctcaggatgatgatgcccgtggtggaccctgttgtccgtgagaagcaattgcagcaggaattacttcttatccagcagcagcaacaaatccagaagcagcttctgatagcagagtttcagaaacagcatgagaacttgacacggcagcaccaggctcagcttcaggagcatatcaagttgcaacaggaacttctagccataaaacagcaacaagaactcctagaaaaggagcagaaactggagcagcagaggcaagaacaggaagtagagaggcatcgcagagaacagcagcttcctcctctcagaggcaaagatagaggacgagaaagggcagtggcaagtacagaagtaaagcagaagcttcaagagttcctactgagtaaatcagcaacgaaagacactccaactaatggaaaaaatcattccgtgagccgccatcccaagctctggtacacggctgcccaccacacatcattggatcaaagctctccaccccttagtggaacatctccatcctacaagtacacattaccaggagcacaagatgcaaaggatgatttcccccttcgaaaaactgcctctgagcccaacttgaaggtgcggtccaggttaaaacagaaagtggcagagaggagaagcagccccttactcaggcggaaggatggaaatgttgtcacttcattcaagaagcgaatgtttgaggtgacagaatcctcagtcagtagcagttctccaggctctggtcccagttcaccaaacaatgggccaactggaagtgttactgaaaatgagacttcggttttgccccctacccctcatgccgagcaaatggtttcacagcaacgcattctaattcatgaagattccatgaacctgctaagtctttatacctctccttctttgcccaacattaccttggggcttcccgcagtgccatcccagctcaatgcttcgaattcactcaaagaaaagcagaagtgtgagacgcagacgcttaggcaaggtgttcctctgcctgggcagtatggaggcagcatcccggcatcttccagccaccctcatgttactttagagggaaagccacccaacagcagccaccaggctctcctgcagcatttattattgaaagaacaaatgcgacagcaaaagcttcttgtagctggtggagttcccttacatcctcagtctcccttggcaacaaaagagagaatttcacctggcattagaggtacccacaaattgccccgtcacagacccctgaaccgaacccagtctgcacctttgcctcagagcacgttggctcagctggtcattcaacagcaacaccagcaattcttggagaagcagaagcaataccagcagcagatccacatgaacaaactgctttcgaaatctattgaacaactgaagcaaccaggcagtcaccttgaggaagcagaggaagagcttcagggggaccaggcgatgcaggaagacagagcgccctctagtggcaacagcactaggagcgacagcagtgcttgtgtggatgacacactgggacaagttggggctgtgaaggtcaaggaggaaccagtggacagtgatgaagatgctcagatccaggaaatggaatctggggagcaggctgcttttatgcaacagcctttcctggaacccacgcacacacgtgcgctctctgtgcgccaagctccgctggctgcggttggcatggatggattagagaaacaccgtctcgtctccaggactcactcttcccctgctgcctctgttttacctcacccagcaatggaccgccccctccagcctggctctgcaactggaattgcctatgaccccttgatgctgaaacaccagtgcgtttgtggcaattccaccacccaccctgagcatgctggacgaatacagagtatctggtcacgactgcaagaaactgggctgctaaataaatgtgagcgaattcaaggtcgaaaagccagcctggaggaaatacagcttgttcattctgaacatcactcactgttgtatggcaccaaccccctggacggacagaagctggaccccaggatactcctaggtgatgactctcaaaagtttttttcctcattaccttgtggtggacttggggtggacagtgacaccatttggaatgagctacactcgtccggtgctgcacgcatggctgttggctgtgtcatcgagctggcttccaaagtggcctcaggagagctgaagaatgggtttgctgttgtgaggccccctggccatcacgctgaagaatccacagccatggggttctgcttttttaattcagttgcaattaccgccaaatacttgagagaccaactaaatataagcaagatattgattgtagatctggatgttcaccatggaaacggtacccagcaggccttttatgctgaccccagcatcctgtacatttcactccatcgctatgatgaagggaactttttccctggcagtggagccccaaatgaggttggaacaggccttggagaagggtacaatataaatattgcctggacaggtggccttgatcctcccatgggagatgttgagtaccttgaagcattcaggaccatcgtgaagcctgtggccaaagagtttgatccagacatggtcttagtatctgctggatttgatgcattggaaggccacacccctcctctaggagggtacaaagtgacggcaaaatgttttggtcatttgacgaagcaattgatgacattggctgatggacgtgtggtgttggctctagaaggaggacatgatctcacagccatctgtgatgcatcagaagcctgtgtaaatgcccttctaggaaatgagctggagccacttgcagaagatattctccaccaaagcccgaatatgaatgctgttatttctttacagaagatcattgaaattcaaagcaagtattggaagtcagtaaggatggtggctgtgccaaggggctgtgctctggctggtgctcagttgcaagaggagacagagaccgtttctgccctggcctccctaacagtggatgtggaacagccctttgctcaggaagacagcagaactgctggtgagcctatggaagaggagccagccttgtga

SEQ ID NO: 13787 - DNA, 2307 bp, Homo sapiens
  source 1..2307: mol_type = unassigned DNA
ctccacttaacttctgccttgtggaaggggtggggaagcctttatcaatgggtaggtgggagaaccaggggaagactgtcagctacgattttctctagcctcaagaagactgagaccgagccaaactcctggccaacgtgctttgtggattcacagtgtagcttgagaaaaatgtggatgtgaagtcagaagttcctgtgggcctggagcccatctcacctttagacctaaggacagacctcaggatgatgatgcccgtggtggaccctgttgtccgtgagaagcaattgcagcaggaattacttcttatccagcagcagcaacaaatccagaagcagcttctgatagcagagtttcagaaacagcatgagaacttgacacggcagcaccaggctcagcttcaggagcatatcaagttgcaacaggaacttctagccataaaacagcaacaagaactcctagaaaaggagcagaaactggagcagcagaggcaagaacaggaagtagagaggcatcgcagagaacagcagcttcctcctctcagaggcaaagatagaggacgagaaagggcagtggcaagtacagaagtaaagcagaagcttcaagagttcctactgagtaaatcagcaacgaaagacactccaactaatggaaaaaatcattccgtgagccgccatcccaagctctggtacacggctgcccaccacacatcattggatcaaagctctccaccccttagtggaacatctccatcctacaagtacacattaccaggagcacaagatgcaaaggatgatttcccccttcgaaaaactgcctctgagcccaacttgaaggtgcggtccaggttaaaacagaaagtggcagagaggagaagcagccccttactcaggcggaaggatggaaatgttgtcacttcattcaagaagcgaatgtttgaggtgacagaatcctcagtcagtagcagttctccaggctctggtcccagttcaccaaacaatgggccaactggaagtgttactgaaaatgagacttcggttttgccccctacccctcatgccgagcaaatggtttcacagcaacgcattctaattcatgaagattccatgaacctgctaagtctttatacctctccttctttgcccaacattaccttggggcttcccgcagtgccatcccagctcaatgcttcgaattcactcaaagaaaagcagaagtgtgagacgcagacgcttaggcaaggtgttcctctgcctgggcagtatggaggcagcatcccggcatcttccagccaccctcatgttactttagagggaaagccacccaacagcagccaccaggctctcctgcagcatttattattgaaagaacaaatgcgacagcaaaagcttcttgtagctggtggagttcccttacatcctcagtctcccttggcaacaaaagagagaatttcacctggcattagaggtacccacaaattgccccgtcacagacccctgaaccgaacccagtctgcacctttgcctcagagcacgttggctcagctggtcattcaacagcaacaccagcaattcttggagaagcagaagcaataccagcagcagatccacatgaacaaactgctttcgaaatctattgaacaactgaagcaaccaggcagtcaccttgaggaagcagaggaagagcttcagggggaccaggcgatgcaggaagacagagcgccctctagtggcaacagcactaggagcgacagcagtgcttgtgtggatgacacactgggacaagttggggctgtgaaggtcaaggaggaaccagtggacagtgatgaagatgctcagatccaggaaatggaatctggggagcaggctgcttttatgcaacaggtaataggcaaagatttagctccaggatttgtaattaaagtcattatctgaacatgaaatgcattgcaggtttggtaaatggatatgatttcctatcagtttatatttctctatgatttgagttcagtgtttaaggattctacctaatgcagatatatgtatatatctatatagaggtctttctatatactgatctctatatagatatcaatgtttcattgaaaatccactggtaaggaaatacctgttatactaaaattatgatacataatatctgagcagttaataggctttaaatttatcccaaagcctgctacaccaattacttctaaagaaaacaaattcactgttattttgagtttatgtgttgagatcagtgactgctggatagtctcccagtctgatcaatgaagcattcgattag

SEQ ID NO: 13788 - DNA, 2199 bp, Homo sapiens
  source 1..2199: mol_type = unassigned DNA
tttatcaatgggtaggtgggagaaccaggggaagactgtcagctacgattttctctagcctcaagaagactgagaccgagccaaactcctggccaacgtgctttgtggattcacagtgtagcttgagaaaaatgtggatgtgaagtcagaagttcctgtgggcctggagcccatctcacctttagacctaaggacagacctcaggatgatgatgcccgtggtggaccctgttgtccgtgagaagcaattgcagcaggaattacttcttatccagcagcagcaacaaatccagaagcagcttctgatagcagagtttcagaaacagcatgagaacttgacacggcagcaccaggctcagcttcaggagcatatcaaggaacttctagccataaaacagcaacaagaactcctagaaaaggagcagaaactggagcagcagaggcaagaacaggaagtagagaggcatcgcagagaacagcagcttcctcctctcagaggcaaagatagaggacgagaaagggcagtggcaagtacagaagtaaagcagaagcttcaagagttcctactgagtaaatcagcaacgaaagacactccaactaatggaaaaaatcattccgtgagccgccatcccaagctctgggctgcccaccacacatcattggatcaaagctctccaccccttagtggaacatctccatcctacaagtacacattaccaggagcacaagatgcaaaggatgatttcccccttcgaaaaactgaatcctcagtcagtagcagttctccaggctctggtcccagttcaccaaacaatgggccaactggaagtgttactgaaaatgagacttcggttttgccccctacccctcatgccgagcaaatggtttcacagcaacgcattctaattcatgaagattccatgaacctgctaagtctttatacctctccttctttgcccaacattaccttggggcttcccgcagtgccatcccagctcaatgcttcgaattcactcaaagaaaagcagaagtgtgagacgcagacgcttaggcaaggtgttcctctgcctgggcagtatggaggcagcatcccggcatcttccagccaccctcatgttactttagagggaaagccacccaacagcagccaccaggctctcctgcagcatttattattgaaagaacaaatgcgacagcaaaagcttcttgtagctggtggagttcccttacatcctcagtctcccttggcaacaaaagagagaatttcacctggcattagaggtacccacaaattgccccgtcacagacccctgaaccgaacccagtctgcacctttgcctcagagcacgttggctcagctggtcattcaacagcaacaccagcaattcttggagaagcagaagcaataccagcagcagatccacatgaacaaactgctttcgaaatctattgaacaactgaagcaaccaggcagtcaccttgaggaagcagaggaagagcttcagggggaccaggcgatgcaggaagacagagcgccctctagtggcaacagcactaggagcgacagcagtgcttgtgtggatgacacactgggacaagttggggctgtgaaggtcaaggaggaaccagtggacagtgatgaagatgctcagatccaggaaatggaatctggggagcaggctgcttttatgcaacaggtaataggcaaagatttagctccaggatttgtaattaaagtcattatctgaacatgaaatgcattgcaggtttggtaaatggatatgatttcctatcagtttatatttctctatgatttgagttcagtgtttaaggattctacctaatgcagatatatgtatatatctatatagaggtctttctatatactgatctctatatagatatcaatgtttcattgaaaatccactggtaaggaaatacctgttatactaaaattatgatacataatatctgagcagttaataggctttaaatttatcccaaagcctgctacaccaattacttctaaagaaaacaaattcactgttattttgagtttatgtgttgagatcagtgactgctggatagtctcccagtctgatcaatgaagcattcgattagtttttgattttttgcaacatctagaatttaattttcacatcactgtacataatgtatcatactatagtcttgaacactg

SEQ ID NO: 13789 - DNA, 2927 bp, Homo sapiens
  source 1..2927: mol_type = unassigned DNA
gctggttgggacccgggaaggcctccctcttaaggtctttcccacacctctgcaccttgttacctgactttcggcttcaggatccgcagcgtgcacccgcgttccatctgtcttctgagactttgcccttctccaggaagagcactcaggagaccaggaaaatggccacagggctcctgagagccaaaaaagagctggcaagcagatgaattaactcccccaagcttctagctgtgtttctactcagtgggagagatttggagtgaatcatgagggtcaaccacacagtgtctacaatgctccctacatgcatggttcacagacaaaccatgagttgttccggggctggaggaataacggcgttcgtggcattcagggatgtggctgtgtacttcacccaggaggagtggaggttgttgagccctgctcagaggaccctgcacagggaggtgatgctggagacttataaccatctggtctcactggaaattccatcttctaaaccaaaactcattgctcagctggagcgaggggaagcgccctggagagaggagagaaaatgtccactggacctctgtccagaatcgaagccagaaattcaacttagtccctcctgccctctgattttctccagtcagcaagctctcagccaacatgtgtggctgagtcatctctctcagctgttttcaagtttatgggcaggaaatcctctccacctgggaaaacactatccagaagatcagaaacaacagcaggatccattctgctttagtggcaaagcagaatggattcaagagggagaagactccagactcctgtttgggagagtaagcaaaaatggcacttcaaaggcactttccagcccacctgaagaacaacagccagcacagtccaaggaagacaacacagtggtggatatagggtccagccctgaacggagggcagatctagaggaaacagacaaagtattgcatggtttagaagtctcaggatttggagaaatcaaatatgaagagtttgggccaggctttatcaaggagtcaaacctccttagcctccagaagacacaaactggggagacaccttacatgtacactgagtggggagacagctttggcagtatgtcagtcctcatcaaaaacccaaggacacactctgggggaaagccttatgtgtgcagggaatgtgggcgaggctttacgtggaagtcaaacctgatcacacatcagaggacacactcaggggagaaaccttatgtgtgcaaggattgtggacgaggctttacttggaagtcgaacctctttacacatcagcggacacactcagggctcaagccttatgtgtgcaaggaatgtgggcagagctttagcctgaagtcaaacctcattacccaccagagggcgcacactggggagaagccttatgtttgcagggaatgtgggcgtggctttcgccagcattcacacctggtcagacacaagaggacacattcaggagagaagccttacatttgcagggagtgtgagcaaggctttagccagaagtcacacctcatcagacacttaaggacacacacaggagagaagccttatgtatgcacagaatgtgggcgtcactttagctggaaatcaaacctcaaaacacaccagaggacacactcaggggttaaaccttatgtctgcctggagtgcgggcagtgctttagcctgaagtcaaaccttaacaaacaccagaggtcacacacgggggagaagccatttgtatgtacggagtgtgggcgaggctttacccggaaatcaaccctgagcacgcaccagaggacacactcaggggagaagccatttgtatgtgctgagtgtggacgaggctttaatgataagtccaccctcatttcacaccagaggacacattcaggggaaaagccttttatgtgcagggagtgtggcagaaggtttcggcagaagcctaacctgtttaggcacaagagggcacactcaggtgcctttgtgtgcagggagtgtgggcaaggcttttgtgctaagttaactctcattaaacaccagagagcacacgcaggggggaagcctcatgtgtgcagggagtgtgggcaaggctttagccggcagtcacacctcattagacaccagaggacacattcaggagagaagccttatatttgcagaaagtgtggacggggctttagtcggaagtccaaccttatcagacatcagaggacacactcaggatagaaactttatgtgtatagggaatgtggtacagcctttagccaggagtcatacttcatcagacaccagaggacacacacagtgctgtggctttttcagccattgctagataccaaagtggagacattctgtgtgtgattatgcatgagactgtactggtaagacttgtatctccatccacctgaaggagaattgctggctcattttcaggagccctgcccttcctcactgtggatggtgggttgtggaaacccggtcaggtaatgatagtggcaggaggcagtcaaatgcccaggcagataggggtgggtacctggtgaaacccaaccttaaagctgaagacagtcccggctaaatcctcatactgaattgagaacctgtcttcccatttggtgtgctttcctccgattgatcccaacccttcacctattttacgtatacctgccctttcctaattggtttttacactgctgtgcccaccttttgagtggtgcctttgcatacttacaaatcagtcaacgtgtattcccctattctgagcccataaaagacccagactcagctgcagtgaggagagaaatcaccctgctgtgggggttggggaccactccctgcatcccctctccactgagagctgttcttttgctcaataaaattcttttctacccatcctcacccttc

SEQ ID NO: 13790 - DNA, 2772 bp, Homo sapiens
  source 1..2772: mol_type = unassigned DNA
caggcgcgttaagctggttgggacccgggaaggcctccctcttaaggtctttcccacacctctgcaccttgttacctgactttcggcttcaggatccgcagcgtgcacccgcgttccatctgtcttctgagactttgcccttctccaggaagagcactcaggagaccaggaaaatggccacagggctcctgagagccaaaaaagaggcgttcgtggcattcagggatgtggctgtgtacttcacccaggaggagtggaggttgttgagccctgctcagaggaccctgcacagggaggtgatgctggagacttataaccatctggtctcactggaaattccatcttctaaaccaaaactcattgctcagctggagcgaggggaagcgccctggagagaggagagaaaatgtccactggacctctgtccagaatcgaagccagaaattcaacttagtccctcctgccctctgattttctccagtcagcaagctctcagccaacatgtgtggctgagtcatctctctcagctgttttcaagtttatgggcaggaaatcctctccacctgggaaaacactatccagaagatcagaaacaacagcaggatccattctgctttagtggcaaagcagaatggattcaagagggagaagactccagactcctgtttgggagagtaagcaaaaatggcacttcaaaggcactttccagcccacctgaagaacaacagccagcacagtccaaggaagacaacacagtggtggatatagggtccagccctgaacggagggcagatctagaggaaacagacaaagtattgcatggtttagaagtctcaggatttggagaaatcaaatatgaagagtttgggccaggctttatcaaggagtcaaacctccttagcctccagaagacacaaactggggagacaccttacatgtacactgagtggggagacagctttggcagtatgtcagtcctcatcaaaaacccaaggacacactctgggggaaagccttatgtgtgcagggaatgtgggcgaggctttacgtggaagtcaaacctgatcacacatcagaggacacactcaggggagaaaccttatgtgtgcaaggattgtggacgaggctttacttggaagtcgaacctctttacacatcagcggacacactcagggctcaagccttatgtgtgcaaggaatgtgggcagagctttagcctgaagtcaaacctcattacccaccagagggcgcacactggggagaagccttatgtttgcagggaatgtgggcgtggctttcgccagcattcacacctggtcagacacaagaggacacattcaggagagaagccttacatttgcagggagtgtgagcaaggctttagccagaagtcacacctcatcagacacttaaggacacacacaggagagaagccttatgtatgcacagaatgtgggcgtcactttagctggaaatcaaacctcaaaacacaccagaggacacactcaggggttaaaccttatgtctgcctggagtgcgggcagtgctttagcctgaagtcaaaccttaacaaacaccagaggtcacacacgggggagaagccatttgtatgtacggagtgtgggcgaggctttacccggaaatcaaccctgagcacgcaccagaggacacactcaggggagaagccatttgtatgtgctgagtgtggacgaggctttaatgataagtccaccctcatttcacaccagaggacacattcaggggaaaagccttttatgtgcagggagtgtggcagaaggtttcggcagaagcctaacctgtttaggcacaagagggcacactcaggtgcctttgtgtgcagggagtgtgggcaaggcttttgtgctaagttaactctcattaaacaccagagagcacacgcaggggggaagcctcatgtgtgcagggagtgtgggcaaggctttagccggcagtcacacctcattagacaccagaggacacattcaggagagaagccttatatttgcagaaagtgtggacggggctttagtcggaagtccaaccttatcagacatcagaggacacactcaggatagaaactttatgtgtatagggaatgtggtacagcctttagccaggagtcatacttcatcagacaccagaggacacacacagtgctgtggctttttcagccattgctagataccaaagtggagacattctgtgtgtgattatgcatgagactgtactggtaagacttgtatctccatccacctgaaggagaattgctggctcattttcaggagccctgcccttcctcactgtggatggtgggttgtggaaacccggtcaggtaatgatagtggcaggaggcagtcaaatgcccaggcagataggggtgggtacctggtgaaacccaaccttaaagctgaagacagtcccggctaaatcctcatactgaattgagaacctgtcttcccatttggtgtgctttcctccgattgatcccaacccttcacctattttacgtatacctgccctttcctaattggtttttacactgctgtgcccaccttttgagtggtgcctttgcatacttacaaatcagtcaacgtgtattcccctattctgagcccataaaagacccagactcagctgcagtgaggagagaaatcaccctgctgtgggggttggggaccactccctgcatcccctctccactgagagctgttcttttgctcaataaaattcttttctacccatcctcaccct

SEQ ID NO: 13791 - DNA, 2081 bp, Homo sapiens
  source 1..2081: mol_type = unassigned DNA
acttccggtcggtggcccaggcgcgttaagctggttgggacccgggaaggcctccctcttaaggtctttcccacacctctgcaccttgttacctgactttcggcttcaggatccgcagcgtgcacccgcgttccgcgttcgtggcattcagggatgtggctgtgtacttcacccaggaggagtggaggttgttgagccctgctcagaggaccctgcacagggaggtgatgctggagacttataaccatctggtctcactggaaattccatcttctaaaccaaaactcattgctcagctggagcgaggggaagcgccctggagagaggagagaaaatgtccactggacctctgtccagaatcgaagccagaaattcaacttagtccctcctgccctctgattttctccagtcagcaagctctcagccaacatgtgtggctgagtcatctctctcagctgttttcaagtttatgggcaggaaatcctctccacctgggaaaacactatccagaagatcagaaacaacagcaggatccattctgctttagtggcaaagcagaatggattcaagagggagaagactccagactcctgtttgggagagtaagcaaaaatggcacttcaaaggcactttccagcccacctgaagaacaacagccagcacagtccaaggaagacaacacagtggtggatatagggtccagccctgaacggagggcagatctagaggaaacagacaaagtattgcatggtttagaagtctcaggatttggagaaatcaaatatgaagagtttgggccaggctttatcaaggagtcaaacctccttagcctccagaagtcacacctcatcagacacttaaggacacacacaggagagaagccttatgtatgcacagaatgtgggcgtcactttagctggaaatcaaacctcaaaacacaccagaggacacactcaggggttaaaccttatgtctgcctggagtgcgggcagtgctttagcctgaagtcaaaccttaacaaacaccagaggtcacacacgggggagaagccatttgtatgtacggagtgtgggcgaggctttacccggaaatcaaccctgagcacgcaccagaggacacactcaggggagaagccatttgtatgtgctgagtgtggacgaggctttaatgataagtccaccctcatttcacaccagaggacacattcaggggaaaagccttttatgtgcagggagtgtggcagaaggtttcggcagaagcctaacctgtttaggcacaagagggcacactcaggtgcctttgtgtgcagggagtgtgggcaaggcttttgtgctaagttaactctcattaaacaccagagagcacacgcaggggggaagcctcatgtgtgcagggagtgtgggcaaggctttagccggcagtcacacctcattagacaccagaggacacattcaggagagaagccttatatttgcagaaagtgtggacggggctttagtcggaagtccaaccttatcagacatcagaggacacactcaggatagaaactttatgtgtatagggaatgtggtacagcctttagccaggagtcatacttcatcagacaccagaggacacacacagtgctgtggctttttcagccattgctagataccaaagtggagacattctgtgtgtgattatgcatgagactgtactggtaagacttgtatctccatccacctgaaggagaattgctggctcattttcaggagccctgcccttcctcactgtggatggtgggttgtggaaacccggtcaggtaatgatagtggcaggaggcagtcaaatgcccaggcagataggggtgggtacctggtgaaacccaaccttaaagctgaagacagtcccggctaaatcctcatactgaattgagaacctgtcttcccatttggtgtgctttcctccgattgatcccaacccttcacctattttacgtatacctgccctttcctaattggtttttacactgctgtgcccaccttttgagtggtgcctttgcatacttacaaatcagtcaacgtgtattcccctattctgag

SEQ ID NO: 13792 - DNA, 2757 bp, Homo sapiens
  source 1..2757: mol_type = unassigned DNA
aactgacgtgctgagcagctaattcagtgcctgaggttacactagttgtggacagagatgggttccaaatccagatagtatgggttgaatccacgctcttcatcaccacccactttccctccttaggcctgagcaggcacgtggcagcatttggtagaggaaggagtgagccctgctgtaggaactatatatattggcgttcgtggcattcagggatgtggctgtgtacttcacccaggaggagtggaggttgttgagccctgctcagaggaccctgcacagggaggtgatgctggagacttataaccatctggtctcactggaaattccatcttctaaaccaaaactcattgctcagctggagcgaggggaagcgccctggagagaggagagaaaatgtccactggacctctgtccagaatcgaagccagaaattcaacttagtccctcctgccctctgattttctccagtcagcaagctctcagccaacatgtgtggctgagtcatctctctcagctgttttcaagtttatgggcaggaaatcctctccacctgggaaaacactatccagaagatcagaaacaacagcaggatccattctgctttagtggcaaagcagaatggattcaagagggagaagactccagactcctgtttgggagagtaagcaaaaatggcacttcaaaggcactttccagcccacctgaagaacaacagccagcacagtccaaggaagacaacacagtggtggatatagggtccagccctgaacggagggcagatctagaggaaacagacaaagtattgcatggtttagaagtctcaggatttggagaaatcaaatatgaagagtttgggccaggctttatcaaggagtcaaacctccttagcctccagaagacacaaactggggagacaccttacatgtacactgagtggggagacagctttggcagtatgtcagtcctcatcaaaaacccaaggacacactctgggggaaagccttatgtgtgcagggaatgtgggcgaggctttacgtggaagtcaaacctgatcacacatcagaggacacactcaggggagaaaccttatgtgtgcaaggattgtggacgaggctttacttggaagtcgaacctctttacacatcagcggacacactcagggctcaagccttatgtgtgcaaggaatgtgggcagagctttagcctgaagtcaaacctcattacccaccagagggcgcacactggggagaagccttatgtttgcagggaatgtgggcgtggctttcgccagcattcacacctggtcagacacaagaggacacattcaggagagaagccttacatttgcagggagtgtgagcaaggctttagccagaagtcacacctcatcagacacttaaggacacacacaggagagaagccttatgtatgcacagaatgtgggcgtcactttagctggaaatcaaacctcaaaacacaccagaggacacactcaggggttaaaccttatgtctgcctggagtgcgggcagtgctttagcctgaagtcaaaccttaacaaacaccagaggtcacacacgggggagaagccatttgtatgtacggagtgtgggcgaggctttacccggaaatcaaccctgagcacgcaccagaggacacactcaggggagaagccatttgtatgtgctgagtgtggacgaggctttaatgataagtccaccctcatttcacaccagaggacacattcaggggaaaagccttttatgtgcagggagtgtggcagaaggtttcggcagaagcctaacctgtttaggcacaagagggcacactcaggtgcctttgtgtgcagggagtgtgggcaaggcttttgtgctaagttaactctcattaaacaccagagagcacacgcaggggggaagcctcatgtgtgcagggagtgtgggcaaggctttagccggcagtcacacctcattagacaccagaggacacattcaggagagaagccttatatttgcagaaagtgtggacggggctttagtcggaagtccaaccttatcagacatcagaggacacactcaggatagaaactttatgtgtatagggaatgtggtacagcctttagccaggagtcatacttcatcagacaccagaggacacacacagtgctgtggctttttcagccattgctagataccaaagtggagacattctgtgtgtgattatgcatgagactgtactggtaagacttgtatctccatccacctgaaggagaattgctggctcattttcaggagccctgcccttcctcactgtggatggtgggttgtggaaacccggtcaggtaatgatagtggcaggaggcagtcaaatgcccaggcagataggggtgggtacctggtgaaacccaaccttaaagctgaagacagtcccggctaaatcctcatactgaattgagaacctgtcttcccatttggtgtgctttcctccgattgatcccaacccttcacctattttacgtatacctgccctttcctaattggtttttacactgctgtgcccaccttttgagtggtgcctttgcatacttacaaatcagtcaacgtgtattcccctattctgagcccataaaagacccagactcagctgcagtgaggagagaaatcaccctgctgtgggggttggggaccactccctgcatcccctctccactgagagctgttcttttgctcaataaaattcttttctacccatcctc

SEQ ID NO: 13793 - DNA, 2750 bp, Homo sapiens
  source 1..2750: mol_type = unassigned DNA
aagctggttgggacccgggaaggcctccctcttaaggtctttcccacacctctgcaccttgttacctgactttcggcttcaggatccgcagcgtgcacccgcgttccatctgtcttctgagactttgcccttctccaggaagagcactcaggagaccaggaaaatggccacagggctcctgagagccaaaaaagaggcgttcgtggcattcagggatgtggctgtgtacttcacccaggaggagtggaggttgttgagccctgctcagaggaccctgcacagggaggtgatgctggagacttataaccatctggtctcactggaaattccatcttctaaaccaaaactcattgctcagctggagcgaggggaagcgccctggagagaggagagaaaatgtccactggacctctgtccagcagaatcgaagccagaaattcaacttagtccctcctgccctctgattttctccagtcagcaagctctcagccaacatgtgtggctgagtcatctctctcagctgttttcaagtttatgggcaggaaatcctctccacctgggaaaacactatccagaagatcagaaacaacagcaggatccattctgctttagtggcaaagcagaatggattcaagagggagaagactccagactcctgtttgggagagtaagcaaaaatggcacttcaaaggcactttccagcccacctgaagaacaacagccagcacagtccaaggaagacaacacagtggtggatatagggtccagccctgaacggagggcagatctagaggaaacagacaaagtattgcatggtttagaagtctcaggatttggagaaatcaaatatgaagagtttgggccaggctttatcaaggagtcaaacctccttagcctccagaagacacaaactggggagacaccttacatgtacactgagtggggagacagctttggcagtatgtcagtcctcatcaaaaacccaaggacacactctgggggaaagccttatgtgtgcagggaatgtgggcgaggctttacgtggaagtcaaacctgatcacacatcagaggacacactcaggggagaaaccttatgtgtgcaaggattgtggacgaggctttacttggaagtcgaacctctttacacatcagcggacacactcagggctcaagccttatgtgtgcaaggaatgtgggcagagctttagcctgaagtcaaacctcattacccaccagagggcgcacactggggagaagccttatgtttgcagggaatgtgggcgtggctttcgccagcattcacacctggtcagacacaagaggacacattcaggagagaagccttacatttgcagggagtgtgagcaaggctttagccagaagtcacacctcatcagacacttaaggacacacacaggagagaagccttatgtatgcacagaatgtgggcgtcactttagctggaaatcaaacctcaaaacacaccagaggacacactcaggggttaaaccttatgtctgcctggagtgcgggcagtgctttagcctgaagtcaaaccttaacaaacaccagaggtcacacacgggggagaagccatttgtatgtacggagtgtgggcgaggctttacccggaaatcaaccctgagcacgcaccagaggacacactcaggggagaagccatttgtatgtgctgagtgtggacgaggctttaatgataagtccaccctcatttcacaccagaggacacattcaggggaaaagccttttatgtgcagggagtgtggcagaaggtttcggcagaagcctaacctgtttaggcacaagagggcacactcaggtgcctttgtgtgcagggagtgtgggcaaggcttttgtgctaagttaactctcattaaacaccagagagcacacgggggaagcctcatgtgtgcagggagtgtgggcaaggctttagccggcagtcacacctcattagacaccagaggacacattcaggagagaagccttatatttgcagaaagtgtggacggggctttagtcggaagtccaaccttatcagacatcagaggacacactcaggatagaaactttatgtgtatagggaatgtggtacagcctttagccaggagtcatacttcatcagacaccagaggacacacacagtgctgtggctttttcagccattgctagataccaaagtggagacattctgtgtgtgattatgcatgagactgtactggtaagacttgtatctccatccacctgaaggagaattgctggctcattttcaggagccctgcccttcctcactgtggatggtgggttgtggaaacccggtcaggtaatgatagtggcaggaggcagtcaaatgcccaggcagataggggtgggtacctggtgaaacccaaccttaaagctgaagacagtcccggctaaatcctcatactgaattgagaacctgtcttcccatttggtgtgctttcctccgattgatcccaacccttcacctattttacgtatacctgccctttcctaattggtttttacactgctgtgcccaccttttgagtggtgcctttgcatacttacaaatcagtcaacgtgtattcccctattctgagcccataaaagacccagactcagctgcagtgaggagagaaatcaccctgctgtgggggttggggaccactccctgcatcccctctccactgagagctgttcttttgctcaataaaattcttttctaccc

SEQ ID NO: 13794 - DNA, 2854 bp, Homo sapiens
  source 1..2854: mol_type = unassigned DNA
gggtctgcagatggcgtccgagtgcacagtggccagtgtgattccgcagtcttgggctgttcggccaagcgcccaccggacgtgggacgctggagggtcagcagcgtggagtcctggccttcagcgtccgcggctgggaaatcggccatcgccacggcgggaactaggactggctgcgtcccggcccttccccatccgtccaccggactcgtgggcgcccgcactgactgtgatgtagtttcctgacctctgacacgtattgtctcaagattaaaggaatcaggagcttcttttgctgttcttctgttttggatgcattggaaggtccagatttggaacaagtctctctagagattgaacagagctgcgcctggaacccgccgcagggaggagacctgaagaccagaggaaacacagcaaaaattccatcttctaaaccaaaactcattgctcagctggagcgaggggaagcgccctggagagaggagagaaaatgtccactggacctctgtccagaatcgaagccagaaattcaacttagtccctcctgccctctgattttctccagtcagcaagctctcagccaacatgtgtggctgagtcatctctctcagctgttttcaagtttatgggcaggaaatcctctccacctgggaaaacactatccagaagatcagaaacaacagcaggatccattctgctttagtggcaaagcagaatggattcaagagggagaagactccagactcctgtttgggagagtaagcaaaaatggcacttcaaaggcactttccagcccacctgaagaacaacagccagcacagtccaaggaagacaacacagtggtggatatagggtccagccctgaacggagggcagatctagaggaaacagacaaagtattgcatggtttagaagtctcaggatttggagaaatcaaatatgaagagtttgggccaggctttatcaaggagtcaaacctccttagcctccagaagacacaaactggggagacaccttacatgtacactgagtggggagacagctttggcagtatgtcagtcctcatcaaaaacccaaggacacactctgggggaaagccttatgtgtgcagggaatgtgggcgaggctttacgtggaagtcaaacctgatcacacatcagaggacacactcaggggagaaaccttatgtgtgcaaggattgtggacgaggctttacttggaagtcgaacctctttacacatcagcggacacactcagggctcaagccttatgtgtgcaaggaatgtgggcagagctttagcctgaagtcaaacctcattacccaccagagggcgcacactggggagaagccttatgtttgcagggaatgtgggcgtggctttcgccagcattcacacctggtcagacacaagaggacacattcaggagagaagccttacatttgcagggagtgtgagcaaggctttagccagaagtcacacctcatcagacacttaaggacacacacaggagagaagccttatgtatgcacagaatgtgggcgtcactttagctggaaatcaaacctcaaaacacaccagaggacacactcaggggttaaaccttatgtctgcctggagtgcgggcagtgctttagcctgaagtcaaaccttaacaaacaccagaggtcacacacgggggagaagccatttgtatgtacggagtgtgggcgaggctttacccggaaatcaaccctgagcacgcaccagaggacacactcaggggagaagccatttgtatgtgctgagtgtggacgaggctttaatgataagtccaccctcatttcacaccagaggacacattcaggggaaaagccttttatgtgcagggagtgtggcagaaggtttcggcagaagcctaacctgtttaggcacaagagggcacactcaggtgcctttgtgtgcagggagtgtgggcaaggcttttgtgctaagttaactctcattaaacaccagagagcacacgcaggggggaagcctcatgtgtgcagggagtgtgggcaaggctttagccggcagtcacacctcattagacaccagaggacacattcaggagagaagccttatatttgcagaaagtgtggacggggctttagtcggaagtccaaccttatcagacatcagaggacacactcaggatagaaactttatgtgtatagggaatgtggtacagcctttagccaggagtcatacttcatcagacaccagaggacacacacagtgctgtggctttttcagccattgctagataccaaagtggagacattctgtgtgtgattatgcatgagactgtactggtaagacttgtatctccatccacctgaaggagaattgctggctcattttcaggagccctgcccttcctcactgtggatggtgggttgtggaaacccggtcaggtaatgatagtggcaggaggcagtcaaatgcccaggcagataggggtgggtacctggtgaaacccaaccttaaagctgaagacagtcccggctaaatcctcatactgaattgagaacctgtcttcccatttggtgtgctttcctccgattgatcccaacccttcacctattttacgtatacctgccctttcctaattggtttttacactgctgtgcccaccttttgagtggtgcctttgcatacttacaaatcagtcaacgtgtattcccctattctgagcccataaaagacccagactcagctgcagtgaggagagaaatcaccctgctgtgggggttggggaccactccctgcatcccctctccactgagagctgttcttttgctcaataaaattcttttctacccatcctc

SEQ ID NO: 13795 - DNA, 4047 bp, Homo sapiens
  source 1..4047: mol_type = unassigned DNA
cttctccaagatggcggcgatcggcggcgttgaggcgggatccgggcgagccgagtgaagacctggtcctgtagacgggaaggagcctggacacagtgacacattctcaaaggccctgcaggaccaccatggcttatgatgactccgtgaagaaagaagattgttttgatggtgatcatacctttgaggacataggacttgcagctggccgaagccaacgagagaaaaaacgttcttacaaagattttttaagggaagaggaagaaattgctgctcaggtcaggaattcttccaagaagaagttgaaggatagtgaactttacttcttggggacggacacacacaagaagaagaggaagcactcctctgatgattactactatggagatatttcgtctttggaatcgtcacagaagaaaaagaaaaagtccagcccacagtctactgatacagctatggacctgttgaaagctatcacttccccactggcagcaggctccaagccctccaaaaagactggggagaaatcctctggctcttcaagccattcggagagtaaaaaggagcaccacaggaagaaagtcagtggaagcagtggggaactacccctagaggatggtggctcccacaaatcgaaaaaaatgaaacctctctatgtgaacacagagacactgacccttcgggagcctgatggtttaaaaatgaaacttattctgtcaccaaaggagaagggaagcagctctgttgatgaggagtcttttcaatatccctcccaacaagcgactgtgaaaaaatcctcaaagaaatcagctcgggatgagcagggtgctttactcctaggacatgagttacagagctttctgaaaacagcccggaaaaagcacaagtcatcctcagacgcacattcatctcctggccctgaaggctgtgggtctgacgcctcccagttcgcagagtcccacagtgctaaccttgatctttcagggcttgaacctattctggtagaatcagactcatcctctggtggggaactagaggctggggagttagtgatagatgattcttaccgagaaatcaagaagaaaaagaagtcaaagaagagcaaaaagaagaaagacaaggagaagcataaagagaagcgacactccaagtccaagagaagtttaggactttctgccgtgccagtgggagaggtcacagtgacatctggccctcctcccagcatcccatacgctggagcagcagcacctcccctgccacttcctggcctccacacagatgggcatagtgaaaaaaaaaagaaaaaagaagagaaggacaaagagagagagagaggagaaaagccaaaaaagaagaacatgtcggcctaccaggtgttctgtaaagagtatcgcgtgaccattgtggctgaccatccaggtatagattttggggaacttagtaaaaaactggctgaggtgtggaagcaattaccagaaaaagacaaactgatttggaagcaaaaagctcagtatctgcagcacaaacagaacaaagcagaagccacaactgtgaaaaggaaagcatccagctcagaaggttccatgaaagtcaaagcctcttctgtaggagtactgtcaccccagaagaagtccccacccaccaccatgctgttaccagcctcaccagccaaagcccctgagacagagcccattgatgttgctgctcatcttcagctgttgggagagtccctaagcctcattggacaccgtctgcaggaaactgagggtatggtggctgtgtctggcagtttgtcagtgcttctggattccattatctgtgcccttggccccttggcatgtctcaccacacaactacctgaattgaatggctgtcccaaacaggtcttgtcaaacacattagacaacattgcttacatcatgccgggactgtgacagcaaagaatcctgggacagaaaccttatcctacaccattgctggtttgtgtatatatgactgttgcagattccttcagtggcctctggctgtaggttttaaatttttatatctatacatacatatatacatatatatataatgtacaatatatacatagactgtaactactttgcttttaataattttatgaaatggcaaaggtttagccaagaggaaattttggcatgaatacaggcttgggattcttttttctcctgtggtggataaatctgccttaaaaatcaatgtaacttgggggctgggggcttgttctgggtgccaagcgcatctctttatggacagctaaaatgtgattattttccaagctcagttggacctccagacccatcactgaccatttgccttacctgtcttagtctgaaatgtaataggaaagataacgggaagatgccagttgactgaaaattcaaagcctttcaatttgaagtgacctaggtgggaggtgataaaatttgttccctttatagttatggaagtggcttaggtgaattgagtagagggttcattccaattcctactgtataggtgtctgtgtctcaaaatttattgtaatcattggtaccattggtggcctcaacagaggccaaggagttctgtgagccctggcagcaaaaaacaccttggggggtgaagctgtcaatgccaccagttggacctccatacattctgagctaacccagaatctttagtcggcagaattaagtgctggtgtctttcactggcagcatgaagttagccaccaagtcctcacaagccgtgctgcttagttgctcggtggttatggataaactttgcccagcatgatttttgggttcatcttatcagttcccctggtgggcagatacacagtgttctgcattccacatgtaagtgaattgcaaaaacaaaacaaaactcactctcttgtaggtttatttatgtgtgtgtgaatgtgtattttaattatgtgtatttaactctttaaaatctcttagattttaatttatcctgtaaatttctgtatatataatttaataacagaagcctccaccagcaacagcatgtggaagatacagatttgtcatttctcccttccgccctcccttctttccttccttccttccctgtttccttccctctttccttccttcctcctggtctgttccaaaaactctgaatcatctacattttaaggtattttacctcaaaaatgaatcattgtgttaggattctaattctttataaagaacttcatgggcttcaataatgtctagaaagtaaaataaagaggaatgttaccatccccagctgcccttatttccagagaaccagacgtttgtttcccagttggaaagaagacagttgagcacttcaggatggtttttaaatttggtatgagattctctgccaacaccaagctctgagttaactgtgctttcttctcctggccctgacagagcactacagcatcaaagtaaatctttggggacagtgtagcccatctgcatcctatttaatttcttcccttctccccaccagtgttgtcacagggctatgttgcttaaaggtagtctggctgctgaatccctttctcagctcagagcagttttaagatttaattgggaatacagagaaacaggattgtttgagaaccaaaatcaagaggaacagaaatcttaacttgatttcatgtgttagaacattgtaccatgcctcttctgtatctgtggaagtttcctgtttgacacagggtatctaggaggggcggggaagacatggatagtataggaagacattaatcctagcattgtcatttatatacattaatgaaatcctgatgaggacctgctttttgtttgttttcctttgaaacccagccctattgtatttgtatttaaaatttgtacacatttgtataataatctgtaccttgtggtatttggtactattagaggaaaaactttggattcagaccttcttgcagtttttatatcattgttttattttgttttttaaataaattctagtggtttgatccaaatcccattacagttgtataaagaaataaaa

SEQ ID NO: 13796 - DNA, 2178 bp, Homo sapiens
  source 1..2178: mol_type = unassigned DNA
gcttttctctccttctccaagatggcggcgatcggcggcgttgaggcgggatccgggcgagccgagtgaagacctggtcctgtagacgggaaggagcctggacacagtgacacattctcaaaggccctgcaggaccaccatggcttatgatgactccgtgaagaaagaagattgttttgatggtgatcatacctttgaggacataggacttgcagctggccgaagccaacgagagaaaaaacgttcttacaaagattttttaagggaagaggaagaaattgctgctcaggtcaggaattcttccaagaagaagttgaaggatagtgaactttacttcttggggacggacacacacaagaagaagaggaagcactcctctgatgattactactatggaggacagtggttcttgttctgagtgccgataaaccagtgtgaaggaggagagaggtggagggctggtattttggaggattcagcatagaagaacagtctgcatttgtgatacaccagatatttcgtctttggaatcgtcacagaagaaaaagaaaaagtccagcccacagtctactgatacagctatggacctgttgaaagctatcacttccccactggcagcaggctccaagccctccaaaaagactggggagaaatcctctggctcttcaagccattcggagagtaaaaaggagcaccacaggaagaaagtcagtggaagcagtggggaactacccctagaggatggtggctcccacaaatcgaaaaaaatgaaacctctctatgtgaacacagagacactgacccttcgggagcctgatggtttaaaaatgaaacttattctgtcaccaaaggagaagggaagcagctctgttgatgaggagtcttttcaatatccctcccaacaagcgactgtgaaaaaatcctcaaagaaatcagctcgggatgagcagggtgctttactcctaggacatgagttacagagctttctgaaaacagcccggaaaaagcacaagtcatcctcagacgcacattcatctcctggccctgaaggctgtgggtctgacgcctcccagttcgcagagtcccacagtgctaaccttgatctttcagggcttgaacctattctggtagaatcagactcatcctctggtggggaactagaggctggggagttagtgatagatgattcttaccgagaaatcaagaagaaaaagaagtcaaagaagagcaaaaagaagaaagacaaggagaagcataaagagaagcgacactccaagtccaagagaagtttaggactttctgccgtgccagtgggagaggtcacagtgacatctggccctcctcccagcatcccatacgctggagcagcagcacctcccctgccacttcctggcctccacacagatgggcatagtgaaaaaaaaaagaaaaaagaagagaaggacaaagagagagagagaggagaaaagccaaaaaagaagaacatgtcggcctaccaggtgttctgtaaagagtatcgcgtgaccattgtggctgaccatccaggtatagattttggggaacttagtaaaaaactggctgaggtgtggaagcaattaccagaaaaagacaaactgatttggaagcaaaaagctcagtatctgcagcacaaacagaacaaagcagaagccacaactgtgaaaaggaaagcatccagctcagaaggttccatgaaagtcaaagcctcttctgtaggagtactgtcaccccagaagaagtccccacccaccaccatgctgttaccagcctcaccagccaaagcccctgagacagagcccattgatgttgctgctcatcttcagctgttgggagagtccctaagcctcattggacaccgtctgcaggaaactgagggtatggtggctgtgtctggcagtttgtcagtgcttctggattccattatctgtgcccttggccccttggcatgtctcaccacacaactacctgaattgaatggctgtcccaaacaggtcttgtcaaacacattagacaacattgcttacatcatgccgggactgtgacagcaaagaatcctgggacagaaaccttatcctacaccattgctggtttgtgtatatatgactgttgcagattccttcagtggcctctggctgtaggttttaaatttttatatctata

SEQ ID NO: 13797 - DNA, 5423 bp, Homo sapiens
  source 1..5423: mol_type = unassigned DNA
agctccaatgtaaacagaacaggcaggggccctgattcacgggccgctggggccagggttgggggttgggggtgcccacagggcttggctagtggggttttgggggggcagtgggtgcaaggagtttggtttgtgtctgccggccggcaggcaaacgcaacccacgcggtgggggaggcggctagcgtggtggacccgggccgcgtggccctgtggcagccgagccatggtttctaaactgagccagctgcagacggagctcctggcggccctgctcgagtcagggctgagcaaagaggcactgatccaggcactgggtgagccggggccctacctcctggctggagaaggccccctggacaagggggagtcctgcggcggcggtcgaggggagctggctgagctgcccaatgggctgggggagactcggggctccgaggacgagacggacgacgatggggaagacttcacgccacccatcctcaaagagctggagaacctcagccctgaggaggcggcccaccagaaagccgtggtggagacccttctgcaggaggacccgtggcgtgtggcgaagatggtcaagtcctacctgcagcagcacaacatcccacagcgggaggtggtcgataccactggcctcaaccagtcccacctgtcccaacacctcaacaagggcactcccatgaagacgcagaagcgggccgccctgtacacctggtacgtccgcaagcagcgagaggtggcgcagcagttcacccatgcagggcagggagggctgattgaagagcccacaggtgatgagctaccaaccaagaaggggcggaggaaccgtttcaagtggggcccagcatcccagcagatcctgttccaggcctatgagaggcagaagaaccctagcaaggaggagcgagagacgctagtggaggagtgcaatagggcggaatgcatccagagaggggtgtccccatcacaggcacaggggctgggctccaacctcgtcacggaggtgcgtgtctacaactggtttgccaaccggcgcaaagaagaagccttccggcacaagctggccatggacacgtacagcgggccccccccagggccaggcccgggacctgcgctgcccgctcacagctcccctggcctgcctccacctgccctctcccccagtaaggtccacggtgtgcgctatggacagcctgcgaccagtgagactgcagaagtaccctcaagcagcggcggtcccttagtgacagtgtctacacccctccaccaagtgtcccccacgggcctggagcccagccacagcctgctgagtacagaagccaagctggtctcagcagctgggggccccctcccccctgtcagcaccctgacagcactgcacagcttggagcagacatccccaggcctcaaccagcagccccagaacctcatcatggcctcacttcctggggtcatgaccatcgggcctggtgagcctgcctccctgggtcctacgttcaccaacacaggtgcctccaccctggtcatcggcctggcctccacgcaggcacagagtgtgccggtcatcaacagcatgggcagcagcctgaccaccctgcagcccgtccagttctcccagccgctgcacccctcctaccagcagccgctcatgccacctgtgcagagccatgtgacccagagccccttcatggccaccatggctcagctgcagagcccccacgccctctacagccacaagcccgaggtggcccagtacacccacacgggcctgctcccgcagactatgctcatcaccgacaccaccaacctgagcgccctggccagcctcacgcccaccaagcaggtcttcacctcagacactgaggcctccagtgagtccgggcttcacacgccggcatctcaggccaccaccctccacgtccccagccaggaccctgccagcatccagcacctgcagccggcccaccggctcagcgccagccccacagtgtcctccagcagcctggtgctgtaccagagctcagactccagcaatggccagagccacctgctgccatccaaccacagcgtcatcgagaccttcatctccacccagatggcctcttcctcccagtaaccacggcacctgggccctggggcctgtactgcctgcttggggggtgatgagggcagcagccagccctgcctggaggacctgagcctgccgagcaaccgtggcccttcctggacagctgtgcctcgctccccactctgctctgatgcatcagaaagggagggctctgaggcgccccaacccgtggaggctgctcggggtgcacaggagggggtcgtggagagctaggagcaaagcctgttcatggcagatgtaggagggactgtcgctgcttcgtgggatacagtcttcttacttggaactgaagggggcggcctatgacttgggcacccccagcctgggcctatggagagccctgggaccgctacaccactctggcagccacacttctcaggacacaggcctgtgtagctgtgacctgctgagctctgagaggccctggatcagcgtggccttgttctgtcaccaatgtacccaccgggccactccttcctgccccaactccttccagctagtgacccacatgccatttgtactgaccccatcacctactcacacaggcatttcctgggtggctactctgtgccagagcctggggctctaacgcctgagcccagggaggccgaagctaacagggaaggcaggcagggctctcctggcttcccatccccagcgattccctctcccaggccccatgacctccagctttcctgtatttgttcccaagagcatcatgcctctgaggccagcctggcctcctgcctctactgggaaggctacttcggggctgggaagtcgtccttactcctgtgggagcctcgcaacccgtgccaagtccaggtcctggtggggcagctcctctgtctcgagcgccctgcagaccctgcccttgtttggggcaggagtagctgagctcacaaggcagcaaggcccgagcagctgagcagggccggggaactggccaagctgaggtgcccaggagaagaaagaggtgaccccagggcacaggagctacctgtgtggacaggactaacactcagaagcctgggggcctggctggctgagggcagttcgcagccaccctgaggagtctgaggtcctgagcactgccaggagggacaaaggagcctgtgaacccaggacaagcatggtcccacatccctgggcctgctgctgagaacctggccttcagtgtaccgcgtctaccctgggattcaggaaaaggcctggggtgacccggcaccccctgcagcttgtagccagccggggcgagtggcacgtttatttaacttttagtaaagtcaaggagaaatgcggtggaaacttcttgcttgtccacaaatcattcagatggggtttgggcaggtagcgggaggctggggcaggccagaggcctgcgaagaggagacaggctccagcacccacgctctcacaccccacatctctgcttttcttgctctgctgagactctaatgacaaagccagatttcatcttaacctcaagcttctactttttaaaaaaattttgttttggagacagggtctcactgtcacccaggctggactgcagtggcattatacagctcactgcagccttgaactcctggactaaagggatcctcccacctcagcctcacaagcagcctcacaggcgctcactaccatgcccaactaatttttgtattcttttttttatagagacgaggtttcaccatgttgcctaggctggtctggaactcggctcaagtgatccacctgcctcggcctcccaaagtgctgggattacaggtgtgagccaccatccctggccatgagcttctacttcttttctttttctttttctttttttttttttgagatagggtcttgctccattgcttaggctagagtgcagtggcgcaatctcggctcactgcaacctgcacctcctgggttcaagcgattctcccacctcagcctcctgagtagctgggattacgggcgtgtgtcaacatgctcagctaatttttgtatttttagtagagatggggtctcgccatgttggccaggctggtctcaaactcctggcctcaattgatccacctccttggcctctcaaaatgcttggattacaggcatgagccactgcacccggccacaagcttctacttcttgcagaatgcctttgtcccatgaaacctagtccacgagtgctatgacacttcctgaagtcttgggtggggtgaacgcacaaatcctgggggtgtagagaggaggaggatgtttacttaaaatgtcttaaggttcagcattgacagagaggcaatatccaaatcactctaagttttgttttgggtcctctgacaattgagtttccataatctggtcggctcagagacaccatcatgtgtggtatattcacaaatgcagacaaagaaaattctagaaagccaggggtgaaaaagctctcctttctcagacgattctgtgaagtctatgtgggctaaggagagaagaacaaaagtttctctgggccttggcctcttggggatcccttctctcattttctaaaaactgtttctcacaccaggctaaggaggtggtggggaaggtctcccttcccctgcccacctcagacagttctagggagatggaggtttcaccacttggccactagtctcaaataactggaaggttccttttttcctgaggtcatgaaatgttctggaaccacagcgcccccgccagccctccgtgggagcacagaggggcaggccttgattggtcttctcaccctacagccacttttttggcccaactctcgagcaagccttcatcaccatcagggtctcatgggcagtctgggtttgccagcccagtccttgaacttggagagggaggtggggcttggaaatgccttgtccccagggtgggggggacaccttgtccttggagctggctgagccctgtgcccatggctgggttcagtttgcaggtatagctgtagcactctttgctggtgggaatggagaggtctcgctggccttctttgcctttttcttctttttggtcccaagcgacacctggtccccgttgagctcacctgacttctgcttctggactgtggccatgctggtgggggtggtggcagcgacagccgagtcgacactggccaccttcttggctttctttttcaacttccttttcttctttgcctccttctccactgttccagggctgtggatggctgactcctgtaggatgtcggacgccgacacagctgcctcccggcaccgccgccactcctcgtcactgtcctcactgc

SEQ ID NO: 13798 - DNA, 1742 bp, Homo sapiens
  source 1..1742: mol_type = unassigned DNA
cgtggccctgtggcagccgagccatggtttctaaactgagccagctgcagacggagctcctggcggccctgctcgagtcagggctgagcaaagaggcactgatccaggcactgggtgagccggggccctacctcctggctggagaaggccccctggacaagggggagtcctgcggcggcggtcgaggggagctggctgagctgcccaatgggctgggggagactcggggctccgaggacgagacggacgacgatggggaagacttcacgccacccatcctcaaagagctggagaacctcagccctgaggaggcggcccaccagaaagccgtggtggagacccttctgcaggaggacccgtggcgtgtggcgaagatggtcaagtcctacctgcagcagcacaacatcccacagcgggaggtggtcgataccactggcctcaaccagtcccacctgtcccaacacctcaacaagggcactcccatgaagacgcagaagcgggccgccctgtacacctggtacgtccgcaagcagcgagaggtggcgcagcagttcacccatgcagggcagggagggctgattgaagagcccacaggtgatgagctaccaaccaagaaggggcggaggaaccgtttcaagtggggcccagcatcccagcagatcctgttccaggcctatgagaggcagaagaaccctagcaaggaggagcgagagacgctagtggaggagtgcaatagggcggaatgcatccagagaggggtgtccccatcacaggcacaggggctgggctccaacctcgtcacggaggtgcgtgtctacaactggtttgccaaccggcgcaaagaagaagccttccggcacaagctggccatggacacgtacagcgggccccccccagggccaggcccgggacctgcgctgcccgctcacagctcccctggcctgcctccacctgccctctcccccagtaaggtccacggtgtgcgctatggacagcctgcgaccagtgagactgcagaagtaccctcaagcagcggcggtcccttagtgacagtgtctacacccctccaccaagtgtcccccacgggcctggagcccagccacagcctgctgagtacagaagccaagctggtctcagcagctgggggccccctcccccctgtcagcaccctgacagcactgcacagcttggagcagacatccccaggcctcaaccagcagccccagaacctcatcatggcctcacttcctggggtcatgaccatcgggcctggtgagcctgcctccctgggtcctacgttcaccaacacaggtgcctccaccctggtcatcggcctggcctccacgcaggcacagagtgtgccggtcatcaacagcatgggcagcagcctgaccaccctgcagcccgtccagttctcccagccgctgcacccctcctaccagcagccgctcatgccacctgtgcagagccatgtgacccagagccccttcatggccaccatggctcagctgcagagcccccacggtgagcgccctgtgccccacacagcaggagatgatgatagaggttggctgtcaatggatgcaggggaaaggggtgcctggcaggcattgcagtctgcatgtgtctctgggacaagtgtgtttccgtactccagcaatggccagagccacctgctgccatccaaccacagcgtcatcgagaccttcatctccacccagatggcctcttcctcccagtaa

SEQ ID NO: 13799 - DNA, 1589 bp, Homo sapiens
  source 1..1589: mol_type = unassigned DNA
cgtggccctgtggcagccgagccatggtttctaaactgagccagctgcagacggagctcctggcggccctgctcgagtcagggctgagcaaagaggcactgatccaggcactgggtgagccggggccctacctcctggctggagaaggccccctggacaagggggagtcctgcggcggcggtcgaggggagctggctgagctgcccaatgggctgggggagactcggggctccgaggacgagacggacgacgatggggaagacttcacgccacccatcctcaaagagctggagaacctcagccctgaggaggcggcccaccagaaagccgtggtggagacccttctgcaggaggacccgtggcgtgtggcgaagatggtcaagtcctacctgcagcagcacaacatcccacagcgggaggtggtcgataccactggcctcaaccagtcccacctgtcccaacacctcaacaagggcactcccatgaagacgcagaagcgggccgccctgtacacctggtacgtccgcaagcagcgagaggtggcgcagcagttcacccatgcagggcagggagggctgattgaagagcccacaggtgatgagctaccaaccaagaaggggcggaggaaccgtttcaagtggggcccagcatcccagcagatcctgttccaggcctatgagaggcagaagaaccctagcaaggaggagcgagagacgctagtggaggagtgcaatagggcggaatgcatccagagaggggtgtccccatcacaggcacaggggctgggctccaacctcgtcacggaggtgcgtgtctacaactggtttgccaaccggcgcaaagaagaagccttccggcacaagctggccatggacacgtacagcgggccccccccagggccaggcccgggacctgcgctgcccgctcacagctcccctggcctgcctccacctgccctctcccccagtaaggtccacggtgtgcgctatggacagcctgcgaccagtgagactgcagaagtaccctcaagcagcggcggtcccttagtgacagtgtctacacccctccaccaagtgtcccccacgggcctggagcccagccacagcctgctgagtacagaagccaagctggtctcagcagctgggggccccctcccccctgtcagcaccctgacagcactgcacagcttggagcagacatccccaggcctcaaccagcagccccagaacctcatcatggcctcacttcctggggtcatgaccatcgggcctggtgagcctgcctccctgggtcctacgttcaccaacacaggtgcctccaccctggtcatcggtaagctggtggggatgggtgggcacctgggtgggaggctcatggggcaaccgcagaatccaggagctggaagagccactgggactcattcattcattcatcaacatgtatttatccagtgcctactctggaccagtcactgtgctacatcagtgatacctggagactccagcaatggccagagccacctgctgccatccaaccacagcgtcatcgagaccttcatctccacccagatggcctcttcctcccagtaa

SEQ ID NO: 13800 - DNA, 3032 bp, Homo sapiens
  source 1..3032: mol_type = unassigned DNA
cttggctagtggggttttgggggggcagtgggtgcaaggagtttggtttgtgtctgccggccggcaggcaaacgcaacccacgcggtgggggaggcggctagcgtggtggacccgggccgcgtggccctgtggcagccgagccatggtttctaaactgagccagctgcagacggagctcctggcggccctgctcgagtcagggctgagcaaagaggcactgatccaggcactgggtgagccggggccctacctcctggctggagaaggccccctggacaagggggagtcctgcggcggcggtcgaggggagctggctgagctgcccaatgggctgggggagactcggggctccgaggacgagacggacgacgatggggaagacttcacgccacccatcctcaaagagctggagaacctcagccctgaggaggcggcccaccagaaagccgtggtggagacccttctgcaggaggacccgtggcgtgtggcgaagatggtcaagtcctacctgcagcagcacaacatcccacagcgggaggtggtcgataccactggcctcaaccagtcccacctgtcccaacacctcaacaagggcactcccatgaagacgcagaagcgggccgccctgtacacctggtacgtccgcaagcagcgagaggtggcgcagcagttcacccatgcagggcagggagggctgattgaagagcccacaggtgatgagctaccaaccaagaaggggcggaggaaccgtttcaagtggggcccagcatcccagcagatcctgttccaggcctatgagaggcagaagaaccctagcaaggaggagcgagagacgctagtggaggagtgcaatagggcggaatgcatccagagaggggtgtccccatcacaggcacaggggctgggctccaacctcgtcacggaggtctcagcagctgggggccccctcccccctgtcagcaccctgacagcactgcacagcttggagcagacatccccaggcctcaaccagcagccccagaacctcatcatggcctcacttcctggggtcatgaccatcgggcctggtgagcctgcctccctgggtcctacgttcaccaacacaggtgcctccaccctggtcatcggcctggcctccacgcaggcacagagtgtgccggtcatcaacagcatgggcagcagcctgaccaccctgcagcccgtccagttctcccagccgctgcacccctcctaccagcagccgctcatgccacctgtgcagagccatgtgacccagagccccttcatggccaccatggctcagctgcagagcccccacgccctctacagccacaagcccgaggtggcccagtacacccacacgggcctgctcccgcagactatgctcatcaccgacaccaccaacctgagcgccctggccagcctcacgcccaccaagcaggtcttcacctcagacactgaggcctccagtgagtccgggcttcacacgccggcatctcaggccaccaccctccacgtccccagccaggaccctgccagcatccagcacctgcagccggcccaccggctcagcgccagccccacagtgtcctccagcagcctggtgctgtaccagagctcagactccagcaatggccagagccacctgctgccatccaaccacagcgtcatcgagaccttcatctccacccagatggcctcttcctcccagtaaccacggcacctgggccctggggcctgtactgcctgcttggggggtgatgagggcagcagccagccctgcctggaggacctgagcctgccgagcaaccgtggcccttcctggacagctgtgcctcgctccccactctgctctgatgcatcagaaagggagggctctgaggcgccccaacccgtggaggctgctcggggtgcacaggagggggtcgtggagagctaggagcaaagcctgttcatggcagatgtaggagggactgtcgctgcttcgtgggatacagtcttcttacttggaactgaagggggcggcctatgacttgggcacccccagcctgggcctatggagagccctgggaccgctacaccactctggcagccacacttctcaggacacaggcctgtgtagctgtgacctgctgagctctgagaggccctggatcagcgtggccttgttctgtcaccaatgtacccaccgggccactccttcctgccccaactccttccagctagtgacccacatgccatttgtactgaccccatcacctactcacacaggcatttcctgggtggctactctgtgccagagcctggggctctaacgcctgagcccagggaggccgaagctaacagggaaggcaggcagggctctcctggcttcccatccccagcgattccctctcccaggccccatgacctccagctttcctgtatttgttcccaagagcatcatgcctctgaggccagcctggcctcctgcctctactgggaaggctacttcggggctgggaagtcgtccttactcctgtgggagcctcgcaacccgtgccaagtccaggtcctggtggggcagctcctctgtctcgagcgccctgcagaccctgcccttgtttggggcaggagtagctgagctcacaaggcagcaaggcccgagcagctgagcagggccggggaactggccaagctgaggtgcccaggagaagaaagaggtgaccccagggcacaggagctacctgtgtggacaggactaacactcagaagcctgggggcctggctggctgagggcagttcgcagccaccctgaggagtctgaggtcctgagcactgccaggagggacaaaggagcctgtgaacccaggacaagcatggtcccacatccctgggcctgctgctgagaacctggccttcagtgtaccgcgtctaccctgggattcaggaaaaggcctggggtgacccggcaccccctgcagcttgtagccagccggggcgagtggcacgtttatttaacttttagtaaagtcaaggagaaatgcggtgg

SEQ ID NO: 13801 - DNA, 2671 bp, Homo sapiens
  source 1..2671: mol_type = unassigned DNA
cttggctagtggggttttgggggggcagtgggtgcaaggagtttggtttgtgtctgccggccggcaggcaaacgcaacccacgcggtgggggaggcggctagcgtggtggacccgggccgcgtggccctgtggcagccgagccatggtttctaaactgagccagctgcagacggagctcctggcggccctgctcgagtcagggctgagcaaagaggcactgatccaggcactgggtgagccggggccctacctcctggctggagaaggccccctggacaagggggagtcctgcggcggcggtcgaggggagctggctgagctgcccaatgggctgggggagactcggggctccgaggacgagacggacgacgatggggaagacttcacgccacccatcctcaaagagctggagaacctcagccctgaggaggcggcccaccagaaagccgtggtggagacccttctgcaggaggacccgtggcgtgtggcgaagatggtcaagtcctacctgcagcagcacaacatcccacagcgggaggtggtcgataccactggcctcaaccagtcccacctgtcccaacacctcaacaagggcactcccatgaagacgcagaagcgggccgccctgtacacctggtacgtccgcaagcagcgagaggtggcgcagcagttcacccatgcagggcagggagggctgattgaagagcccacaggtgatgagctaccaaccaagaaggggcggaggaaccgtttcaagtggggcccagcatcccagcagatcctgttccaggcctatgagaggcagaagaaccctagcaaggaggagcgagagacgctagtggaggagtgcaatagggcggaatgcatccagagaggggtgtccccatcacaggcacaggggctgggctccaacctcgtcacggaggtgcgtgtctacaactggtttgccaaccggcgcaaagaagaagccttccggcacaagctggccatggacacgtacagcgggccccccccagggccaggcccgggacctgcgctgcccgctcacagctcccctggcctgcctccacctgccctctcccccagtaaggtccacggtgtgcgctatggacagcctgcgaccagtgagactgcagaagtaccctcaagcagcggcggtcccttagtgacagtgtctacacccctccaccaagtgtcccccacgggcctggagcccagccacagcctgctgagtacagaagccaagctggtctcagcagctgggggccccctcccccctgtcagcaccctgacagcactgcacagcttggagcagacatccccaggcctcaaccagcagccccagaacctcatcatggcctcacttcctggggtcatgaccatcgggcctggtgagcctgcctccctgggtcctacgttcaccaacacaggtgcctccaccctggtcatcggcctggcctccacgcaggcacagagtgtgccggtcatcaacagcatgggcagcagcctgaccaccctgcagcccgtccagttctcccagccgctgcacccctcctaccagcagccgctcatgccacctgtgcagagccatgtgacccagagccccttcatggccaccatggctcagctgcagagcccccacgccctctacagccacaagcccgaggtggcccagtacacccacacgggcctgctcccgcagactatgctcatcaccgacaccaccaacctgagcgccctggccagcctcacgcccaccaagcaggtcttcacctcagacactgaggcctccagtgagtccgggcttcacacgccggcatctcaggccaccaccctccacgtccccagccaggaccctgccagcatccagcacctgcagccggcccaccggctcagcgccagccccacagtgtcctccagcagcctggtgctgtaccagagcctggggctctaacgcctgagcccagggaggccgaagctaacagggaaggcaggcagggctctcctggcttcccatccccagcgattccctctcccaggccccatgacctccagctttcctgtatttgttcccaagagcatcatgcctctgaggccagcctggcctcctgcctctactgggaaggctacttcggggctgggaagtcgtccttactcctgtgggagcctcgcaacccgtgccaagtccaggtcctggtggggcagctcctctgtctcgagcgccctgcagaccctgcccttgtttggggcaggagtagctgagctcacaaggcagcaaggcccgagcagctgagcagggccggggaactggccaagctgaggtgcccaggagaagaaagaggtgaccccagggcacaggagctacctgtgtggacaggactaacactcagaagcctgggggcctggctggctgagggcagttcgcagccaccctgaggagtctgaggtcctgagcactgccaggagggacaaaggagcctgtgaacccaggacaagcatggtcccacatccctgggcctgctgctgagaacctggccttcagtgtaccgcgtctaccctgggattcaggaaaaggcctggggtgacccggcaccccctgcagcttgtagccagccggggcgagtggcacgtttatttaacttttagtaaagtcaaggagaaatgcggtgg

SEQ ID NO: 13802 - DNA, 1649 bp, Homo sapiens
  source 1..1649: mol_type = unassigned DNA
cagtgggtgcaaggagtttggtttgtgtctgccggccggcaggcaaacgcaacccacgcggtgggggaggcggctagcgtggtggacccgggccgcgtggccctgtggcagccgagccatggtttctaaactgagccagctgcagacggagctcctggcggccctgctcgagtcagggctgagcaaagaggcactgatccaggcactgggtgagccggggccctacctcctggctggagaaggccccctggacaagggggagtcctgcggcggcggtcgaggggagctggctgagctgcccaatgggctgggggagactcggggctccgaggacgagacggacgacgatggggaagacttcacgccacccatcctcaaagagctggagaacctcagccctgaggaggcggcccaccagaaagccgtggtggagacccttctgcaggaggacccgtggcgtgtggcgaagatggtcaagtcctacctgcagcagcacaacatcccacagcgggaggtggtcgataccactggcctcaaccagtcccacctgtcccaacacctcaacaagggcactcccatgaagacgcagaagcgggccgccctgtacacctggtacgtccgcaagcagcgagaggtggcgcagcggcggaatgcatccagagaggggtgtccccatcacaggcacaggggctgggctccaacctcgtcacggaggtgcgtgtctacaactggtttgccaaccggcgcaaagaagaagccttccggcacaagctggccatggacacgtacagcgggccccccccagggccaggcccgggacctgcgctgcccgctcacagctcccctggcctgcctccacctgccctctcccccagtaaggtccacggtgtgcgctatggacagcctgcgaccagtgagactgcagaagtaccctcaagcagcggcggtcccttagtgacagtgtctacacccctccaccaagtgtcccccacgggcctggagcccagccacagcctgctgagtacagaagccaagctggtctcagcagctgggggccccctcccccctgtcagcaccctgacagcactgcacagcttggagcagacatccccaggcctcaaccagcagccccagaacctcatcatggcctcacttcctggggtcatgaccatcgggcctggtgagcctgcctccctgggtcctacgttcaccaacacaggtgcctccaccctggtcatcggcctggcctccacgcaggcacagagtgtgccggtcatcaacagcatgggcagcagcctgaccaccctgcagcccgtccagttctcccagccgctgcacccctcctaccagcagccgctcatgccacctgtgcagagccatgtgacccagagccccttcatggccaccatggctcagctgcagagcccccacggtgagcgccctgtgccccacacagcaggagatgatgatagaggttggctgtcaatggatgcaggggaaaggggtgcctggcaggcattgcagtctgcatgtgtctctgggacaagtgtgtttccgtgattgagggtgtctgcaggccagtgtgttcccatgtgaatgcacgtatctgtgtgtgtgcacgactgcttgtgtgagcagatccctagtgc

SEQ ID NO: 13803 - DNA, 3039 bp, Homo sapiens
  source 1..3039: mol_type = unassigned DNA
cgtggccctgtggcagccgagccatggtttctaaactgagccagctgcagacggagctcctggcggccctgctcgagtcagggctgagcaaagaggcactgatccaggcactgggtgagccggggccctacctcctggctggagaaggccccctggacaagggggagtcctgcggcggcggtcgaggggagctggctgagctgcccaatgggctgggggagactcggggctccgaggacgagacggacgacgatggggaagacttcacgccacccatcctcaaagagctggagaacctcagccctgaggaggcggcccaccagaaagccgtggtggagacccttctgcaagttcacccatgcagggcagggagggctgattgaagagcccacaggtgatgagctaccaaccaagaaggggcggaggaaccgtttcaagtggggcccagcatcccagcagatcctgttccaggcctatgagaggcagaagaaccctagcaaggaggagcgagagacgctagtggaggagtgcaatagggcggaatgcatccagagaggggtgtccccatcacaggcacaggggctgggctccaacctcgtcacggaggtgcgtgtctacaactggtttgccaaccggcgcaaagaagaagccttccggcacaagctggccatggacacgtacagcgggccccccccagggccaggcccgggacctgcgctgcccgctcacagctcccctggcctgcctccacctgccctctcccccagtaaggtccacggtgtgcgctatggacagcctgcgaccagtgagactgcagaagtaccctcaagcagcggcggtcccttagtgacagtgtctacacccctccaccaagtgtcccccacgggcctggagcccagccacagcctgctgagtacagaagccaagctggtctcagcagctgggggccccctcccccctgtcagcaccctgacagcactgcacagcttggagcagacatccccaggcctcaaccagcagccccagaacctcatcatggcctcacttcctggggtcatgaccatcgggcctggtgagcctgcctccctgggtcctacgttcaccaacacaggtgcctccaccctggtcatcggcctggcctccacgcaggcacagagtgtgccggtcatcaacagcatgggcagcagcctgaccaccctgcagcccgtccagttctcccagccgctgcacccctcctaccagcagccgctcatgccacctgtgcagagccatgtgacccagagccccttcatggccaccatggctcagctgcagagcccccacgccctctacagccacaagcccgaggtggcccagtacacccacacgggcctgctcccgcagactatgctcatcaccgacaccaccaacctgagcgccctggccagcctcacgcccaccaagcaggtcttcacctcagacactgaggcctccagtgagtccgggcttcacacgccggcatctcaggccaccaccctccacgtccccagccaggaccctgccagcatccagcacctgcagccggcccaccggctcagcgccagccccacagtgtcctccagcagcctggtgctgtaccagagctcagactccagcaatggccagagccacctgctgccatccaaccacagcgtcatcgagaccttcatctccacccagatggcctcttcctcccagtaaccacggcacctgggccctggggcctgtactgcctgcttggggggtgatgagggcagcagccagccctgcctggaggacctgagcctgccgagcaaccgtggcccttcctggacagctgtgcctcgctccccactctgctctgatgcatcagaaagggagggctctgaggcgccccaacccgtggaggctgctcggggtgcacaggagggggtcgtggagagctaggagcaaagcctgttcatggcagatgtaggagggactgtcgctgcttcgtgggatacagtcttcttacttggaactgaagggggcggcctatgacttgggcacccccagcctgggcctatggagagccctgggaccgctacaccactctggcagccacacttctcaggacacaggcctgtgtagctgtgacctgctgagctctgagaggccctggatcagcgtggccttgttctgtcaccaatgtacccaccgggccactccttcctgccccaactccttccagctagtgacccacatgccatttgtactgaccccatcacctactcacacaggcatttcctgggtggctactctgtgccagagcctggggctctaacgcctgagcccagggaggccgaagctaacagggaaggcaggcagggctctcctggcttcccatccccagcgattccctctcccaggccccatgacctccagctttcctgtatttgttcccaagagcatcatgcctctgaggccagcctggcctcctgcctctactgggaaggctacttcggggctgggaagtcgtccttactcctgtgggagcctcgcaacccgtgccaagtccaggtcctggtggggcagctcctctgtctcgagcgccctgcagaccctgcccttgtttggggcaggagtagctgagctcacaaggcagcaaggcccgagcagctgagcagggccggggaactggccaagctgaggtgcccaggagaagaaagaggtgaccccagggcacaggagctacctgtgtggacaggactaacactcagaagcctgggggcctggctggctgagggcagttcgcagccaccctgaggagtctgaggtcctgagcactgccaggagggacaaaggagcctgtgaacccaggacaagcatggtcccacatccctgggcctgctgctgagaacctggccttcagtgtaccgcgtctaccctgggattcaggaaaaggcctggggtgacccggcaccccctgcagcttgtagccagccggggcgagtggcacgtttatttaacttttagtaaagtcaaggagaaatgcggtggaaa

SEQ ID NO: 13804 - DNA, 3332 bp, Homo sapiens
  source 1..3332: mol_type = unassigned DNA
cgtggccctgtggcagccgagccatggtttctaaactgagccagctgcagacggagctcctggcggccctgctcgagtcagggctgagcaaagaggcactgatccaggcactgggtgagccggggccctacctcctggctggagaaggccccctggacaagggggagtcctgcggcggcggtcgaggggagctggctgagctgcccaatgggctgggggagactcggggctccgaggacgagacggacgacgatggggaagacttcacgccacccatcctcaaagagctggagaacctcagccctgaggaggcggcccaccagaaagccgtggtggagacccttctgcaggaggacccgtggcgtgtggcgaagatggtcaagtcctacctgcagcagcacaacatcccacagcgggaggtggtcgataccactggcctcaaccagtcccacctgtcccaacacctcaacaagggcactcccatgaagacgcagaagcgggccgccctgtacacctggtacgtccgcaagcagcgagaggtggcgcagcagttcacccatgcagggcagggagggctgattgaagagcccacaggtgatgagctaccaaccaagaaggggcggaggaaccgtttcaagtggggcccagcatcccagcagatcctgttccaggcctatgagaggcagaagaaccctagcaaggaggagcgagagacgctagtggaggagtgcaatagggcggaatgcatccagagaggggtgtccccatcacaggcacaggggctgggctccaacctcgtcacggaggtgcgtgtctacaactggtttgccaaccggcgcaaagaagaagccttccggcacaagctggccatggacacgtacagcgggccccccccagggccaggcccgggacctgcgctgcccgctcacagctcccctggcctgcctccacctgccctctcccccagtaaggtccacggtgtgcgctatggacagcctgcgaccagtgagactgcagaagtaccctcaagcagcggcggtcccttagtgacagtgtctacacccctccaccaagtgtcccccacgggcctggagcccagccacagcctgctgagtacagaagccaagctggtctcagcagctgggggccccctcccccctgtcagcaccctgacagcactgcacagcttggagcagacatccccaggcctcaaccagcagccccagaacctcatcatggcctcacttcctggggtcatgaccatcgggcctggtgagcctgcctccctgggtcctacgttcaccaacacaggtgcctccaccctggtcatcggcctggcctccacgcaggcacagagtgtgccggtcatcaacagcatgggcagcagcctgaccaccctgcagcccgtccagttctcccagccgctgcacccctcctaccagcagccgctcatgccacctgtgcagagccatgtgacccagagccccttcatggccaccatggctcagctgcagagcccccacgccctctacagccacaagcccgaggtggcccagtacacccacacgggcctgctcccgcagactatgctcatcaccgacaccaccaacctgagcgccctggccagcctcacgcccaccaagcaggtaaggtccaggcctgctggccctcccttggcctgtgacagagcccctcacccccacatcccccgggctcaggaggctgctctgctcccccaggtcttcacctcagacactgaggcctccagtgagtccgggcttcacacgccggcatctcaggccaccaccctccacgtccccagccaggaccctgccagcatccagcacctgcagccggcccaccggctcagcgccagccccacagtgtcctccagcagcctggtgctgtaccagagctcagactccagcaatggccagagccacctgctgccatccaaccacagcgtcatcgagaccttcatctccacccagatggcctcttcctcccagtaaccacggcacctgggccctggggcctgtactgcctgcttggggggtgatgagggcagcagccagccctgcctggaggacctgagcctgccgagcaaccgtggcccttcctggacagctgtgcctcgctccccactctgctctgatgcatcagaaagggagggctctgaggcgccccaacccgtggaggctgctcggggtgcacaggagggggtcgtggagagctaggagcaaagcctgttcatggcagatgtaggagggactgtcgctgcttcgtgggatacagtcttcttacttggaactgaagggggcggcctatgacttgggcacccccagcctgggcctatggagagccctgggaccgctacaccactctggcagccacacttctcaggacacaggcctgtgtagctgtgacctgctgagctctgagaggccctggatcagcgtggccttgttctgtcaccaatgtacccaccgggccactccttcctgccccaactccttccagctagtgacccacatgccatttgtactgaccccatcacctactcacacaggcatttcctgggtggctactctgtgccagagcctggggctctaacgcctgagcccagggaggccgaagctaacagggaaggcaggcagggctctcctggcttcccatccccagcgattccctctcccaggccccatgacctccagctttcctgtatttgttcccaagagcatcatgcctctgaggccagcctggcctcctgcctctactgggaaggctacttcggggctgggaagtcgtccttactcctgtgggagcctcgcaacccgtgccaagtccaggtcctggtggggcagctcctctgtctcgagcgccctgcagaccctgcccttgtttggggcaggagtagctgagctcacaaggcagcaaggcccgagcagctgagcagggccggggaactggccaagctgaggtgcccaggagaagaaagaggtgaccccagggcacaggagctacctgtgtggacaggactaacactcagaagcctgggggcctggctggctgagggcagttcgcagccaccctgaggagtctgaggtcctgagcactgccaggagggacaaaggagcctgtgaacccaggacaagcatggtcccacatccctgggcctgctgctgagaacctggccttcagtgtaccgcgtctaccctgggattcaggaaaaggcctggggtgacccggcaccccctgcagcttgtagccagccggggcgagtggcacgtttatttaacttttagtaaagtcaaggagaaatgcggtggaaa

SEQ ID NO: 13805 - DNA, 1594 bp, Homo sapiens
  source 1..1594: mol_type = unassigned DNA
cagtgggtgcaaggagtttggtttgtgtctgccggccggcaggcaaacgcaacccacgcggtgggggaggcggctagcgtggtggacccgggccgcgtggccctgtggcagccgagccatggtttctaaactgagccagctgcagacggagctcctggcggccctgctcgagtcagggctgagcaaagaggcactgatccaggcactgggtgagccggggccctacctcctggctggagaaggccccctggacaagggggagtcctgcggcggcggtcgaggggagctggctgagctgcccaatgggctgggggagactcggggctccgaggacgagacggacgacgatggggaagacttcacgccacccatcctcaaagagctggagaacctcagccctgaggaggcggcccaccagaaagccgtggtggagacccttctgcaggaggacccgtggcgtgtggcgaagatggtcaagtcctacctgcagcagcacaacatcccacagcgggaggtggtcgataccactggcctcaaccagtcccacctgtcccaacacctcaacaagggcactcccatgaagacgcagaagcgggccgccctgtacacctggtacgtccgcaagcagcgagaggtggcgcagcagttcacccatgcagggcagggagggctgattgaagagcccacaggtgatgagctaccaaccaagaaggggcggaggaaccgtttcaagtggggcccagcatcccagcagatcctgttccaggcctatgagaggcagaagaaccctagcaaggaggagcgagagacgctagtggaggagtgcaataggtgtgcgctatggacagcctgcgaccagtgagactgcagaagtaccctcaagcagcggcggtcccttagtgacagtgtctacacccctccaccaagtgtcccccacgggcctggagcccagccacagcctgctgagtacagaagccaagctggtctcagcagctgggggccccctcccccctgtcagcaccctgacagcactgcacagcttggagcagacatccccaggcctcaaccagcagccccagaacctcatcatggcctcacttcctggggtcatgaccatcgggcctggtgagcctgcctccctgggtcctacgttcaccaacacaggtgcctccaccctggtcatcggcctggcctccacgcaggcacagagtgtgccggtcatcaacagcatgggcagcagcctgaccaccctgcagcccgtccagttctcccagccgctgcacccctcctaccagcagccgctcatgccacctgtgcagagccatgtgacccagagccccttcatggccaccatggctcagctgcagagcccccacggtgagcgccctgtgccccacacagcaggagatgatgatagaggttggctgtcaatggatgcaggggaaaggggtgcctggcaggcattgcagtctgcatgtgtctctgggacaagtgtgtttccgtgattgagggtgtctgcaggccagtgtgttcccatgtgaatgcacgtatctgtgtgtgtgcacgactgcttgtgtgagcagatccctagtgc

SEQ ID NO: 13806 - DNA, 2819 bp, Homo sapiens
  source 1..2819: mol_type = unassigned DNA
cttggctagtggggttttgggggggcagtgggtgcaaggagtttggtttgtgtctgccggccggcaggcaaacgcaacccacgcggtgggggaggcggctagcgtggtggacccgggccgcgtggccctgtggcagccgagccatggtttctaaactgagccagctgcagacggagctcctggcggccctgctcgagtcagggctgagcaaagaggcactgatccaggcactgggtgagccggggccctacctcctggctggagaaggccccctggacaagggggagtcctgcggcggcggtcgaggggagctggctgagctgcccaatgggctgggggagactcggggctccgaggacgagacggacgacgatggggaagacttcacgccacccatcctcaaagagctggagaacctcagccctgaggaggcggcccaccagaaagccgtggtggagacccttctgcaggaggacccgtggcgtgtggcgaagatggtcaagtcctacctgcagcagcacaacatcccacagcgggaggtggtcgataccactggcctcaaccagtcccacctgtcccaacacctcaacaagggcactcccatgaagacgcagaagcgggccgccctgtacacctggtacgtccgcaagcagcgagaggtggcgcagcagttcacccatgcagggcagggagggctgattgaagagcccacaggtgatgagctaccaaccaagaaggggcggaggaaccgtttcaagtggggcccagcatcccagcagacatccccaggcctcaaccagcagccccagaacctcatcatggcctcacttcctggggtcatgaccatcgggcctggtgagcctgcctccctgggtcctacgttcaccaacacaggtgcctccaccctggtcatcggcctggcctccacgcaggcacagagtgtgccggtcatcaacagcatgggcagcagcctgaccaccctgcagcccgtccagttctcccagccgctgcacccctcctaccagcagccgctcatgccacctgtgcagagccatgtgacccagagccccttcatggccaccatggctcagctgcagagcccccacgccctctacagccacaagcccgaggtggcccagtacacccacacgggcctgctcccgcagactatgctcatcaccgacaccaccaacctgagcgccctggccagcctcacgcccaccaagcaggtcttcacctcagacactgaggcctccagtgagtccgggcttcacacgccggcatctcaggccaccaccctccacgtccccagccaggaccctgccagcatccagcacctgcagccggcccaccggctcagcgccagccccacagtgtcctccagcagcctggtgctgtaccagagctcagactccagcaatggccagagccacctgctgccatccaaccacagcgtcatcgagaccttcatctccacccagatggcctcttcctcccagtaaccacggcacctgggccctggggcctgtactgcctgcttggggggtgatgagggcagcagccagccctgcctggaggacctgagcctgccgagcaaccgtggcccttcctggacagctgtgcctcgctccccactctgctctgatgcatcagaaagggagggctctgaggcgccccaacccgtggaggctgctcggggtgcacaggagggggtcgtggagagctaggagcaaagcctgttcatggcagatgtaggagggactgtcgctgcttcgtgggatacagtcttcttacttggaactgaagggggcggcctatgacttgggcacccccagcctgggcctatggagagccctgggaccgctacaccactctggcagccacacttctcaggacacaggcctgtgtagctgtgacctgctgagctctgagaggccctggatcagcgtggccttgttctgtcaccaatgtacccaccgggccactccttcctgccccaactccttccagctagtgacccacatgccatttgtactgaccccatcacctactcacacaggcatttcctgggtggctactctgtgccagagcctggggctctaacgcctgagcccagggaggccgaagctaacagggaaggcaggcagggctctcctggcttcccatccccagcgattccctctcccaggccccatgacctccagctttcctgtatttgttcccaagagcatcatgcctctgaggccagcctggcctcctgcctctactgggaaggctacttcggggctgggaagtcgtccttactcctgtgggagcctcgcaacccgtgccaagtccaggtcctggtggggcagctcctctgtctcgagcgccctgcagaccctgcccttgtttggggcaggagtagctgagctcacaaggcagcaaggcccgagcagctgagcagggccggggaactggccaagctgaggtgcccaggagaagaaagaggtgaccccagggcacaggagctacctgtgtggacaggactaacactcagaagcctgggggcctggctggctgagggcagttcgcagccaccctgaggagtctgaggtcctgagcactgccaggagggacaaaggagcctgtgaacccaggacaagcatggtcccacatccctgggcctgctgctgagaacctggccttcagtgtaccgcgtctaccctgggattcaggaaaaggcctggggtgacccggcaccccctgcagcttgtagccagccggggcgagtggcacgtttatttaacttttagtaaagtcaaggagaaatgcggtgg

SEQ ID NO: 13807 - DNA, 1493 bp, Homo sapiens
  source 1..1493: mol_type = unassigned DNA
cagtgggtgcaaggagtttggtttgtgtctgccggccggcaggcaaacgcaacccacgcgaaagccgtggtggagacccttctgcaggaggacccgtggcgtgtggcgaagatggtcaagtcctacctgcagcagcacaacatcccacagcgggaggtggtcgataccactggcctcaaccagtcccacctgtcccaacacctcaacaagggcactcccatgaagacgcagaagcgggccgccctgtacacctggtacgtccgcaagcagcgagaggtggcgcagcagttcacccatgcagggcagggagggctgattgaagagcccacaggtgatgagctaccaaccaagaaggggcggaggaaccgtttcaagtggggcccagcatcccagcagatcctgttccaggcctatgagaggcagaagaaccctagcaaggaggagcgagagacgctagtggaggagtgcaatagggcggaatgcatccagagaggggtgtccccatcacaggcacaggggctgggctccaacctcgtcacggaggtgcgtgtctacaactggtttgccaaccggcgcaaagaagaagccttccggcacaagctggccatggacacgtacagcgggccccccccagggccaggcccgggacctgcgctgcccgctcacagctcccctggcctgcctccacctgccctctcccccagtaaggtccacggtgtgcgctatggacagcctgcgaccagtgagactgcagaagtaccctcaagcagcggcggtcccttagtgacagtgtctacacccctccaccaagtgtcccccacgggcctggagcccagccacagcctgctgagtacagaagccaagctggtctcagcagctgggggccccctcccccctgtcagcaccctgacagcactgcacagcttggagcagacatccccaggcctcaaccagcagccccagaacctcatcatggcctcacttcctggggtcatgaccatcgggcctggtgagcctgcctccctgggtcctacgttcaccaacacaggtgcctccaccctggtcatcggtaagctggtggggatgggtgggcacctgggtgggaggctcatggggcaaccgcagaatccaggagctggaagagccactgggactcattcattcattcatacaacatgtatttatccagtgcctactctggaccagtcactgtgctacatcagtgatacctgggtgaaccaaacagaccaaaatctcagcaactcaagcagggaggcaggcactaagcataatacatcaattctgtggtacctcagaaggtgaagggtctatgggcaaattacagcagggtaagggggactgatgttttctaagtttttgttttatgaagaaaaattaagcccagaaagcccttatttgcaggtacaattatgcagaagcccagtacataagatagataaggagctgctaggagaggggagcagagaactgac

SEQ ID NO: 13808 - DNA, 1352 bp, Homo sapiens
  source 1..1352: mol_type = unassigned DNA
cttggctagtggggttttgggggggcagtgggtgcaaggagtttggtttgtgtctgccggccggcaggcaaacgcaacccacgcggtgggggaggcggctagcgtggtggacccgggccgcgtggccctgtggcagccgagccatggtttctaaactgagccagctgcagacggagctcctggcggccctgctcgagtcagggctgagcaaagaggcactgatccaggcactgggtgagccggggccctacctcctggctggagaaggccccctggacaagggggagtcctgcggcggcggtcgaggggagctggctgagctgcccaatgggctgggggagactcggggctccgaggacgagacggacgacgatggggaagacttcacgccacccatcctcaaagagctggagaacctcagccctgaggaggcggcccaccagaaagccgtggtggagacccttctgcaggaggacccgtggcgtgtggcgaagatggtcaagtcctacctgcagcagcacaacatcccacagcgggaggtggtcgataccactggcctcaaccagtcccacctgtcccaacacctcaacaagggcactcccatgaagacgcagaagcgggccgccctgtacacctggtacgtccgcaagcagcgagaggtggcgcagcagttcacccatgcagggcagggagggctgattgaagagcccacaggtgatgagctaccaaccaagaaggggcggaggaaccgtttcaagtggggcccagcatcccagcagatcctgttccaggcctatgagaggcagaagaaccctagcaaggaggagcgagagacgctagtggaggagtgcaatagggcggaatgcatccagagaggggtgtccccatcacaggcacaggggctgggctccaacctcgtcacggaggtgcgtgtctacaactggtttgccaaccggcgcaaagaagaagccttccggcacaagctggccatggacacgtacagcgggccccccccagggccaggcccgggacctgcgctgcccgctcacagctcccctggcctgcctccacctgccctctcccccagtaaggtccacggtgtgcgctatggacagcctgcgaccagtgagactgcagaagtaccctcaagcagcggcggtcccttagtgacagtgtctacacccctccaccaagtgtcccccacgggcctggagcccagccacagcctgctgagtacagaagccaagctggtctcagcagctgggggccccctcccccctgcagcttgtagccagccggggcgagtggcacgtttatttaacttttagtaaagtcaaggagaaatgcggtgg

SEQ ID NO: 13809 - DNA, 2014 bp, Homo sapiens
  source 1..2014: mol_type = unassigned DNA
ggccctgtggcagccgagccatggtttctaaactgagccagctgcagacggagctcctggcggccctgctcgagtcagggctgagcaaagaggcactgatccaggcactgggtgagccggggccctacctcctggctggagaaggccccctggacaagggggagtcctgcggcggcggtcgaggggagctggctgagctgcccaatgggctgggggagactcggggctccgaggacgagacggacgacgatggggaagacttcacgccacccatcctcaaagagctggagaacctcagccctgaggaggcggcccaccagaaagccgtggtggagacccttctgcaggaggacccgtggcgtgtggcgaagatggtcaagtcctacctgcagcagcacaacatcccacagcgggaggtggtcgataccactggcctcaaccagtcccacctgtcccaacacctcaacaagggcactcccatgaagacgcagaagcgggccgccctgtacacctggtacgtccgcaagcagcgagaggtggcgcagcagttcacccatgcagggcagggagggctgattgaagagcccacaggtgatgagctaccaaccaagaaggggcggaggaaccgtttcaagtggggcccagcatcccagcagatcctgttccaggcctatgagaggcagaagaaccctagcaaggaggagcgagagacgctagtggaggagtgcaatagggcggaatgcatccagagaggggtgtccccatcacaggcacaggggctgggctccaacctcgtcacggaggtgcgtgtctacaactggtttgccaaccggcgcaaagaagaagccttccggcacaagctggccatggacacgtacagcgggccccccccagggccaggcccgggacctgcgctgcccgctcacagctcccctggcctgcctccacctgccctctcccccagtaaggtccacggtgtgcgctatggacagcctgcgaccagtgagactgcagaagtaccctcaagcagcggcggtcccttagtgacagtgtctacacccctccaccaagtgtcccccacgggcctggagcccagccacagcctgctgagtacagaagccaagctggtctcagcagctgggggccccctcccccctgtcagcaccctgacagcactgcacagcttggagcagacatccccaggcctcaaccagcagccccagaacctcatcatggcctcacttcctggggtcatgaccatcgggcctggtgagcctgcctccctgggtcctacgttcaccaacacaggtgcctccaccctggtcatcggcctggcctccacgcaggcacagagtgtgccggtcatcaacagcatgggcagcagcctgaccaccctgcagcccgtccagttctcccagccgctgcacccctcctaccagcagccgctcatgccacctgtgcagagccatgtgacccagagccccttcatggccaccatggctcagctgcagagcccccacgccctctacagccacaagcccgaggtggcccagtacacccacacgggcctgctcccgcagactatgctcatcaccgacaccaccaacctgagcgccctggccagcctcacgcccaccaagcaggaggctgctctgctcccccaggtcttcacctcagacactgaggcctccagtgagtccgggcttcacacgccggcatctcaggccaccaccctccacgtccccagccaggaccctgccagcatccagcacctgcagccggcccaccggctcagcgccagccccacagtgtcctccagcagcctggtgctgtaccagagctcagactccagcaatggccagagccacctgctgccatccaaccacagcgtcatcgagaccttcatctccacccagatggcctcttcctcccagtaaccacggcacctgggccctggggcctgtactgcctgcttggggggtgatgagggcagcagccagccctgcctggagga

SEQ ID NO: 13810 - DNA, 1936 bp, Homo sapiens
  source 1..1936: mol_type = unassigned DNA
cttggctagtggggttttgggggggcagtgggtgcaaggagtttggtttgtgtctgccggccggcaggcaaacgcaacccacgcggtgggggaggcggctagcgtggtggacccgggccgcgtggccctgtggcagccgagccatggtttctaaactgagccagctgcagacggagctcctggcggccctgctcgagtcagggctgagcaaagaggcactgatccaggcactgggtgagccggggccctacctcctggctggagaaggccccctggacaagggggagtcctgcggcggcggtcgaggggagctggctgagctgcccaatgggctgggggagactcggggctccgaggacgagacggacgacgatggggaagacttcacgccacccatcctcaaagagctggagaacctcagccctgaggaggcggcccaccagaaagccgtggtggagacccttctgcaggaggacccgtggcgtgtggcgaagatggtcaagtcctacctgcagcagcacaacatcccacagcgggaggtggtcgataccactggcctcaaccagtcccacctgtcccaacacctcaacaagggcactcccatgaagacgcagaagcgggccgccctgtacacctggtacgtccgcaagcagcgagaggtggcgcagcagttcacccatgcagggcagggagggctgattgaagagcccacaggtgatgagctaccaaccaagaaggggcggaggaaccgtttcaagtggggcccagcatcccagcagatcctgttccaggcctatgagaggcagaagaaccctagcaaggaggagcgagagacgctagtggaggagtgcaatagggcggaatgcatccagagaggggtgtccccatcacaggcacaggggctgggctccaacctcgtcacggaggtgcgtgtctacaactggtttgccaaccggcgcaaagaagaagccttccggcacaagctggccatggacacgtacagcgggccccccccagggccaggcccgggacctgcgctgcccgctcacagctcccctggcctgcctccacctgccctctcccccagtaaggtccacggtgtgcgctatggacagcctgcgaccagtgagactgcagaagtaccctcaagcagcggcggtcccttagtgacagtgtctacacccctccaccaagtgtcccccacgggcctggagcccagccacagcctgctgagtacagaagccaagctggtctcagcagctgggggccccctcccccctgtcagcaccctgacagcactgcacagcttggagcagacatccccaggcctcaaccagcagccccagaacctcatcatggcctcacttcctggggtcatgaccatcgggcctggtgagcctgcctccctgggtcctacgttcaccaacacaggtgcctccaccctggtcatcggcctggcctccacgcaggcacagagtgtgccggtcatcaacagcatgggcagcagcctgaccaccctgcagcccgtccagttctcccagcaaggcccgagcagctgagcagggccggggaactggccaagctgaggtgcccaggagaagaaagaggtgaccccagggcacaggagctacctgtgtggacaggactaacactcagaagcctgggggcctggctggctgagggcagttcgcagccaccctgaggagtctgaggtcctgagcactgccaggagggacaaaggagcctgtgaacccaggacaagcatggtcccacatccctgggcctgctgctgagaacctggccttcagtgtaccgcgtctaccctgggattcaggaaaaggcctggggtgacccggcaccccctgcagcttgtagccagccggggcgagtggcacgtttatttaacttttagtaaagtcaaggagaaatgcggtgg

SEQ ID NO: 13811 - DNA, 1493 bp, Homo sapiens
  source 1..1493: mol_type = unassigned DNA
aaacgcaacccacgcggtgggggaggcggctagcgtggtggacccgggccgcgtggccctgtggcagccgagccatggtttctaaactgagccagctgcagacggagctcctggcggccctgctcgagtcagggctgagcaaagaggcactgatccaggcactgggtgagccggggccctacctcctggctggagaaggccccctggacaagggggagtcctgcggcggcggtcgaggggagctggctgagctgcccaatgggctgggggagactcggggctccgaggacgagacggacgacgatggggaagacttcacgccacccatcctcaaagagctggagaacctcagccctgaggaggcggcccaccagaaagccgtggtggagacccttctgcaggaggacccgtggcgtgtggcgaagatggtcaagtcctacctgcagcagcacaacatcccacagcgggaggtggtcgataccactggcctcaaccagtcccacctgtcccaacacctcaacaagggcactcccatgaagacgcagaagcgggccgccctgtacacctggtacgtccgcaagcagcgagaggtggcgcagcagttcacccatgcagggcagggagggctgattgaagagcccacaggtgatgagctaccaaccaagaaggggcggaggaaccgtttcaagtggggcccagcatcccagcagatcctgttccaggcctatgagaggcagaagaaccctagcaaggaggagcgagagacgctagtggaggagtgcaatagggcggaatgcatccagagaggggtgtccccatcacaggcacaggggctgggctccaacctcgtcacggaggtgcgtgtctacaactggtttgccaaccggcgcaaagaagaagccttccggcacaagctggccatggacacgtacagcgggccccccccagggccaggcccgggacctgcgctgcccgctcacagctcccctggcctgcctccacctgccctctcccccagtaaggtccacggtgtgcgctatggacagcctgcgaccagtgagactgcagaagtaccctcaagcagcggcggtcccttagtgacagtgtctacacccctccaccaagtgtcccccacgggcctggagcccagccacagcctgctgagtacagaagccaagctggtctcagcagctgggggccccctcccccctgtcagcaccctgacagcactgcacagcttggagcagacatccccaggcctcaaccagcagccccagaacctcatcatggcctcacttcctggggtcatgaccatcgggcctggtgagcctgcctccctgggtcctacgttcaccaacacaggtgcctccaccctgcccttgtttggggcaggagtagctgagctcacaaggcagcaaggcccgagcagctgagcagggccggggaactggccaagctgaggtgcccaggagaagaaagaggtgaccccaggg

SEQ ID NO: 13812 - DNA, 3030 bp, Homo sapiens
  source 1..3030: mol_type = unassigned DNA
cttggctagtggggttttgggggggcagtgggtgcaaggagtttggtttgtgtctgccggccggcaggcaaacgcaacccacgcggtgggggaggcggctagcgtggtggacccgggccgcgtggccctgtggcagccgagccatggtttctaaactgagccagctgcagacggagctcctggcggccctgctcgagtcagggctgagcaaagaggcactgatccaggcactgggtgagccggggccctacctcctggctggagaaggccccctggacaagggggagtcctgcggcggcggtcgaggggagctggctgagctgcccaatgggctgggggagactcggggctccgaggacgagacggacgacgatggggaagacttcacgccacccatcctcaaagagctggagaacctcagccctgaggaggcggcccaccagaaagccgtggtggagacccttctgcaggaggacccgtggcgtgtggcgaagatggtcaagtcctacctgcagcagcacaacatcccacagcgggaggtggtcgataccactggcctcaaccagtcccacctgtcccaacacctcaacaagggcactcccatgaagacgcagaagcgggccgccctgtacacctggtacgtccgcaagcagcgagaggtggcgcagcagttcacccatgcagggcagggagggctgattgaagagcccacaggtgatgagctaccaaccaagaaggggcggaggaaccgtttcaagtggggcccagcatcccagcagatcctgttccaggcctatgagaggcagaagaaccctagcaaggaggagcgagagacgctagtggaggagtgcaatagggcggaatgcatccagagaggggtgtccccatcacagccacagcctgctgagtacagaagccaagctggtctcagcagctgggggccccctcccccctgtcagcaccctgacagcactgcacagcttggagcagacatccccaggcctcaaccagcagccccagaacctcatcatggcctcacttcctggggtcatgaccatcgggcctggtgagcctgcctccctgggtcctacgttcaccaacacaggtgcctccaccctggtcatcggcctggcctccacgcaggcacagagtgtgccggtcatcaacagcatgggcagcagcctgaccaccctgcagcccgtccagttctcccagccgctgcacccctcctaccagcagccgctcatgccacctgtgcagagccatgtgacccagagccccttcatggccaccatggctcagctgcagagcccccacgccctctacagccacaagcccgaggtggcccagtacacccacacgggcctgctcccgcagactatgctcatcaccgacaccaccaacctgagcgccctggccagcctcacgcccaccaagcaggtcttcacctcagacactgaggcctccagtgagtccgggcttcacacgccggcatctcaggccaccaccctccacgtccccagccaggaccctgccagcatccagcacctgcagccggcccaccggctcagcgccagccccacagtgtcctccagcagcctggtgctgtaccagagctcagactccagcaatggccagagccacctgctgccatccaaccacagcgtcatcgagaccttcatctccacccagatggcctcttcctcccagtaaccacggcacctgggccctggggcctgtactgcctgcttggggggtgatgagggcagcagccagccctgcctggaggacctgagcctgccgagcaaccgtggcccttcctggacagctgtgcctcgctccccactctgctctgatgcatcagaaagggagggctctgaggcgccccaacccgtggaggctgctcggggtgcacaggagggggtcgtggagagctaggagcaaagcctgttcatggcagatgtaggagggactgtcgctgcttcgtgggatacagtcttcttacttggaactgaagggggcggcctatgacttgggcacccccagcctgggcctatggagagccctgggaccgctacaccactctggcagccacacttctcaggacacaggcctgtgtagctgtgacctgctgagctctgagaggccctggatcagcgtggccttgttctgtcaccaatgtacccaccgggccactccttcctgccccaactccttccagctagtgacccacatgccatttgtactgaccccatcacctactcacacaggcatttcctgggtggctactctgtgccagagcctggggctctaacgcctgagcccagggaggccgaagctaacagggaaggcaggcagggctctcctggcttcccatccccagcgattccctctcccaggccccatgacctccagctttcctgtatttgttcccaagagcatcatgcctctgaggccagcctggcctcctgcctctactgggaaggctacttcggggctgggaagtcgtccttactcctgtgggagcctcgcaacccgtgccaagtccaggtcctggtggggcagctcctctgtctcgagcgccctgcagaccctgcccttgtttggggcaggagtagctgagctcacaaggcagcaaggcccgagcagctgagcagggccggggaactggccaagctgaggtgcccaggagaagaaagaggtgaccccagggcacaggagctacctgtgtggacaggactaacactcagaagcctgggggcctggctggctgagggcagttcgcagccaccctgaggagtctgaggtcctgagcactgccaggagggacaaaggagcctgtgaacccaggacaagcatggtcccacatccctgggcctgctgctgagaacctggccttcagtgtaccgcgtctaccctgggattcaggaaaaggcctggggtgacccggcaccccctgcagcttgtagccagccggggcgagtggcacgtttatttaacttttagtaaagtcaaggagaaatgcggtgg

SEQ ID NO: 13813 - DNA, 3050 bp, Homo sapiens
  source 1..3050: mol_type = unassigned DNA
ctatttgagtttgtggcgcgcgaggccctgcagtccgggttggcgcttgggtactggctgggtccgatgctgggtacgctgcgcgccatggagggcgaggacgtggaagacgaccagctgctgcagaagctcagggccagtcgccgccgcttccagaggcgcatgcagcggctgatagagaagtacaaccagcccttcgaggacaccccggtggtgcaaatggccacgctgacctacgagacgccacagggattgagaatttggggtggaagactaataaaggaaagaaacgaaggagagatccaggactcctccatgaagcccgcggacaggacagatggctccgtgcaagctgcagcctggggtcctgagcttccctcgcaccgcacagtcctgggagccgattcaaaaagcggtgaggtcgatgccacgtcagaccaggaagagtcagttgcttgggccttagcacctgcagtgcctcaaagccctttgaaaaatgaattaagaaggaaatacttgacccaagtggatatactgctacaaggtgcagagtattttgagtgtgcaggtaacagagctggaagggatgtacgtgtgactccgctgccttcactggcctcacctgccgtgcctgcccccggatactgcagtcgtatctccagaaagagtcctggtgacccagcgaaaccagcttcatctcccagagaatgggatcctttgcatccttcctccacagacatggccttagtacctagaaatgacagcctctccctacaagagaccagtagcagcagcttcttaagcagccagccctttgaagatgatgacatttgcaatgtgaccatcagtgacctgtacgcagggatgctgcactccatgagccggctgttgagcacaaagccatcaagcatcatctccaccaaaacgttcatcatgcaaaactggaactccaggaggaggcacagatataagagcaggatgaacaaaacatattgcaaaggagccagacgttctcagaggagctccaaggagaacttcataccctgctctgagcctgtgaaagggacaggggcattaagagattgcaagaacgtattagatgtttcttgccgtaagacaggtttaaaattggaaaaagcttttcttgaagtcaacagaccccaaatccataagttagatccaagttggaaggagcgcaaagtgacaccctcgaagtattcttccttgatttacttcgactccagtgcaacatataatcttgatgaggaaaatagatttaggacattaaaatggttaatttctcctgtaaaaatagtttccagaccaacaatacgacagggccatggagagaaccgtcagagggagattgaaatccgatttgatcagcttcatcgggaatattgcctgagtcccaggaaccagcctcgccggatgtgcctcccggactcctgggccatgaacatgtacagagggggtcctgcgagtcctggtggccttcagggcttagaaacccgcaggctgagtttaccttccagcaaagcaaaagcaaaaagtttaagtgaggcttttgaaaacctaggcaaaagatctctggaagcaggtaggtgcctgcccaagagcgattcatcttcatcacttccaaagaccaaccccacacacagcgcaactcgcccgcagcagacatctgaccttcacgttcagggaaatagttctggaatatttagaaagtcagtgtcacccagcaaaactctttcagtcccagataaagaagtgccaggccacggaaggaatcgttacgatgaaattaaagaagaatttgacaagcttcatcaaaagtattgcctcaaatctcctgggcagatgacagtgcctttatgtattggagtgtctacagataaagcaagtatggaagttcgatatcaaacagaaggcttcttaggaaaattaaatccagaccctcacttccagggtttccagaagttgccatcatcacccctggggtgcagaaaaagtctactgggctcaactgcaattgaggctccttcatctacatgtgttgctcgtgccatcacgagggatggcacgagggaccatcagttccctgcaaaaagacccaggctatcagaaccccagggctccggacgccagggcaattccctgggtgcctcagatggggtggacaacaccgtcagaccgggagaccagggcagctcttcacagcccaactcagaagagagaggagagaacacgtcttacaggatggaagagaaaagtgatttcatgctagaaaaattggaaactaaaagtgtgtagctaggttatttcggagtgttatttatcttcccacttgctctctgtttgtatttttgttttgtttttgattcttgagactgtgaggacttggttgacttctctgcccttaaagtaaatattagtgaaattggttccatcagagataacctcgagttcttggtgtagaaattatgtgaataaagttgctcaattagaatttttagggttctctttgataggcctgtttttctgatgtgtgtgttttttttgggggggggttatttgtttgtttgtttgtttgtttgtttgtttttgagacagtctctctctatcgcccaggctggagtgcggtggcacaatcttggctcactgcaacttccgcctcccgggttcaagcgattcttctgcctcagcctcccgagtagctgggattacaggcgcgcgccaccacgcctggctaatttttgtagttttagtagagacggggtttcaccatattgaccaggctggtctcgagctcctggcctcgtgatccatctgcctcggcctcccaaagtgctgggattataggcgtgagccactgctcccagccgtgtgttcttttttaaatttagatatgtccagagaatcctctctcctgtttcccatttcattcgagaatattgtttgcttgtgagacgtaagttcgagccctgcatgcaatgacccttgaaggaaaataaacagtcctggtggtcccagacgctcctgcagccaca

SEQ ID NO: 13814 - DNA, 2885 bp, Homo sapiens
  source 1..2885: mol_type = unassigned DNA
ctatttgagtttgtggcgcgcgaggccctgcagtccgggttggcgcttgggtactggctgggtccgatgctgggtacgctgcgcgccatggagggcgaggacgtggaagacgaccagctgctgcagaagctcagggccagtcgccgccgcttccagaggcgcatgcagcggctgatagagaagtacaaccagcccttcgaggacaccccggtggtgcaaatggccacgctgacctacgagacgccacagggattgagaatttggggtggaagactaataaaggaaagaaacgaaggagagatccagcctgcagtgcctcaaagccctttgaaaaatgaattaagaaggaaatacttgacccaagtggatatactgctacaaggtgcagagtattttgagtgtgcaggtaacagagctggaagggatgtacgtgtgactccgctgccttcactggcctcacctgccgtgcctgcccccggatactgcagtcgtatctccagaaagagtcctggtgacccagcgaaaccagcttcatctcccagagaatgggatcctttgcatccttcctccacagacatggccttagtacctagaaatgacagcctctccctacaagagaccagtagcagcagcttcttaagcagccagccctttgaagatgatgacatttgcaatgtgaccatcagtgacctgtacgcagggatgctgcactccatgagccggctgttgagcacaaagccatcaagcatcatctccaccaaaacgttcatcatgcaaaactggaactccaggaggaggcacagatataagagcaggatgaacaaaacatattgcaaaggagccagacgttctcagaggagctccaaggagaacttcataccctgctctgagcctgtgaaagggacaggggcattaagagattgcaagaacgtattagatgtttcttgccgtaagacaggtttaaaattggaaaaagcttttcttgaagtcaacagaccccaaatccataagttagatccaagttggaaggagcgcaaagtgacaccctcgaagtattcttccttgatttacttcgactccagtgcaacatataatcttgatgaggaaaatagatttaggacattaaaatggttaatttctcctgtaaaaatagtttccagaccaacaatacgacagggccatggagagaaccgtcagagggagattgaaatccgatttgatcagcttcatcgggaatattgcctgagtcccaggaaccagcctcgccggatgtgcctcccggactcctgggccatgaacatgtacagagggggtcctgcgagtcctggtggccttcagggcttagaaacccgcaggctgagtttaccttccagcaaagcaaaagcaaaaagtttaagtgaggcttttgaaaacctaggcaaaagatctctggaagcaggtaggtgcctgcccaagagcgattcatcttcatcacttccaaagaccaaccccacacacagcgcaactcgcccgcagcagacatctgaccttcacgttcagggaaatagttctggaatatttagaaagtcagtgtcacccagcaaaactctttcagtcccagataaagaagtgccaggccacggaaggaatcgttacgatgaaattaaagaagaatttgacaagcttcatcaaaagtattgcctcaaatctcctgggcagatgacagtgcctttatgtattggagtgtctacagataaagcaagtatggaagttcgatatcaaacagaaggcttcttaggaaaattaaatccagaccctcacttccagggtttccagaagttgccatcatcacccctggggtgcagaaaaagtctactgggctcaactgcaattgaggctccttcatctacatgtgttgctcgtgccatcacgagggatggcacgagggaccatcagttccctgcaaaaagacccaggctatcagaaccccagggctccggacgccagggcaattccctgggtgcctcagatggggtggacaacaccgtcagaccgggagaccagggcagctcttcacagcccaactcagaagagagaggagagaacacgtcttacaggatggaagagaaaagtgatttcatgctagaaaaattggaaactaaaagtgtgtagctaggttatttcggagtgttatttatcttcccacttgctctctgtttgtatttttgttttgtttttgattcttgagactgtgaggacttggttgacttctctgcccttaaagtaaatattagtgaaattggttccatcagagataacctcgagttcttggtgtagaaattatgtgaataaagttgctcaattagaatttttagggttctctttgataggcctgtttttctgatgtgtgtgttttttttgggggggggttatttgtttgtttgtttgtttgtttgtttgtttttgagacagtctctctctatcgcccaggctggagtgcggtggcacaatcttggctcactgcaacttccgcctcccgggttcaagcgattcttctgcctcagcctcccgagtagctgggattacaggcgcgcgccaccacgcctggctaatttttgtagttttagtagagacggggtttcaccatattgaccaggctggtctcgagctcctggcctcgtgatccatctgcctcggcctcccaaagtgctgggattataggcgtgagccactgctcccagccgtgtgttcttttttaaatttagatatgtccagagaatcctctctcctgtttcccatttcattcgagaatattgtttgcttgtgagacgtaagttcgagccctgcatgcaatgacccttgaaggaaaataaacagtcctggtggtcccagacgctcctgcagcc

SEQ ID NO: 13815 - DNA, 2792 bp, Homo sapiens
  source 1..2792: mol_type = unassigned DNA
ctatttgagtttgtggcgcgcgaggccctgcagtccgggttggcgcttgggtactggctgggtccgatgctgggtacgctgcgcgccatggagggcgaggacgtggaagacgaccagctgctgcagaagctcagggccagtcgccgccgcttccagaggcgcatgcagcggctgatagagaagtacaaccagcccttcgaggacaccccggtggtgcaaatggccacgctgacctacgagacgccacagggattgagaatttggggtggaagactaataaaggaaagaaacgaaggagagatccagtgtgcaggtaacagagctggaagggatgtacgtgtgactccgctgccttcactggcctcacctgccgtgcctgcccccggatactgcagtcgtatctccagaaagagtcctggtgacccagcgaaaccagcttcatctcccagagaatgggatcctttgcatccttcctccacagacatggccttagtacctagaaatgacagcctctccctacaagagaccagtagcagcagcttcttaagcagccagccctttgaagatgatgacatttgcaatgtgaccatcagtgacctgtacgcagggatgctgcactccatgagccggctgttgagcacaaagccatcaagcatcatctccaccaaaacgttcatcatgcaaaactggaactccaggaggaggcacagatataagagcaggatgaacaaaacatattgcaaaggagccagacgttctcagaggagctccaaggagaacttcataccctgctctgagcctgtgaaagggacaggggcattaagagattgcaagaacgtattagatgtttcttgccgtaagacaggtttaaaattggaaaaagcttttcttgaagtcaacagaccccaaatccataagttagatccaagttggaaggagcgcaaagtgacaccctcgaagtattcttccttgatttacttcgactccagtgcaacatataatcttgatgaggaaaatagatttaggacattaaaatggttaatttctcctgtaaaaatagtttccagaccaacaatacgacagggccatggagagaaccgtcagagggagattgaaatccgatttgatcagcttcatcgggaatattgcctgagtcccaggaaccagcctcgccggatgtgcctcccggactcctgggccatgaacatgtacagagggggtcctgcgagtcctggtggccttcagggcttagaaacccgcaggctgagtttaccttccagcaaagcaaaagcaaaaagtttaagtgaggcttttgaaaacctaggcaaaagatctctggaagcaggtaggtgcctgcccaagagcgattcatcttcatcacttccaaagaccaaccccacacacagcgcaactcgcccgcagcagacatctgaccttcacgttcagggaaatagttctggaatatttagaaagtcagtgtcacccagcaaaactctttcagtcccagataaagaagtgccaggccacggaaggaatcgttacgatgaaattaaagaagaatttgacaagcttcatcaaaagtattgcctcaaatctcctgggcagatgacagtgcctttatgtattggagtgtctacagataaagcaagtatggaagttcgatatcaaacagaaggcttcttaggaaaattaaatccagaccctcacttccagggtttccagaagttgccatcatcacccctggggtgcagaaaaagtctactgggctcaactgcaattgaggctccttcatctacatgtgttgctcgtgccatcacgagggatggcacgagggaccatcagttccctgcaaaaagacccaggctatcagaaccccagggctccggacgccagggcaattccctgggtgcctcagatggggtggacaacaccgtcagaccgggagaccagggcagctcttcacagcccaactcagaagagagaggagagaacacgtcttacaggatggaagagaaaagtgatttcatgctagaaaaattggaaactaaaagtgtgtagctaggttatttcggagtgttatttatcttcccacttgctctctgtttgtatttttgttttgtttttgattcttgagactgtgaggacttggttgacttctctgcccttaaagtaaatattagtgaaattggttccatcagagataacctcgagttcttggtgtagaaattatgtgaataaagttgctcaattagaatttttagggttctctttgataggcctgtttttctgatgtgtgtgttttttttgggggggggttatttgtttgtttgtttgtttgtttgtttgtttttgagacagtctctctctatcgcccaggctggagtgcggtggcacaatcttggctcactgcaacttccgcctcccgggttcaagcgattcttctgcctcagcctcccgagtagctgggattacaggcgcgcgccaccacgcctggctaatttttgtagttttagtagagacggggtttcaccatattgaccaggctggtctcgagctcctggcctcgtgatccatctgcctcggcctcccaaagtgctgggattataggcgtgagccactgctcccagccgtgtgttcttttttaaatttagatatgtccagagaatcctctctcctgtttcccatttcattcgagaatattgtttgcttgtgagacgtaagttcgagccctgcatgcaatgacccttgaaggaaaataaacagtcctggtggtcccagacgctcctgcagcc

SEQ ID NO: 13816 - DNA, 5706 bp, Homo sapiens
  source 1..5706: mol_type = unassigned DNA
acgagagggcgcagcgcggcgcggcagggattcgcgggcgaccacccggcgcaggagcggccgcgtttcggcctcagaatccattgaagacttgaacaagtgggccctatttcttgtgtctccttttatacttgaagcagaacacatagcatttgtgacggagagcatttgggtacaaagtgagaatttacagagatcatcctcttcagaaacagttcggtttttgcccactagggatgatgtggtttctcatgaggttacttgctctaaaggactttatattttggaaccataagagcacccttgtggcccaggcactttatggatgatcccttttagtgctcccagtaaccttccaagattgtcaagtggtcagactgttgtttgccattagcttgcagacctggggatccttatcggctaattgctgaagcaagtgtggacaacttcagcaagctgggggtggcgttcatggaagatagactccacatggataatggactggtaccccaaaagattgtgtcggtgcacttgcaggactccactctgaaggaagttaaggatcaggtctcaaacaagcaagcccagatcctagagccgaagcctgaaccttctcttgagattaagcctgagcaggacggtatggagcatgttggcagagatgacccaaaggctcttggtgaagaacccaaacaaaggagaggcagtgcctctgggagtgagcctgctggggacagtgacaggggagggggccccgttgagcattatcacctccatctgtctagttgccacgagtgtctggaacttgagaacagcaccattgagtcagtcaagtttgcgtctgccgagaacattccagaccttccctacgattatagcagcagtttggagagtgttgctgatgagacctcccccgaaagagaagggaggagagtcaacctcacgggaaaggcacccaacatcctcctctatgtgggctccgactcccaggaagccctcggccggttccacgaggtccggtctgtgctggccgactgtgtggacattgacagttatattctctaccacctgctggaggacagtgctctcagagacccgtggacggacaactgtctgctgttggtcattgctaccagggagtccattcccgaagacctgtaccagaagttcatggcctatctttctcagggagggaaggtgttgggcctgtcttcatccttcacctttggtggctttcaggtgacaagcaagggtgcactgcacaagacagtccagaacttggttttctccaaggctgaccagagcgaggtgaagctcagcgtcttgagcagtggctgcaggtaccaggaaggccccgtccggctcagccccggcaggctccagggccacctggagaatgaggacaaggacaggatgattgtgcatgtgccttttggaactcgcgggggagaagctgttctttgccaggtgcacttagaactacctcccagctccaacatagtgcaaactccagaagattttaacttgctcaagtcaagcaattttagaagatacgaagtccttagagagattctgacaacccttggcctcagctgtgacatgaaacaagttcctgccttaactcctctttacttgctgtcagctgcggaggaaatcagggatcctcttatgcagtggcttgggaaacatgtggactccgagggagaaataaaatccggccagctctctcttagatttgtttcatcctacgtgtctgaagtagaaataaccccatcttgtatacctgtggtgaccaacatggaggccttctcatcagaacatttcaacttagagatctatcgccaaaatctgcagaccaagcagttggggaaagtaattttgtttgccgaagtgacccccacaacgatgcgtctcctggatgggctgatgtttcagacaccgcaggaaatgggcttaatagtgatcgcggcccggcagaccgagggcaaaggacggggagggaatgtgtggctgagccctgtgggatgtgctctttctactctgctcatctccattccactgagatcccagctgggacagaggatcccgtttgtccagcatctgatgtccgtggctgtcgtggaagcagtgaggtccattcccgagtatcaggatatcaacttacgagtgaagtggcccaacgatatttattacagtgacctcatgaagatcggcggagttctggttaactcaacactcatgggagaaacattttatatacttattggctgtggatttaatgtgactaacagtaaccctaccatctgcatcaacgacctcatcacagaatacaataaacaacacaaggcagaactgaagcccttaagagccgattatctcatcgccagagtcgtgactgtgctggagaaactgatcaaagagtttcaggacaaagggcccaacagcgtccttcccctttattaccgatactgggtccacagtggtcagcaagtccatctgggcagcgcagagggaccaaaggtgtccatcgttggcctggacgattctggcttcctccaggttcaccaggagggcggcgaggttgtgactgtgcacccggacggcaactccttcgacatgctgagaaacctcatcctccccaaacggcggtaatgccgggcgtccccgagacgcggctgcctgtccgtgcccatgcatctggaaatctaatttagagttgtaggtgaattttcttttcctccaattcatttgttaagtctttgttctttttctgtgtttctgtttgtttttaggtttgttttgttgtcgttttctttggtgtttgaagaggctctgggatagatggttaagaagtagaaaatttagtttagggaaagccctcccacaggtgggaaattgctctcccctctgtggcttggacttacgtttattgtcaaggggagtttttacatggaaatgacaatgggaaaattcagatattttcttagtagtgcagacctttacccctagtctatgaaaaaacaaaccaaaatatgctcttgcgcccaggccagtggtgagttagaggtatgctatcactgtttgtaagcatctggggaggtactgaactgtaagaacatgcttggacacttagtcattgttctgtgtttttattaatgaagaaaagggaagacagacttccaagagttactgtccacccggtggtgtggccccatagcgaagtctaaatgcctgtagagatagagctagctggtgtggttgcagtgaccttgtagaggaaatcagttcattactttgacatcattcagtgagctctcctttcctaaggaagtttaaatgtccttagttagggactgactttcttaagtaagtttaaatttactacatattgtgaagagacaggatcaagttcagaatccttaaatgtctgattaggcatcacttggatgaggaggtgggcgatttggctctgacagctggagatgaaggcacactcataccacatacaagggaggatttggagcttttaagccagtttcagatttactctgaaatgtggagcattcctgcaagactgtgcagctcacggaatatagaagacatggcattttactcagaagtcataagtttttgcccccctcatttacctcgtattaccaagaaagaaaatgttatcgatactaaacaccatcagttcagagggaggatgtgtgtgtgtgcccgcatatgtgtgtgcgtgcgtgtgtgcgcacatagctttaaaagaagacattcaaaatttgatgtgctacaagcctcatgaaagaacaaaagaaatgaagccttttgatatgcattcgctattcccagatgtacgccatgccttttccatgtccctcctatctctgttgaacttatgaatcatactcattacttttcagctttttaaaaggccaatttttgtccagttttctctcttccagtcccagctgaaattagtggaaagaaagtttgatggagctttcagctttgaacaaaatcccttcattgtaaactagcaccatctttatccaggtcttacccagtcaggctaattccagaaacttgtggtttttagtatagtctgtctacctttagccaggcacaggacagccctatgaaaaaatacccaatatatattttttggaaatgaaacattaaaagaacttaaaaagtaatttttggaaatgaggcttcaattagaattatttttctcaaaaaacaaacaaacaaaaaacacaaaaaaaaccactcttctccaaatgcccaagccttctttcaaaattagttagaaacttaagtaaaatacaagtccacaccatccccaaattacaaaatggacttacccttgagagggcatctgcagaatatcatcagggacaaagatctcgaggctaacgatgtaggtttcatttctcagactttgtaatataaggcaagccctctctcagagctgccatcatcactttttgaatttctttgggggttatttaatgaaaaacatgctatgttttgttttaagctgaagtcctattctggacactctgctttgggaaaaaatgttatcatttaatttcctttctgcaaattaaaactaatgaagtgtggccttgtcaaaggctatggagatgttccgggcatactgctgtgctctgtgctttccagcaggcgctcctccctcacgcaggagactcagttgtcctgagagagatgaagcagccttgaagcagatgctgcgttttccataaacctgattttgcctcacatgaaccaaagactctcaaaactccgcttctatagaattagctgaataaaggcattttactgatagctgttcgtgttagcgaaacctgtctacctgctatagcacactctccgatttgggccatttatgcaccccgcaacctgggatctcaaggagctttaaagtcttaatgggaacttggcattttcctgatgatctttaaaatgtggtcactaaactcaggattggcgtgtgcttttagaacactggagtagcccttgttttagaggctgtgcattgagtatcgaccgtattttgtaaaaggcaagatatcctcccttccaggctggtaacgggtttcaaggggactcttgaggaagtgccccctaaaatagaacacagcaataactgggcttcctgtccccacccccaccccagcagtgctctctggcactgggaactctgctagggagtggtggaagtaggaaggatttgtgtgcaaaggaaaatcgtggttgagtttcactgcagcaggctgacgttgcctgatgtgagagcaagtggccgactggggtgcgggtgcacaggtcgggggagcacaggccacagagcgcagcctctgggggtcccccaaggcacagcatatacagcatggtcgccccttgccctggagtctgggaacaaagagaggagccagcctccccgcactgcttcagatggaaaagggaggcagggtgggcttccgttctccagatctgtttgctcttaacaggcagaacatgggagaatccttattcctggttaatcactatgcatatttgaaataaaagaaagcgtaagcctctgcaattttaacttctcaaaggatgtctctgaaaagaatcactttaaaccaatgcctataaaaagcaagtctaccaaaataaactaagactttctatgtg

SEQ ID NO: 13817 - DNA, 6466 bp, Homo sapiens
  source 1..6466: mol_type = unassigned DNA
ggccgcgtcttctgcgtcagcgacagccagtccattgaagacttgaacaagtgggccctatttcttgtgtctccttttatacttgaagcagaacacatagcatttgtgacggagagcatttgggtacaaagtgagaatttacagagatcatcctcttcagaaacaacggagtgtcgttctgtcgtccaggctggagtgcagtggtgtggtctcggctcaccacaacctctgcctactgggttccagtgattctcctgcctcagcatcccgagtagctgggactacaggtgcacgctaccatgcccggctaatttttgtatttttagtagaggcgggggtttcaccatgccatccaggctggtttcgaactcctgacctcgtgatccacctgtctcggcctcccaaagtgctgggattacaggtgtgagccaccgcgcctggccctgtattttcaaattctttacctctgcgtttccagccttgctccatccaatttgttactagagctttttaacaatttcacgttgaattaagatgatttggaagaggagaaacaagagtcagaaaaattagcagcatccgtgatctgactctgggtaccagtgggttgttgagatttctgttccccactcactgcagagctgctgcctgccaatgccccctgttgggcagggccacctgtgctagtttaacctggggtctttcactcccggactgcttcttggatgtgagttttaagttgagcagagaagatatgccttgcctgctgccatacattgtaacatcaagtcaagagctttagttacttaacagatttctgctggctgctattataggaggaaactcctttgtttagggacagccagggcttccttagctttgatctttgggagtgagccttttgcttgacttcccttctcttttccatgcctttgtttccatctcgaagtgcaaatttaaagtgtcctgtttgcctttatccactggaaggcaaacaccctggacgacgtatcagtgacagcgcggttctgctttgatcggagcacccagcgctgcttgaaggcgtttgcatggtccatggctcatggaccacgctcctagaaaacggaaatgcacttagattgtcaagtggtcagactgttgtttgccattagcttgcagacctggggatccttatcggctaattgctgaagcaagtgtggacaacttcagcaagctgggggtggcgttcatggaagatagactccacatggataatggactggtaccccaaaagattgtgtcggtgcacttgcaggactccactctgaaggaagttaaggatcaggtctcaaacaagcaagcccagatcctagagccgaagcctgaaccttctcttgagattaagcctgagcaggacggtatggagcatgttggcagagatgacccaaaggctcttggtgaagaacccaaacaaaggagaggcagtgcctctgggagtgagcctgctggggacagtgacaggggagggggccccgttgagcattatcacctccatctgtctagttgccacgagtgtctggaacttgagaacagcaccattgagtcagtcaagtttgcgtctgccgagaacattccagaccttccctacgattatagcagcagtttggagagtgttgctgatgagacctcccccgaaagagaagggaggagagtcaacctcacgggaaaggcacccaacatcctcctctatgtgggctccgactcccaggaagccctcggccggttccacgaggtccggtctgtgctggccgactgtgtggacattgacagttatattctctaccacctgctggaggacagtgctctcagagacccgtggacggacaactgtctgctgttggtcattgctaccagggagtccattcccgaagacctgtaccagaagttcatggcctatctttctcagggagggaaggtgttgggcctgtcttcatccttcacctttggtggctttcaggtgacaagcaagggtgcactgcacaagacagtccagaacttggttttctccaaggctgaccagagcgaggtgaagctcagcgtcttgagcagtggctgcaggtaccaggaaggccccgtccggctcagccccggcaggctccagggccacctggagaatgaggacaaggacaggatgattgtgcatgtgccttttggaactcgcgggggagaagctgttctttgccaggtgcacttagaactacctcccagctccaacatagtgcaaactccagaagattttaacttgctcaagtcaagcaattttagaagatacgaagtccttagagagattctgacaacccttggcctcagctgtgacatgaaacaagttcctgccttaactcctctttacttgctgtcagctgcggaggaaatcagggatcctcttatgcagtggcttgggaaacatgtggactccgagggagaaataaaatccggccagctctctcttagatttgtttcatcctacgtgtctgaagtagaaataaccccatcttgtatacctgtggtgaccaacatggaggccttctcatcagaacatttcaacttagagatctatcgccaaaatctgcagaccaagcagttggggaaagtaattttgtttgccgaagtgacccccacaacgatgcgtctcctggatgggctgatgtttcagacaccgcaggaaatgggcttaatagtgatcgcggcccggcagaccgagggcaaaggacggggagggaatgtgtggctgagccctgtgggatgtgctctttctactctgctcatctccattccactgagatcccagctgggacagaggatcccgtttgtccagcatctgatgtccgtggctgtcgtggaagcagtgaggtccattcccgagtatcaggatatcaacttacgagtgaagtggcccaacgatatttattacagtgacctcatgaagatcggcggagttctggttaactcaacactcatgggagaaacattttatatacttattggctgtggatttaatgtgactaacagtaaccctaccatctgcatcaacgacctcatcacagaatacaataaacaacacaaggcagaactgaagcccttaagagccgattatctcatcgccagagtcgtgactgtgctggagaaactgatcaaagagtttcaggacaaagggcccaacagcgtccttcccctttattaccgatactgggtccacagtggtcagcaagtccatctgggcagcgcagagggaccaaaggtgtccatcgttggcctggacgattctggcttcctccaggttcaccaggagggcggcgaggttgtgactgtgcacccggacggcaactccttcgacatgctgagaaacctcatcctccccaaacggcggtaatgccgggcgtccccgagacgcggctgcctgtccgtgcccatgcatctggaaatctaatttagagttgtaggtgaattttcttttcctccaattcatttgttaagtctttgttctttttctgtgtttctgtttgtttttaggtttgttttgttgtcgttttctttggtgtttgaagaggctctgggatagatggttaagaagtagaaaatttagtttagggaaagccctcccacaggtgggaaattgctctcccctctgtggcttggacttacgtttattgtcaaggggagtttttacatggaaatgacaatgggaaaattcagatattttcttagtagtgcagacctttacccctagtctatgaaaaaacaaaccaaaatatgctcttgcgcccaggccagtggtgagttagaggtatgctatcactgtttgtaagcatctggggaggtactgaactgtaagaacatgcttggacacttagtcattgttctgtgtttttattaatgaagaaaagggaagacagacttccaagagttactgtccacccggtggtgtggccccatagcgaagtctaaatgcctgtagagatagagctagctggtgtggttgcagtgaccttgtagaggaaatcagttcattactttgacatcattcagtgagctctcctttcctaaggaagtttaaatgtccttagttagggactgactttcttaagtaagtttaaatttactacatattgtgaagagacaggatcaagttcagaatccttaaatgtctgattaggcatcacttggatgaggaggtgggcgatttggctctgacagctggagatgaaggcacactcataccacatacaagggaggatttggagcttttaagccagtttcagatttactctgaaatgtggagcattcctgcaagactgtgcagctcacggaatatagaagacatggcattttactcagaagtcataagtttttgcccccctcatttacctcgtattaccaagaaagaaaatgttatcgatactaaacaccatcagttcagagggaggatgtgtgtgtgtgcccgcatatgtgtgtgcgtgcgtgtgtgcgcacatagctttaaaagaagacattcaaaatttgatgtgctacaagcctcatgaaagaacaaaagaaatgaagccttttgatatgcattcgctattcccagatgtacgccatgccttttccatgtccctcctatctctgttgaacttatgaatcatactcattacttttcagctttttaaaaggccaatttttgtccagttttctctcttccagtcccagctgaaattagtggaaagaaagtttgatggagctttcagctttgaacaaaatcccttcattgtaaactagcaccatctttatccaggtcttacccagtcaggctaattccagaaacttgtggtttttagtatagtctgtctacctttagccaggcacaggacagccctatgaaaaaatacccaatatatattttttggaaatgaaacattaaaagaacttaaaaagtaatttttggaaatgaggcttcaattagaattatttttctcaaaaaacaaacaaacaaaaaacacaaaaaaaaccactcttctccaaatgcccaagccttctttcaaaattagttagaaacttaagtaaaatacaagtccacaccatccccaaattacaaaatggacttacccttgagagggcatctgcagaatatcatcagggacaaagatctcgaggctaacgatgtaggtttcatttctcagactttgtaatataaggcaagccctctctcagagctgccatcatcactttttgaatttctttgggggttatttaatgaaaaacatgctatgttttgttttaagctgaagtcctattctggacactctgctttgggaaaaaatgttatcatttaatttcctttctgcaaattaaaactaatgaagtgtggccttgtcaaaggctatggagatgttccgggcatactgctgtgctctgtgctttccagcaggcgctcctccctcacgcaggagactcagttgtcctgagagagatgaagcagccttgaagcagatgctgcgttttccataaacctgattttgcctcacatgaaccaaagactctcaaaactccgcttctatagaattagctgaataaaggcattttactgatagctgttcgtgttagcgaaacctgtctacctgctatagcacactctccgatttgggccatttatgcaccccgcaacctgggatctcaaggagctttaaagtcttaatgggaacttggcattttcctgatgatctttaaaatgtggtcactaaactcaggattggcgtgtgcttttagaacactggagtagcccttgttttagaggctgtgcattgagtatcgaccgtattttgtaaaaggcaagatatcctcccttccaggctggtaacgggtttcaaggggactcttgaggaagtgccccctaaaatagaacacagcaataactgggcttcctgtccccacccccaccccagcagtgctctctggcactgggaactctgctagggagtggtggaagtaggaaggatttgtgtgcaaaggaaaatcgtggttgagtttcactgcagcaggctgacgttgcctgatgtgagagcaagtggccgactggggtgcgggtgcacaggtcgggggagcacaggccacagagcgcagcctctgggggtcccccaaggcacagcatatacagcatggtcgccccttgccctggagtctgggaacaaagagaggagccagcctccccgcactgcttcagatggaaaagggaggcagggtgggcttccgttctccagatctgtttgctcttaacaggcagaacatgggagaatccttattcctggttaatcactatgcatatttgaaataaaagaaagcgtaagcctctgcaattttaacttctcaaaggatgtctctgaaaagaatcactttaaaccaatgcctataaaaagcaagtctaccaaaataaactaagactttctatgtg

SEQ ID NO: 13818 - DNA, 702 bp, Homo sapiens
  source 1..702: mol_type = unassigned DNA
catgctcatcacgctgtgctacctgtacctgtgggcgcgctggggtcgccggccggctgagctcgtgcgcgccacggtgcggcggctgcgtgcctcgcgctgttccttcaccttctgcggcgcggccgcgcagcccccgggcgcccgcgtgtgcctgagccgtggcggccgcgtcttctgcgtcagcgacagccagtccattgaagacttgaacaagtgggccctatttcttgtgtctccttttatacttgaagcagaacacatagcatttgtgacggagagcatttgggtacaaagtgagaatttacagagatcatcctcttcagaaacaattgtcaagtggtcagactgttgtttgccattagcttgcagacctggggatccttatcggctaattgctgaagcaagtgtggacaacttcagcaagctgggggtggcgttcatggaagatagactccacatggataatggactggtaccccaaaagattgtgtcggtgcacttgcaggactccactctgaaggaagttaaggatcaggtctcaaacaagcaagcccagatcctagagccgaagcctgaaccttctcttgagattaagcctgagcaggacggtatggagcatgttggcagagatgacccaaaggctcttggtgaagaacccaaacaaaggagaggcagtgcctctgggagtgagcctgctgg

SEQ ID NO: 13819 - DNA, 666 bp, Homo sapiens
  source 1..666: mol_type = unassigned DNA
agcgcggcgcggcagggattcgcgggcgaccacccggcgcaggagcggccgcgtttcggcctcagaatccattgaagacttgaacaagtgggccctatttcttgtgtctccttttatacttgaagcagaacacatagcatttgtgacggagagcatttgggtacaaagtgagaatttacagagatcatcctcttcagaaacaacggagtgtcgttctgtcgtccaggctggagtgcagtggtgtggtctcggctcaccacaacctctgcctactgggttccagtgattctcctgcctcagcatcccgagtagctgggactacagattgtcaagtggtcagactgttgtttgccattagcttgcagacctggggatccttatcggctaattgctgaagcaagtgtggacaacttcagcaagctgggggtggcgttcatggaagatagactccacatggataatggactggtaccccaaaagattgtgtcggtgcacttgcaggactccactctgaaggaagttaaggatcaggtctcaaacaagcaagcccagatcctagagccgaagcctgaaccttctcttgagattaagcctgagcaggacggtatggagcatgttggcagagatgacccaaaggctcttggtgaagaacccaaacaaaggaga

SEQ ID NO: 13820 - DNA, 780 bp, Homo sapiens
  source 1..780: mol_type = unassigned DNA
ggccgcccggggctctggggactcgggtgtccaggtgccgaagtcgccgcttccacgggggactcaggcccgtgagtgggtttcctaagaacttaccagattccacggctcgggtttcctgccttggatcctgctttttattccccagggggagttatttatagacaggaatcgtgtgttcaaggcctggctcttcggactcggcgtttttcttgttcgaggtgcttcaatgggggctggatgccatcatcttccagtccattgaagacttgaacaagtgggccctatttcttgtgtctccttttatacttgaagcagaacacatagcatttgtgacggagagcatttgggtacaaagtgagaatttacagagatcatcctcttcagaaacaattgtcaagtggtcagactgttgtttgccattagcttgcagacctggggatccttatcggctaattgctgaagcaagtgtggacaacttcagcaagctgggggtggcgttcatggaagatagactccacatggataatggactggtaccccaaaagattgtgtcggtgcacttgcaggactccactctgaaggaagttaaggatcaggtctcaaacaagcaagcccagatcctagagccgaagcctgaaccttctcttgagattaagcctgagcaggacggtatggagcatgttggcagagatgacccaaaggctcttggtgaagaacccaaacaaaggagaggcagtgcctctgggagtgagcctgctggggacagtgacaggggag

SEQ ID NO: 13821 - DNA, 2277 bp, Homo sapiens
  source 1..2277: mol_type = unassigned DNA
gtgcgtgagaacgccggcggtgaccgcagccacagcggtgaccgagtgagaggaaggcggcggcggcggcggcggcggcgtgaagtcactgctgctctgggttcgggttggcgactgaaggcggtaccggcctcccggaacagcccgggggagggcttaggtggaaatttaaaattgtttacagtcaacactgtttccagccatgggtttgtctccatctgctcctgctgttgcagttcaggcctcaaatgcttcagcgtccccaccttcaggatgcccgatgcatgaagggaaaatgaaaggctgtccagtgaatacagagccatctggcccaacctgtgagaagaaaacatactctgtgcctgcccaccaggaacgcgcctatgagtacgtggagtgtcccattaggggcactgcggctgagaataaggagaacctagatccttcaaatctgatgccaccaccaaatcaaacaccagctccagatcagccatttgcattgtctactgtcagagaagagtcatccattccgagagcagattcagagaaaaagtgggtttacccttctgagcagatgttctggaatgcaatgttaaagaaagggtggaagtggaaggatgaggatatcagtcagaaggatatgtataatatcattagaattcacaatcagaataacgagcaggcttggaaggagattttgaagtgggaagcccttcatgctgcagagtgtccttgtggtccatcattgatccggtttggagggaaagcaaaagagtattcaccaagggcacgaattcgttcctggatggggtatgagttgccttttgataggcacgattggatcataaaccgttgcgggacagaagttagatatgtgattgattattatgatggtggtgaagtcaacaaggactaccagttcaccatcctggacgtccgtcctgccttagattcactttcggcagtatgggacagaatgaaagtcgcttggtggcgttggacctcgtaaagcactgtttcagatggaaaaatataaactatttttttctgagcgatacattaaactattttccccagattgaattgcactcatgatgtaatgggaacttcaagtgggtaatcacactttttccttcacttaacgaaggatactatgcactgttcacttttgacttgtgttgtaccttgcagtttatagcagatcattttgttttcttcctacttagcttaagtgggaagcagtctctcagtttttcctttacctgcagtattgtctgtatatttcatctcgaaaagcctgaacaacctctgaaaaagagcttttaaaaagtgatgaaagttgcttttttttcttactattttctcaggaatactccagagatgtaaagcctgagagtccatggtgatgctcaagagctttcatctggccaaatattttaactaaagctgttcattataaataagaggtgattataccttttttaaaaaaagttaccattatttctaaagcccctatggtatgattgtgacctttaacaaaatgcaaaggtatacactggaaaggtactcagcaaaattctctccaaattctgatttatatgaatttcttggactggatagagtactttcaactataccttcctttggaacataccttttaaaaaatgttccctttaaatcctgttattctaatatgtaactctgctcccaacaaacaggtctcctcattgtccttggcatttgacaagttatcccaacttcgaatctcatttcttcctttgctggcagcctccacccttccccacatcagtcggcctaatccaaaccttgaaagcctggcttaagtcccagtatcagtgatggtccccctctaaaacatgattttatatttggctgagtgttaaaattcacaagatgagcatttttttcccagatggagaacgcttcaactcagtctagattttttttgtttgttttaaggaagctctaagtttgccattgaaactttttgtaccagtaatccataaactggttgttctatttatagcagcatgttacaaatgactgctttttttttttaactgtctatactattaaatcctttaatttatcctgaatgctgtagtgttaaattagtggatgaaattggcagtctgtgggtgattaatttggtatggatttgtcagttttgtgtggagtttaagaaatagaacagccttaaactctacatttcaaaatacttgtatattttaaaataaagctgattagttcacaggt

SEQ ID NO: 13822 - DNA, 1072 bp, Homo sapiens
  source 1..1072: mol_type = unassigned DNA
ggcggcggcggcggcgtgaagtcactgctgctctgggttcgggttggcgactgaaggcggtaccggcctcccggaacagcccgggggagggcttaggtgcagaagggcaggctggccgcggccggtttggtctggggaccacgggctggagcaggtggaaatttaaaattgtttacagtcaacactgtttccagccatgggtttgtctccatctgctcctgctgttgcagttcaggcctcaaatgcttcagcgtccccaccttcaggatgcccgatgcatgaagggaaaatgaaaggctgtccagtgaatacagagccatctggcccaacctgtgagaagaaaacatactctgtgcctgcccaccaggaacgcgcctatgagtacgtggagtgtcccattaggggcactgcggctgagaataaggagaacctagatccttcaaatctgatgccaccaccaaatcaaacaccagctccagatcagccatttgcattgtctactgtcagagaagagtcatccattccgagagcagattcagagaaaaagtgggtttacccttctgagcagatgttctggaatgcaatgttaaagaaagggtggaagtggaaggatgaggatatcagtcagaaggatatgtataatatcattagaattcacaatcagaataacgagcaggcttggaaggagattttgaagtgggaagcccttcatgctgcagagtgtccttgtggtccatcattgatccggtttggagggaaagcaaaagagtattcaccaagggcacgaattcgttcctggatggggtatgagttgccttttgataggcacgattggatcataaaccgttgcgggacagaagttagatatgtgattgattattatgatggtggtgaagtcaacaaggactaccagttcaccatcctggacgtccgtcctgccttagattcactttcggcagtatgggacagaatgaaagtcgcttggtggcgttggacctcgtaaagcactgtttcagatggaaaaatataaactatttttttctgagcgatacattaaactattttccccaga

SEQ ID NO: 13823 - DNA, 1000 bp, Homo sapiens
  source 1..1000: mol_type = unassigned DNA
ccgagtgagaggaaggcggcggcggcggcggcggcggcgtgaagtcactgctgctctgggttcgggttggcgactgaaggcggtggaaatttaaaattgtttacagtcaacactgtttccagccatgggtttgtctccatctgctcctgctgttgcagttcaggcctcaaatgcttcagcgtccccaccttcaggatgcccgatgcatgaagggaaaatgaaaggctgtccagtgaatacagagccatctggcccaacctgtgagaagaaaacatactctgtgcctgcccaccaggaacgcgcctatgagtacgtggagtgtcccattaggggcactgcggctgagaataaggagaacctagatccttcaaatctgatgccaccaccaaatcaaacaccagctccagatcagccatttgcattgtctactgtcagagaagagtcatccattccgagagcagattcagagaaaaagtgggtttacccttctgagcagatgttctggaatgcaatgttaaagaaagggtggaagtggaaggatgaggatatcagtcagaaggatatgtataatatcattagaattcacaatcagaataacgagcaggcttggaaggagattttgaagtgggaagcccttcatgctgcagagtgtccttgtggtccatcattgatccggtttggagggaaagcaaaagagtattcaccaagggcacgaattcgttcctggatggggtatgagttgccttttgataggcacgattggatcataaaccgttgcgggacagaagttagatatgtgattgattattatgatggtggtgaagtcaacaaggactaccagttcaccatcctggacgtccgtcctgccttagattcactttcggcagtatgggacagaatgaaagtcgcttggtggcgttggacctcgtaaagcactgtttcagatggaaaaatataaactatttttttctgagcgatacattaaactattttccccaga

SEQ ID NO: 13824 - DNA, 2517 bp, Homo sapiens
  source 1..2517: mol_type = unassigned DNA
aggaagtgagaaagttggcacagtcacgccgggcttcgcaggaccaggtcactcagtgacagatggacaatgcaagaatgaactccttcctggaataccccatacttagcagtggcgactcggggacctgctcagcccgagcctacccctcggaccataggattacaactttccagtcgtgcgcggtcagcgccaacagttgcggcggcgacgaccgcttcctagtgggcaggggggtgcagatcggttcgccccaccaccaccaccaccaccaccatcgccacccccagccggctacctaccagacttccgggaacctgggggtgtcctactcccactcaagttgtggtccaagctatggctcacagaacttcagtgcgccttacagcccctacgcgttaaatcaggaagcagacgtaagtggtgggtacccccagtgcgctcccgctgtttactctggaaatctctcatctcccatggtccagcatcaccaccaccaccagggttatgctgggggcgcggtgggctcgcctcaatacattcaccactcatatggacaggagcaccagagcctggccctggctacgtataataactccttgtcccctctccacgccagccaccaagaagcctgtcgctcccccgcatcggagacatcttctccagcgcagacttttgactggatgaaagtcaaaagaaaccctcccaaaacagggaaagttggagagtacggctacctgggtcaacccaacgcggtgcgcaccaacttcactaccaagcagctcacggaactggagaaggagttccacttcaacaagtacctgacgcgcgcccgcagggtggagatcgctgcatccctgcagctcaacgagacccaagtgaagatctggttccagaaccgccgaatgaagcaaaagaaacgtgagaaggagggtctcttgcccatctctccggccaccccgccaggaaacgacgagaaggccgaggaatcctcagagaagtccagctcttcgccctgcgttccttccccggggtcttctacctcagacactctgactacctcccactgaggcggctccagccccagacaacagcccaggcatctccttgggctgggacttcttacccaaagcacatgcttagcttatctttctttccatttacagtctctttcttcctttctaatcctatctggggagctcctggccaggataatatatttgcagataattctggaccagagacttggtgcggggttaacaccttcatccagattgggtgccagcatacattttctggtgggccttaacatccctcctgcttttaggagaattcacagaacctactgttcctttcagatgaccttttggaaaatagttccctttgccaacagaaacatgccagaaggaatcttctcatcttttatctaactatatgtacagctctcccctcccttgtccttgaaagtaggatatagcgaaaggcgagtccaggagctcaggaagaagagatgcactatatgtttacacaattaattcatcccttaatttaagtcattttcatgtgtgtgagtttgctggttgtaaatactttgtcctaagagatttatctttatacagattttctagaaatgtttaggttactaaaacagggtgggcaaactctctaaactggtacaattttataggtgaaagaaaaaattccctcatttaaacccaatcagatgcctcagagggtagccttgatttgttcttacagttaagaagccctgcagagcacaaacttcagaaacccggcttcctgtgctaagtctttcccaatctctacccctttcttctcgggccaccctctgtttaaaatttgtgctgggttattcagaacctaaaagtattattcaaaccaatttcttccttccacagttatcttagctggatataatgtattttcagctcaattgttaatgtgatggatggcacaatgaatgtatattttgtgttattcgtgaatagtcttttgcatgtcgcacaatgtttgatgtccccaaagtaccacactgagttctatcagttatcctttgtgagcctatgatattccccatttcctgtacaatcatgaacagctctgagatcctggagtgatatgatccagagcagagtttacgggtcttaggatgtctgtaataaataaatatactcaagtttcaggtatgcttaagcatccgtgtatttggctgggctacaatttgttaattcctatgaagttggcacatttcatgaggggaaagggagaagggtggtaaatattttcaaagagatgggccttttcttgaataaaagttaataacagctcctttattataatcaaagctcataatggaaaaaaagactgatgaagaaatttatgaagcagatttatttttgaaacaaacatggatacttcctgggtcaagtgctaaccttttcacctccaactggatgttgacgtatatataaacagaactcccttcaaaagccaaaa

SEQ ID NO: 13825 - DNA, 2016 bp, Homo sapiens
  source 1..2016: mol_type = unassigned DNA
tttttcttctccggccccatggaggaagtgagaaagttggcacagtcacgccgggcttcgcaggaccaggtcactcagtgacagatggacaatgcaagaatgaactccttcctggaataccccatacttagcagtggcgactcggggacctgctcagcccgagcctacccctcggaccataggattacaactttccagtcgtgcgcggtcagcgccaacagttgcggcggcgacgaccgcttcctagtgggcaggggggtgcagatcggttcgccccaccaccaccaccaccaccaccatcgccacccccagccggctacctaccagacttccgggaacctgggggtgtcctactcccactcaagttgtggtccaagctatggctcacagaacttcagtgcgccttacagcccctacgcgttaaatcaggaagcagacccaccaagaagcctgtcgctcccccgcatcggagacatcttctccagcgcagacttttgactggatgaaagtcaaaagaaaccctcccaaaacagggaaagttggagagtacggctacctgggtcaacccaacgcggtgcgcaccaacttcactaccaagcagctcacggaactggagaaggagttccacttcaacaagtacctgacgcgcgcccgcagggtggagatcgctgcatccctgcagctcaacgagacccaagtgaagatctggttccagaaccgccgaatgaagcaaaagaaacgtgagaaggagggtctcttgcccatctctccggccaccccgccaggaaacgacgagaaggccgaggaatcctcagagaagtccagctcttcgccctgcgttccttccccggggtcttctacctcagacactctgactacctcccactgaggcggctccagccccagacaacagcccaggcatctccttgggctgggacttcttacccaaagcacatgcttagcttatctttctttccatttacagtctctttcttcctttctaatcctatctggggagctcctggccaggataatatatttgcagataattctggaccagagacttggtgcggggttaacaccttcatccagattgggtgccagcatacattttctggtgggccttaacatccctcctgcttttaggagaattcacagaacctactgttcctttcagatgaccttttggaaaatagttccctttgccaacagaaacatgccagaaggaatcttctcatcttttatctaactatatgtacagctctcccctcccttgtccttgaaagtaggatatagcgaaaggcgagtccaggagctcaggaagaagagatgcactatatgtttacacaattaattcatcccttaatttaagtcattttcatgtgtgtgagtttgctggttgtaaatactttgtcctaagagatttatctttatacagattttctagaaatgtttaggttactaaaacagggtgggcaaactctctaaactggtacaattttataggtgaaagaaaaaattccctcatttaaacccaatcagatgcctcagagggtagccttgatttgttcttacagttaagaagccctgcagagcacaaacttcagaaacccggcttcctgtgctaagtctttcccaatctctacccctttcttctcgggccaccctctgtttaaaatttgtgctgggttattcagaacctaaaagtattattcaaaccaatttcttccttccacagttatcttagctggatataatgtattttcagctcaattgttaatgtgatggatggcacaatgaatgtatattttgtgttattcgtgaatagtcttttgcatgtcgcacaatgtttgatgtccccaaagtaccacactgagttctatcagttatcctttgtgagcctatgatattccccatttcctgtacaatcatgaacagctctgagatcctggagtgatatgatccagagcagagtttacgggtcttaggatgtctgtaataaataaatatactcaa

SEQ ID NO: 13826 - DNA, 2541 bp, Homo sapiens
  source 1..2541: mol_type = unassigned DNA
atgtcagccagaaagggctatctgctcccttcgccaaattatcccacaacaatgtcatgctcggagagccccgccgcgaactcttttttggtcgactcgctcatcagctcgggcagaggcgaggcaggcggcggtggtggtggcgcggggggcggcggcggtggcggttactacgcccacggcggggtctacctgccgcccgccgccgacctgccctacgggctgcagagctgcgggctcttccccacgctgggcggcaagcgcaatgaggcagcgtcgccgggcagcggtggcggtggcgggggtctaggtcccggggcgcacggctacgggccctcgcccatagacctgtggctagacgcgccccggtcttgccggatggagccgcctgacgggccgccgccgccgccccagcagcagccgccgcccccgccgcaaccaccccagccagcgccgcaggccacctcgtgctctttcgcgcagaacatcaaagaagagagctcctactgcctctacgactcggcggacaaatgccccaaagtctcggccaccgccgccgaactggctcccttcccgcggggcccgccgcccgacggctgcgccctgggcacctccagcggggtgccagtgcctggctacttccgcctttctcaggcctacggcaccgccaagggctatggcagcggcggcggcggcgcgcagcaactcggggctggcccgttccccgcgcagcccccggggcgcggtttcgatctcccgcccgcgctagcctccggctcggccgatgcggcccggaaggagcgagccctcgattcgccgccgccccccacgctggcttgcggcagcggcgggggctcgcagggcgacgaggaggcgcacgcgtcgtcctcggccgcggaggagctctccccggccccttccgagagcagcaaagcctcgccggagaaggattccctgggcaattccaaaggtgaaaacgcagccaactggctcacggcaaagagtggtcggaagaagcgctgcccctacacgaagcaccagacactggagctggagaaggagtttctgttcaatatgtaccttactcgagagcggcgcctagagattagccgcagcgtccacctcacggacagacaagtgaaaatctggtttcagaaccgcaggatgaaactgaagaaaatgaatcgagaaaaccggatccgggagctcacagccaactttaatttttcctgatgaatctccaggcgacgcggttttttcacttcccgagcgctggtcccctccctctgtcttcaggctctgcccaggaactcgcacctgtgctggagccctgttcctccctcccacactcgccatctcctgggccgttacatctgtgcagggctggtttgttctgactttttgtttctttgtgtttgcttggtgctggtttatttgttgttttctgggggaaaaagccatatcatgctaaaattctatagagatagatattgtcctaagtgtcaagtcctgactgggctgggtttgctgtcttggggtcccactgctcgaaatggcccctgtcttcggccgagctggtttcctgcccagcctggggcaaacctagccggaaggccgaggtcccattgttggcgctgaggtgtctggcctgaggtcaatggtgcaaaggagccgccaccgggcatgtctgcctggagtgctgtgctgtgtttaatcaggggatacaggcccctgggtttcttttttctttcttcctttcttccttggccaagagaagggcttacaggcatggacatgcaggttggcaaacgggcttgactttggctgatttaaaaagtgagaaagaaagtaaaaaaggttaatttttccttcctctgtaagatatcccagctttaaaaagaaaaaaaaagaattaccaagagaaggggacttctcttccagtttctgtaaggtcttacattgcctgactaaaatgtttcatttacctctaaatttccatatccttctggctgtagataaataatgtagttttgtttatgcatttggaattagtggatttttttgtcattaaaattgttaccactggtaacatgtgacaagcacaccacaattctccctatcttgtgaagttgtttttttaaatcgccttgaacaaaaagttttttttttgtttgtttttgctttctgaaattcacagaagcctaggaggactggggtaagcggaataaactagagaagggagacattgtttggatttcctttatactgtgaagttacatgcataaaagggtcaaacctgtagatgcagaaaaagaaaaaaactataaatacaaatctgtataaatgtctattattatgaagaattgccaatcttgttttaagcaaatgcattctatcgttattataaatgttagttctagctctatttacttctaatcttaaatcagaataaattaatattgtattgctgctgtgcgtggaaaaagacgatgtttatgttcttatagaataaaagctgtggaatgaagctttttaatttta

SEQ ID NO: 13827 - DNA, 1569 bp, Homo sapiens
  source 1..1569: mol_type = unassigned DNA
aaagggctatctgctcccttcgccaaattatcccacaacaatgtcatgctcggagagccccgccgcgaactcttttttggtcgactcgctcatcagctcgggcagaggcgaggcaggcggcggtggtggtggcgcggggggcggcggcggtggcggttactacgcccacggcggggtctacctgccgcccgccgccgacctgccctacgggctgcagagctgcgggctcttccccacgctgggcggcaagcgcaatgaggcagcgtcgccgggcagcggtggcggtggcgggggtctaggtcccggggcgcacggctacgggccctcgcccatagacctgtggctagacgcgccccggtcttgccggcggcgcgcagcaactcggggctggcccgttccccgcgcagcccccggggcgcggtttcgatctcccgcccgcgctagcctccggctcggccgatgcggcccggaaggagcgagccctcgattcgccgccgccccccacgctggcttgcggcagcggcgggggctcgcagggcgacgaggaggcgcacgcgtcgtcctcggccgcggaggagctctccccggccccttccgagagcagcaaagcctcgccggagaaggattccctgggcaattccaaaggtgaaaacgcagccaactggctcacggcaaagagtggtcggaagaagcgctgcccctacacgaagcaccagacactggagctggagaaggagtttctgttcaatatgtaccttactcgagagcggcgcctagagattagccgcagcgtccacctcacggacagacaagtgaaaatctggtttcagaaccgcaggatgaaactgaagaaaatgaatcgagaaaaccggatccgggagctcacagccaactttaatttttcctgatgaatctccaggcgacgcggttttttcacttcccgagcgctggtcccctccctctgtcttcaggctctgcccaggaactcgcacctgtgctggagccctgttcctccctcccacactcgccatctcctgggccgttacatctgtgcagggctggtttgttctgactttttgtttctttgtgtttgcttggtgctggtttatttgttgttttctgggggaaaaagccatatcatgctaaaattctatagagatagatattgtcctaagtgtcaagtcctgactgggctgggtttgctgtcttggggtcccactgctcgaaatggcccctgtcttcggccgagctggtttcctgcccagcctggggcaaacctagccggaaggccgaggtcccattgttggcgctgaggtgtctggcctgaggtcaatggtgcaaaggagccgccaccgggcatgtctgcctggagtgctgtgctgtgtttaatcaggggatacaggcccctgggtttcttttttctttcttcctttcttccttggccaagagaagggcttacaggcatggacatgcaggttggcaaacgggcttgactttggctgatttaaaaagtgagaaagaaagtaaaaaaggttaatttttccttcctctgtaagatatcccagcttt

SEQ ID NO: 13828 - DNA, 1570 bp, Homo sapiens
  source 1..1570: mol_type = unassigned DNA
aaccaaagtctctcaagttgctagagagagtctagccaggaggactgctcgcgggcgggcggcgggcgggcgcgggtttgatttctgagccctataaaagcccatcctccgatggctgtgacaatgtggtcgtaaacccgtccggggccggccaatttgcatatttggaatgcgccgctataaacccggctggggttttgcagcgatttcttagatgtaaaaatgagatctcaatagcagcgggctgggcacatcctctcctctctccttctctctctgcccggagctggtttccgtctctcggctcggggctggaactccggcccaacctaggcgcgcagccgccacgagatggcgcacttccgatcaatgtcaaagccgccggggagccgggaaccccagcatgattcttggcctttgttcgcttctgatactaagagcagcacggtacattatttcacttgtcccgctccccttcataacagaaaaaggggactcaccctcaagaagtgattggtatggtaatttaaagcaacgcgcattcgctaggcctcgcgagcgtcgccgcgcggagaagccagctgtcccttggcagtgatttcggaaatgtgtcaaggcaattccaaaggtgaaaacgcagccaactggctcacggcaaagagtggtcggaagaagcgctgcccctacacgaagcaccagacactggagctggagaaggagtttctgttcaatatgtaccttactcgagagcggcgcctagagattagccgcagcgtccacctcacggacagacaagtgaaaatctggtttcagaaccgcaggatgaaactgaagaaaatgaatcgagaaaaccggatccgggagctcacagccaactttaatttttcctgatgaatctccaggcgacgcggttttttcacttcccgagcgctggtcccctccctctgtcttcaggctctgcccaggaactcgcacctgtgctggagccctgttcctccctcccacactcgccatctcctgggccgttacatctgtgcagggctggtttgttctgactttttgtttctttgtgtttgcttggtgctggtttatttgttgttttctgggggaaaaagccatatcatgctaaaattctatagagatagatattgtcctaagtgtcaagtcctgactgggctgggtttgctgtcttggggtcccactgctcgaaatggcccctgtcttcggccgagctggtttcctgcccagcctggggcaaacctagccggaaggccgaggtcccattgttggcgctgaggtgtctggcctgaggtcaatggtgcaaaggagccgccaccgggcatgtctgcctggagtgctgtgctgtgtttaatcaggggatacaggcccctgggtttcttttttctttcttcctttcttccttggccaagagaagggcttacaggcatggacatgcaggttggcaaacgggcttgactttggctgatttaaaaagtgagaaagaaagtaaaaaaggttaatttttccttcctctgtaagatatcccagctttaaaaagaaaaaaaaagaa

SEQ ID NO: 13829 - DNA, 2295 bp, Homo sapiens
  source 1..2295: mol_type = unassigned DNA
cttcaaagaggcagctgcagtggagaatcatgttaagctcggctactgcggagagcccaaggtagcccaataatggattttgatgagcgtggtccctgctcctctaacatgtatttgccaagttgtacttactacgtctcgggtccagatttctccagcctcccttcttttctgccccagaccccgtcttcgcgcccaatgacatactcctactcctccaacctgccccaggtccaacccgtgcgcgaagtgaccttcagagagtacgccattgagcccgccactaaatggcacccccgcggcaatctggcccactgctactccgcggaggagctcgtgcacagagactgcctgcaggcgcccagcgcggccggcgtgcctggcgacgtgctggccaagagctcggccaacgtctaccaccaccccacccccgcagtctcgtccaatttctatagcaccgtgggcaggaacggcgtcctgccacaggctttcgaccagtttttcgagacagcctacggcaccccggaaaacctcgcctcctccgactaccccggggacaagagcgccgagaaggggcccccggcggccacggcgacctccgcggcggcggcggcggctgcaacgggcgcgccggcaacttcaagttcggacagcggcggcggcggcggctgccgggagacggcggcggcagcagaggagaaagagcggcggcggcgccccgagagcagcagcagccccgagtcgtcttccggccacactgaggacaaggccggcggctccagtggccaacgcacccgcaaaaagcgctgcccctataccaagtaccagatccgagagctggaacgggagttcttcttcagcgtctacattaacaaagagaagcgcctgcaactgtcccgcatgctcaacctcactgatcgtcaagtcaaaatctggtttcagaacaggagaatgaaggaaaaaaaaattaacagagaccgtttacagtactactcagcaaatccactcctctaagactccagcggctggaattgggtggggggcttcatacacatgagataatatgcagattttgcccttgacaaagtcaagccacatggtgacttttgaaaagaggtgtgcaagagagggatgcatggagatagccccacaggaggtggtctgggactctcttgattaagatctcagtggttaagattcctaataatcattggattctgagagctgtgcatcagctagaatgacaggtttgggacccctggtggttcactcttggagcctgcagagctgcgggctgggtgtggtctccactggggattgggcccctgccagaccccctggagactaaccccaccacaccctccctctactgggagcctacccacccccaggacccctgagtaaaaaagctgtgtgctctccaagcccagttcagcttggggacaggggcaggaggaaggggtaggattactaggtgcccagaatgaggctgctttccaaagccaatgtgaacagcggctggacttggaggtagctttgaggtggaagagggctgcaaatccttgtgggaaaagaaatctatgattccaggtggcatcagtgtctttccactcctcctagccacccaccacactgatccagccctgagttcctagccaccgcctcctacagcccacctggcttttctttctaccaaatgagggtcttggttccagcctgccactcaggcccaaagcctcgacacagagtggactgttccctgaggtgggagatgtggaaaagccaagaggctgcagccaggccactggcccctgagatctctgcaggaaatggctgtggagtgtggcagtttggcaaactctccaccacacgtaatgaaacttggatttgctcagtgtctggctgcagagcagtgggcctggccagcaggtccccagctttggctatgagggccttgagtcccccaaaacaccgggttccagcaccacactcagccctcattggctcttgaactgagcttggaagcttctggtgaccttccaagagcctgagagtgaggtggaattattttaaaagataaatattatattatatatatatatatttccctgaaggaaccaaagcgaattttaaaagatgcaatgtagaggggaaaagagatgatgaaaatatttaaaggccctatctgtttacagtgttccgtggttaaactcgctcactgctaagaatatttgaatgtatgcttcatacagggatggtgttcaaaaaacttgtaaataaaggaaccataatcaa

SEQ ID NO: 13830 - DNA, 4376 bp, Homo sapiens
  source 1..4376: mol_type = unassigned DNA
actggggtcttctccatgcggctcgggctatgacagcctccgtgctcctccacccccgctggatcgagcccaccgtcatgtttctctacgacaacggcggcggcctggtggccgacgagctcaacaagaacatggaaggggcggcggcggctgcagcagcggctgcagcggcggcggctgccggggccgggggcgggggcttcccccacccggcggctgcggcggcagggggcaacttctcggtggcggcggcggccgcggctgcggcggcggccgcggccaaccagtgccgcaacctgatggcgcacccggcgcccttggcgccaggagccgcgtccgcctacagcagcgcccccggggaggcgcccccgtcggctgccgccgctgctgccgcggctgccgctgcagccgccgccgccgccgccgcgtcgtcctcgggaggtcccggcccggcgggcccggcgggcgcagaggccgccaagcaatgcagcccctgctcggcagcggcgcagagctcgtcggggcccgcggcgctgccctatggctacttcggcagcggctactacccgtgcgcccgcatgggcccgcaccccaacgccatcaagtcgtgcgcgcagcccgcctcggccgccgccgccgccgccttcgcggacaagtacatggataccgccggcccagctgccgaggagttcagctcccgcgctaaggagttcgccttctaccaccagggctacgcagccgggccttaccaccaccatcagcccatgcctggctacctggatatgccagtggtgccgggcctcgggggccccggcgagtcgcgccacgaacccttgggtcttcccatggaaagctaccagccctgggcgctgcccaacggctggaacggccaaatgtactgccccaaagagcaggcgcagcctccccacctctggaagtccactctgcccgacgtggtctcccatccctcggatgccagctcctataggagggggagaaagaagcgcgtgccttataccaaggtgcaattaaaagaacttgaacgggaatacgccacgaataaattcattactaaggacaaacggaggcggatatcagccacgacgaatctctctgagcggcaggtcacaatctggttccagaacaggagggttaaagagaaaaaagtcatcaacaaactgaaaaccactagttaatggattaaaaatagagcaagaaggcaacttgaagaaacgcttcagaactcgttgctttgcccagataatgataataatgcttaataataattgaagaatgggaaagagaaagagacagagactggcattttcctctcccgaaggagatctctttctctttaatggaatctacaactgttttaaaactttaagaaaggtaaagactgccagttcttccgccaaccccatcagcccagcccgttaaatgtcaaacgtcaacccccaaaatacgcaatttcagataagttacgcagttactgaaatcttgtaagtatttaagtgatcgttacattttaggacactgcgttagatggtaataatctggaagttggttacaaacgcaagaggccattgtaaacatctgcttgtccttcttaggtcgccattccctttgcatgttaagcgtctgctcaggtaaatcttagtgaaattcctaccgttgttgtacgttctgcaaaacattttatgtatagatttagaggggaaacgagaaggtactgaaataatgatcttggaatatttgctgtgaagggagaaagggagagaaaactcttctgaggatcatttgtcttggtagtatagtaaaaccaaccagctgaacctttcaggctacaagagaacccgggtcggtaatgtctttttaagaataatttttaattgcttataacaagcatattttgtggcatttgaactatatttactgctccaatatccgttattttccaaaggattttgtatctttttgaaaatgtttacatcatcagatgatccacagaattcactttatgtgagatctcccgagagtttccatcccaacatgatggactttggtttgaacacaattcgttttttcatttgaattggcatttcccaatatttgctaaacatttgctggagaaatcatttttcttttttcttttttagaaaactcagaatgaaaattcattcccctgaaatatttaggtgtctatattctatattttgatctattaagggattagtatttttccatgtttattgtgttatcagagtgcattagaaagattagtgattcatcttcacagcacatttttaatcaagcagttatttcaaccagcacattcgttttgttcatattcactatagaatgatatcttgtaaataaagacattcagcacactgtgaaaatgtatttgtgcacctgctttttaaatatttctactaaaaatgaaaaaaaaaaacccttagacctgtagatagtgatatcgtaatattaattgttaataaaatagtcactgccattaaaatctgcagaaaatactctttactttcctatgctaaatgtgcactgcacagaaagaaaaggagcaggtttatcttatataaaccaaggaccattctttattattattcagtacttcttttgctaccaaatttttaagaaaagggagaaatccctcataactaaaatcctaaaaaatgataagtgcttcaaggagattaaagtgtcaggtattacaaaagggagagaaaagaaaggaggaagagatagtatgaattcccaggctccctgtggaaaatgaaaaccagttgttttgtagcagcaatgcctaggctgtcgtattttaaaatctgctgttgggtctgcatgtgtctgagagggcaggttttgatatttgttgaaatgacaggactacgaaaggccttaaaccttgaccttgacgaaaaaaaagacaatttgtgaccttgacttttgacagctcatgaattggccttagctggattagtagatcaagggcgccacctcgcgttgacaagcctccttgtaattcttcaaccaagggaatcaagagctcttacctccttgactttagagattcagtactcaattatttggctccagctggagcaaatttgaatatatgtaaattatacatgtccctgtatatatgtaaatatatataatatgtgtacacatgtatacatttgcatattagtgcttgtgtgtgcttgtatatatatttgtagaatctgtacagatatcatatcattaattgctaatgacgcaagatattgtaatttaaggtgatttctagaattgaggtacaaaatgtactttacaagatgaagccttgttccttttctctaatggccaaatttgatttgtcttcacagtggcttgctctgcatcagatttctgcagatctgctttaaagctgtacatttttgttacagtctaagatgtgttcttaaatcaccattccttcctggtcctcaccctccagggtggtctcacactgtaattagagctattgaggagtctttacagcaaattaagattcagatgccttgctaagtctagagttctagagttatgtttcagaaagtctaagaaacccacctcttgagaggtcagtaaagaggacttaatatttcatatctacaaaatgaccacaggattggatacagaacgagagttatcctggataactcagagctgagtactgctccagggtggtgtgcaatcttatattgatgcttgtgaatctgccatttgatttgtaggataaataaatatgtttaatattaacaacttccatcaaaactataataataatattatatctactgttgacctctaacaacaatcaggtgctgtattcagagtcataaagaatacatatgtatgtttgtatatttaatatacacataggataatgtgtttttgtcaaatctatgctatgcgcatatgtattaaaatgttggtggaatcagtagccgtgggatgcagaattgtgagatgcaggctaattttatctttacgttagaggaaagtaatagtgaatggaagaaccagattcatcattttatggaaaataatattgattggttacaaaagtggctgccggaaacctctccaacctctcctgaggactcacaacttctttatagatgagaattacgaaagagtctctaaagctgtctcaaaaacaggctggtgttgaaacatacatatcgaaaggtctcgagaaattcaattatattttgctgccctgaggattttcactccacttgtggaaacaaatgataatgttgcttcagacccacctctccacctcttgttccaaacagtactccatttccaaatgagctgccatcaag

SEQ ID NO: 13831 - DNA, 2066 bp, Homo sapiens
  source 1..2066: mol_type = unassigned DNA
cccgacttttttggatcaatcaaacagacagtggcttcttttgattaaagcccaaattgtcattgggcagaagcaatcatgtgacagccaattcggtccaatttcaaccttgtctccatgaattcaatagtttaatagtagcgcggtccccatacggctgtaatcagtgaattagaaaaaaaacaccctagcagcgatattctatgatagattttttttcctctgcgctcgcctttttcctaggccttgcccccccaaagcccctccaaaagagggaactttttctctgagggggctccaaggagaaggccatgaattacgaatttgagcgagagattggttttatcaatagccagccgtcgctcgctgagtgcctgacatcttttccccctgtcgctgatacatttcaaagttcatcaatcaagacctcgacgctttcacactcgacactgattcctcctccttttgagcagaccattcccagcctgaaccccggcagtcaccctcgccacggcgctggcggccgccccaagccgagccccgcgggcagccgcggcagcccggtgcccgccggcgccctgcagccgcccgagtacccctggatgaaggagaagaaggcggccaagaaaaccgcacttctgccggccgccgccgccgccgccaccgccgcagccaccggccctgcttgcctcagccacaaagaatccctggaaatcgccgatggcagcggcgggggatcgcggcgcctgagaactgcttacaccaacacacagcttctagagctggaaaaagaatttcatttcaacaagtacctttgcagaccccgaagggtggagattgcagcgctgctggatttgactgagagacaagtgaaagtgtggtttcagaaccggaggatgaagcacaagaggcagacccagtgcaaggaaaaccaaaacagcgaagggaaatgtaaaagccttgaggactccgagaaagtagaggaggacgaggaagagaagacgctctttgagcaagcccttagcgtctctggggcccttctggagagggaaggctacacttttcagcaaaatgccctctctcagcagcaggctcccaatggacacaatggcgactcccaaagtttcccagtctcgcctttaaccagcaatgagaaaaatctgaaacattttcagcaccagtcacccactgttcccaactgcttgtcaacaatgggccagaactgtggagctggcctaaacaatgacagtcctgaggcccttgaggtcccctctttgcaggactttagcgttttctccacagattcctgcctgcagctttcagatgcagtttcacccagtttgccaggttccctcgacagtcccgtagatatttcagctgacagcttagacttttttacagacacactcaccacaatcgacttgcagcatctgaattactaaaaacattaaagcaaaacaaagcatcaccaaacaaaaactcctttgaccaggtggttttgccttcttttatttgggagtttattttttattttcttcttgacctaccccttccctcctttaagtgttgaggattttctgtttagtgattccctgacccagtttcaaacagagccatcttttacagattattttggagttttagttgttttaaacctaactcaacaaccctttatgtgattcctgagagcagtatgaggcctgcaagaaagtgatcatataattgtatcttcactttctttttatttttgtattacattgggatgcattgtcatgcatattttttgtagaataaattctcctttgctataagtagcttatttttctccccctcttttttcaaggctcataacgggttctttttcttcttttagtctaacttcgtaaataaaattcgtcacaatttatcctcttttttcaattttaatacatttattaaggcggcatgttcaaagtcttcaatggacagcaacaaaacagaaagccaaaaaatgactagggcttctaataagtgttttttctttcttttttgcttcttcttctcctctttctttttaaaggatttga

SEQ ID NO: 13832 - DNA, 1747 bp, Homo sapiens
  source 1..1747: mol_type = unassigned DNA
ggcctcggcaagcccagaaaaaacgacaacgcgagaaaaattagtatttttgcacttcacaaattaatgaccatgagctcgtttttgataaactccaactacatcgagcccaagttccctcccttcgaggagtacgcgcagcacagcggctcgggcggcgcagacggcggcccgggcgggggccccggctaccagcagcccccagcgcccccgacccagcacctgccgctgcagcagccccagctccctcacgcgggcggcggccgagagcccactgcctcctactacgcgccgcggaccgcccgcgagcccgcctaccctgctgccgcgctgtaccccgcgcatggggccgcggacaccgcctacccctatggctaccgcggcggcgccagccccgggcggccgccccagcccgagcagcccccggcgcaagccaagggcccagcgcacggcctgcatgcgagccacgtcctgcagccccagctgccgccgcccctgcagcctcgcgccgtgcccccagcggccccgcggcgctgcgaggcggcccccgccaccccaggcgtcccggcagggggcagcgcccccgcgtgcccgctgctcttggccgacaagagcccgctgggcctgaagggcaaggagcccgtggtgtacccctggatgaagaagatccatgtcagcgccgttaaccccagttataacggaggggagcctaagcgctctcgaaccgcctacacccggcagcaggtcttggagctggagaaggagttccacttcaatcgatacctgacccggcggcgccgcatcgagatcgcccacacgctctgtttgtctgagcgccaggtcaagatctggtttcagaaccggaggatgaagtggaagaaagaccacaaactgcccaacaccaagatgcgatcctccaattcggcctcggcctctgccggcccaccagggaaagcacaaactcagagcccacacctccatccccacccccacccgagcacctccacacccgttccctcctccatataatcttctagagatcttaaccagtttctatcccttacctgcttttctcttctcttctcctgctccgttcctcatccacccctccccatctggaccataatagacaccaaaacaaacccaaattggtgaaaagaataatcaaaaagaagacattatccggttaagagtctgtgctggttgccacccaagagagaacagttgtccaggatgctggctggtggaacaacctgctggcccgaaacaaggctgccaggtgtggatacctgagaaggactacttggtatcaaatacttttgagatggctacagtcagctagctggacagcccatgctgagtggggacatacacttgcatctttgttgaaagcagaagaagacagaccctttccccaccttccttacctcctcttcccccattaaggcagctcatccaagcttgtatttaactgaataaatgagtagacattgtggacctcacaagattatttaattcttaagatgtgtagaccttgatggtaggtgtgacatgttagtttttcttacttgcatttatttaagacactgttacagagatactgttgtccccttctggggcacggtctttggggagaggggagtgcatttagacttatgtggaactgtacaaattgtgatgtggctacatagaaagccatgtgctaagaataaactccatttaaaaaacattaaaaatctaagattca

SEQ ID NO: 13833 - DNA, 1595 bp, Homo sapiens
  source 1..1595: mol_type = unassigned DNA
atgaccatgagctcgtttttgataaactccaactacatcgagcccaagttccctcccttcgaggagtacgcgcagcacagcggctcgggcggcgcagacggcggcccgggcgggggccccggctaccagcagcccccagcgcccccgacccagcacctgccgctgcagcagccccagctccctcacgcgggcggcggccgagagcccactgcctcctactacgcgccgcggaccgcccgcgagcccgcctaccctgctgccgcgctgtaccccgcgcatggggccgcggacaccgcctacccctatggctaccgcggcggcgccagccccgggcggccgccccagcccgagcagcccccggcgcaagccaagggcccagcgcacggcctgcatgcgagccacgtcctgcagccccagctgccgccgcccctgcagcctcgcgccgtgcccccagcggccccgcggcgctgcgaggcggcccccgccaccccaggcgtcccggcagggggcagcgcccccgcgtgcccgctgctcttggccgacaagagcccgctgggcctgaagggcaaggagcccgtggtgtacccctggatgaagaagatccatgtcagcgccgttaaccccagttataacggaggggagcctaagcgctctcgaaccgcctacacccggcagcaggtcttggagctggagaaggagttccacttcaatcgatacctgacccggcggcgccgcatcgagatcgcccacacgctctgtttgtctgagcgccaggtcaagatctggtttcagaaccggaggatgaagtggaagaaagaccacaaactgcccaacaccaagatgcgatcctccaattcggcctcggcctctgccggcccaccagggaaagcacaaactcagagcccacacctccatccccacccccacccgagcacctccacacccgttccctcctccatataatcttctagagatcttaaccagtttctatcccttacctgcttttctcttctcttctcctgctccgttcctcatccacccctccccatctggaccataatagacaccaaaacaaacccaaattggtgaaaagaataatcaaaaagaagacattatccggttaagagtctgtgctggttgccacccaagagagaacagttgtccaggatgctggctggtggaacaacctgctggcccgaaacaaggctgccaggtgtgggacagcccatgctgagtggggacatacacttgcatctttgttgaaagcagaagaagacagaccctttccccaccttccttacctcctcttcccccattaaggcagctcatccaagcttgtatttaactgaataaatgagtagacattgtggacctcacaagattatttaattcttaagatgtgtagaccttgatggtaggtgtgacatgttagtttttcttacttgcatttatttaagacactgttacagagatactgttgtccccttctggggcacggtctttggggagaggggagtgcatttagacttatgtggaactgtacaaattgtgatgtggctacatagaaagccatgtgctaagaataaactccattt

SEQ ID NO: 13834 - DNA, 1657 bp, Homo sapiens
  source 1..1657: mol_type = unassigned DNA
gggtgctatagacgcacaaacgaccgcgagccacaaatcaagcacacatatcaaaaaacaaatgagctcttattttgtaaactcattttgcggtcgctatccaaatggcccggactaccagttgcataattatggagatcatagttccgtgagcgagcaattcagggactcggcgagcatgcactccggcaggtacggctacggctacaatggcatggatctcagcgtcggccgctcgggctccggccactttggctccggagagcgcgcccgcagctacgctgccagcgccagcgcggcgcccgccgagcccaggtacagccagccggccacgtccacgcactctcctcagcccgatccgctgccctgctccgccgtggccccctcgcccggcagcgacagccaccacggcgggaaaaactccctaagcaactccagcggcgcctcggccgacgccggcagcacccacatcagcagcagagagggggttggcacggcgtccggagccgaggaggacgcccctgccagcagcgagcaggcgagtgcgcagagcgagccgagcccggcgccgcccgcccaaccccagatctacccctggatgcgcaagctgcacataagtcatgacaacataggcggcccggaaggcaaaagggcccggacggcctacacgcgctaccagaccctggagctggagaaggagttccacttcaaccgttacctgacccgcagaaggaggattgaaatagcacatgctctttgcctctccgagagacaaattaaaatctggttccaaaaccggagaatgaagtggaaaaaagataataagctgaaaagcatgagcatggccgcggcaggaggggccttccgtccctgagtatctgagcgtttaaagtactgagcagtattagcggatcccgcgtagtgtcagtactaaggtgactttctgaaactcccttgtgttccttctgtgaagaagccctgttctcgttgccctaattcatcttttaatcatgagcctgtttattgccattatagcgcctgtataagtagatctgctttctgttcatctctttgtcctgaatggctttgtcttgaaaaaaaatagatgttttaacttatttatatgaagcaagctgtgttacttgaagtaactataacaaaaaaagaaaagagaaaaaaaaacacacaaaaagtcccccttcaatctcgtttagtgccaatgttgtgtgttgcactcaagttgtttaactgtgcatgtgcgtggaagtgttcctgtctcaatagctccaagctgttaaagatatttttattcaaactacctatattccttgtgtaattaatgctgttgtagaggtgacttgatgagacacaacttgttcgacgtgtagtgactagtgactctgtgatgaaaactgtgactccaagcggtgtgtccctgcgtgcctttataggaccctttgcacgaactctggaagtggctcttataagcgcagcttcagtgatgtatgtttttgtgaacaaagttacaaatattgtccaagtctggctgttttaagcaaactgtgatcagcttttttttttttttttttttttttgtatttgtttttaaggaaaaaatactgactggaacaaaaaataaactttctattgtaagttc

SEQ ID NO: 13835 - DNA, 989 bp, Homo sapiens
  source 1..989: mol_type = unassigned DNA
cacagtcctgcagaggggcgcgcaaatgagttcctattttgtgaatcccactttccccgggagccttcccagcggccaggactccttcttgggccagctgcccctctaccaggctggctatgacgcgctgaggcccttcccggcctcgtacggggcgtcgagtctcccggacaagacgtacacctcaccttgtttctaccaacagtccaactcggtcctggcctgcaaccgggcgtcctacgagtacggggcctcgtgtttctattctgataaggacctcagtggcgcctcgccctcgggcagtggcaagcagaggggccccggggactacctgcacttttctcccgagcagcagtacaaacccgacagcagcagcgggcagggcaaagcactccatgacgaaggcgccgaccggaagtacacgagcccggtttacccttggatgcagcggatgaactcctgcgcgggtgctgtgtatgggagccatgggcgccgaggccgccagacctacacgcgctaccagacactggagctggagaaggagttccacttcaaccgctacctgacacggcgccgccgcatcgagatcgccaacgcgctctgcctcaccgagcgccagatcaagatctggttccagaaccgccgcatgaagtggaaaaaggaaaacaagctcatcaattccacgcagcccagcggggaggactcagaggcaaaggcgggcgagtagatgcctgggcagggaccaggccagcgctgcaacctccttcggctttgcccccttgccctcgcctgttccccaacttttctccccgcctgctcccatctgggggcttccgcagcttcaggggagcccggagctttgcaagcgtctgtgcatttatttcttacaaaacaaaacaaaacaaaacaaaacaaaacaaaacaaaacaaaacaaaacctcacacacagccaataccagcggtggagcggggcgcactgcacacaccca

SEQ ID NO: 13836 - DNA, 2020 bp, Homo sapiens
  source 1..2020: mol_type = unassigned DNA
acgtgctgcggcgagctccgtccaaaagaaaatggggtttggtgtaaatctgggggtgtaatgttatcatatatcactctacctcgtaaaaccgacactgaaagctgccggacaacaaatcacaggtcaaaattatgagttcttcgtattatgtgaacgcgctttttagcaaatatacggcgggggcttctctgttccaaaatgccgagccgacttcttgctcctttgctcccaactcacagagaagcggctacggggcgggcgccggcgccttcgcctcgaccgttccgggcttatacaatgtcaacagccccctttatcagagcccctttgcgtccggctacggcctgggcgccgacgcctacggcaacctgccctgcgcctcctacgaccaaaacatccccgggctctgcagtgacctcgccaaaggcgcctgcgacaagacggacgagggcgcgctgcatggcgcggctgaggccaatttccgcatctacccctggatgcggtcttcaggacctgacaggaagcggggccgccagacctacacgcgctaccagacgctggagctggagaaggagttccacttcaaccgctacctgacgcggcgccgccgcattgaaatcgcccacgcgctctgcctcaccgagcgccagattaagatctggttccagaaccgccgcatgaagtggaagaaagagcataaggacgaaggtccgactgccgccgcagctcccgagggcgccgtgccctctgccgccgccactgctgccgcggacaaggccgacgaggaggacgatgatgaagaagaggaagacgaggaggaatgaggggccgatccggggccctctctgcaccggacagtcggaaaagcgtctttaagagactcactggttttacttacaaaaatgggaaaaataaaagaaaatgtaaaaaacaaaaacaaaaacaaaaaagcaacccagtccccaacctgcactctacccacccccatcacctactccagctcccaacttttgtggactgagcggccgcagagactgggtcgccttggattccctctgcctccgaggaccccaaaagacacccccaaccccaggccagccggccctgctctggcgcgtccaaaatactacctagcacaggcctctgctcgaggcacccccaaactacctatgtatccagccccagagggcctccattcccaggaagtccctatgtatcccaacactggcagacacccagcaccaccctcccagacccgcaagaaagtgaatctcactactacctactcccctaaaactacctattttgtgctggctggcttgcctgctacctagtgccgactgctcccaggcaagtcccctgctgcttacagcccgcagcttttggggtccctgaggctgccctgagaatgtgctgaggtccaggatcagggtattggcatctatttaaatcgaaaaataatatatttattccaaaaagcatcctaagtgcttgcaccctagaatcaatccctccttctctggcttggcacccacagctcaggcccatcaacccccacttctggaggggaatgttcctgagctggctgcagatctgtgggttagcttctgcttagcaggactgtggagatgcttccagcttcgctgtcctttcctctggctcctgtatcttactgttcagctgtgttaaatatgtacgccctgatgtttcctataatagcagatactgtatatttgaacaagatttttttttatcatttctatagtcttggagttcatttgtaaggcagtgtcttgacttggaaaggatgtgttaatggggtgactttgtagcatggtatgttgtcttgagttaactgtagtgggtggggaggtccaatgccctccgcaatgcccttcatctcctgtgttgtcctgtaccctgctcagctccatcctggggttcagggaaggcacacttcccagcccagctgtgttttatgtaaccgaaaataaagatgcgtggtgacaaagaaaaa

SEQ ID NO: 13837 - DNA, 585 bp, Homo sapiens
  source 1..585: mol_type = unassigned DNA
gggcagtttatgaggcgtttaggggaagggttctccccaccatcctccaccgagcggtgggcggcaggggcttcagctggtgcaacatggtgcaggggtcggaggcctggaagggcggataaacagtgtgcctccgattaaggaaaggaagctgggagacgttgactttattcgaaccacatggctccagtttgcggtggcaatctctctgcagctgcaagagatgctgcgccttccccgtctggatccgagtctaagtccggcctgtcgcccactggacctgggcggctgcgggccctgcggagcgagaccacctgtgaggactgctgagattggcggaggcggtcatgtgggcggtcacgtgctgcggcgagctccgtccaaaagaaaatggggtttggtgtaaatctgggggtgtaatgttatcatatatcactctacctcgtaaaaccgacactgaaagctgccggacaacaaatcacaggtcaaaattatgagttcttcgtattatgtgaacgcgctttttagcaaatatacggcgggggcttctctgttccaaaatgccgagccgacttcttgctcctt

SEQ ID NO: 13838 - DNA, 1956 bp, Homo sapiens
  source 1..1956: mol_type = unassigned DNA
caccactggggcggcaactactacgtggactcgttcctgctgggcgccgacgccgcggatgagctgagcgttggcatgcgccggggaccctggcctccccggcaggcggcgacgctggccgagcaccccgacttcagcccgtgcagcttccagtccaaggcgacggtgtttggcgcctcgtggaacccagtgcaccgggcgccaacgctgtacccggtgtaccaccaccatcaccaccacccctacgtgcacccccaggcgcccgtggcggcggcggcgccggacggcaggtacatgcgctcctggctggagcccacgcccggtgcgctctccttcgcgggcttgccctccagccggccttatggcattaaacctgaaccgctgtcggccagaaggggtgactgtcccacgcttgacactcacactttgtccctgactgactatgcttgtggttctcctccagttgatagagaaaaacaacccagcgaaggcgccttctctgaaaacaatgctgagaatgagagcggcggagacaagccccccatcgatcccaataacccagcagccaactggcttcatgcgcgctccactcggaaaaagcggtgcccctatacaaaacaccagaccctggaactggagaaagagtttctgttcaacatgtacctcaccagggaccgcaggtacgaggtggctcgactgctcaacctcaccgagaggcaggtcaagatctggttccagaaccgcaggatgaaaatgaagaaaatcaacaaagaccgagcaaaagacgagtgatgccatttgggcttatttagaaaaaagggtaagctagagagaaaaagaaagaactgtccgtcccccttccgccttctcccttctctcacccccaccctagcctccaccatccccgcacaaagcggctctaaacctcaggccacatcttttccaaggcaaaccctgttcaggctggctcgtaggcctgccgctttgatggaggaggtattgtaagctttccattttctataagaaaaaggaaaagttgaggggggggcattagtgctgatagctgtgtgtgttagcttgtatatatatttttaaaaatctacctgttcctgacttaaaacaaaaggaaagaaactacctttttataatgcacaactgttgatggtaggctgtatagtttttagtctgtgtagttaatttaatttgcagtttgtgcggcagattgctctgccaagatacttgaacactgtgttttattgtggtaattatgttttgtgattcaaacttctgtgtactgggtgatgcacccattgtgattgtggaagatagaattcaatttgaactcaggttgtttatgaggggaaaaaaacagttgcatagagtatagctctgtagtggaatatgtcttctgtataactaggctgttaacctatgattgtaaagtagctgtaagaatttcccagtgaaataaaaaaaaattttaagtgttctcggggatgcatagattcatcattttctccaccttaaaaatgcgggcatttaagtctgtccattatctatatagtcctgtcttgtctattgtatatataatctatatgattaaagaaaatatgcataatcagacaagcttgaatattgtttttgcaccagacgaacagtgaggaaattcggagctatacatatgtgcagaaggttactacctagggtttatgcttaattttaattggaggaaatgaatgctgattgtaacggagttaattttattgataataaattatacactatgaaaccgccattgggctactgtagatttgtatccttgatgaatctggggtttccatcagactgaacttacactgtatattttgcaatagttacctcaaggcctactgaccaaattgttgtgttgagatgatatttaactttttgccaaataaaatatattgattcttttct

SEQ ID NO: 13839 - DNA, 2037 bp, Homo sapiens
  source 1..2037: mol_type = unassigned DNA
agtttcataatttccgtgggtcgggccgggcgggccaggcgctgggcacggtgatggccaccactggggccctgggcaactactacgtggactcgttcctgctgggcgccgacgccgcggatgagctgagcgttggccgctatgcgccggggaccctgggccagcctccccggcaggcggcgacgctggccgagcaccccgacttcagcccgtgcagcttccagtccaaggcgacggtgtttggcgcctcgtggaacccagtgcacgcggcgggcgccaacgctgtacccgctgcggtgtaccaccaccatcaccaccacccctacgtgcacccccaggcgcccgtggcggcggcggcgccggacggcaggtacatgcgctcctggctggagcccacgcccggtgcgctctccttcgcgggcttgccctccagccggccttatggcattaaacctgaaccgctgtcggccagaaggggtgactgtcccacgcttgacactcacactttgtccctgactgactatgcttgtggttctcctccagttgatagagaaaaacaacccagcgaaggcgccttctctgaaaacaatgctgagaatgagagcggcggagacaagccccccatcgatcccaataacccagcagccaactggcttcatgcgcgctccactcggaaaaagcggtgcccctatacaaaacaccagaccctggaactggagaaagagtttctgttcaacatgtacctcaccagggaccgcaggtacgaggtggctcgactgctcaacctcaccgagaggcaggtcaagatctggttccagaaccgcaggatgaaaatgaagaaaatcaacaaagaccgagcaaaagacgagtgatgccatttgggcttatttagaaaaaagggtaagctagagagaaaaagaaagaactgtccgtcccccttccgccttctcccttctctcacccccaccctagcctccaccatccccgcacaaagcggctctaaacctcaggccacatcttttccaaggcaaaccctgttcaggctggctcgtaggcctgccgctttgatggaggaggtattgtaagctttccattttctataagaaaaaggaaaagttgaggggggggcattagtgctgatagctgtgtgtgttagcttgtatatatatttttaaaaatctacctgttcctgacttaaaacaaaaggaaagaaactacctttttataatgcacaactgttgatggtaggctgtatagtttttagtctgtgtagttaatttaatttgcagtttgtgcggcagattgctctgccaagatacttgaacactgtgttttattgtggtaattatgttttgtgattcaaacttctgtgtactgggtgatgcacccattgtgattgtggaagatagaattcaatttgaactcaggttgtttatgaggggaaaaaaacagttgcatagagtatagctctgtagtggaatatgtcttctgtataactaggctgttaacctatgattgtaaagtagctgtaagaatttcccagtgaaataaaaaaaaattttaagtgttctcggggatgcatagattcatcattttctccaccttaaaaatgcgggcatttaagtctgtccattatctatatagtcctgtcttgtctattgtatatataatctatatgattaaagaaaatatgcataatcagacaagcttgaatattgtttttgcaccagacgaacagtgaggaaattcggagctatacatatgtgcagaaggttactacctagggtttatgcttaattttaattggaggaaatgaatgctgattgtaacggagttaattttattgataataaattatacactatgaaaccgccattgggctactgtagatttgtatccttgatgaatctggggtttccatcagactgaacttacactgtatattttgcaatagttacctcaaggcctactgaccaaattgttgtgttgagatgatatttaactttttgccaaataaaatatattgattcttttcta

SEQ ID NO: 13840 - DNA, 1755 bp, Homo sapiens
  source 1..1755: mol_type = unassigned DNA
atggcagggttctctccttggcggcggcggcagcggcggaggcggcggcggcggcgggcgaggcagtcgcgggcagcaccagaactggtcggtgatttaggtagtttcctgttgttgggatccacctttctctcgacagcacgacactgcttcattacttcagttgaaatcgtctccaggtacctctgcgcgcgggggtcgggccgggcggggcatcacggccctggtcgtgccaggcctgcggtggcaacctcggctttccctgctcaggagcctcgtgtctttctccgcagcgctttgccagccggccggctttccccttccaccacacacctccacctggtcacagcagataacccagcagccaactggcttcatgcgcgctccactcggaaaaagcggtgcccctatacaaaacaccagaccctggaactggagaaagagtttctgttcaacatgtacctcaccagggaccgcaggtacgaggtggctcgactgctcaacctcaccgagaggcaggtcaagatctggttccagaaccgcaggatgaaaatgaagaaaatcaacaaagaccgagcaaaagacgagtgatgccatttgggcttatttagaaaaaagggtaagctagagagaaaaagaaagaactgtccgtcccccttccgccttctcccttctctcacccccaccctagcctccaccatccccgcacaaagcggctctaaacctcaggccacatcttttccaaggcaaaccctgttcaggctggctcgtaggcctgccgctttgatggaggaggtattgtaagctttccattttctataagaaaaaggaaaagttgaggggggggcattagtgctgatagctgtgtgtgttagcttgtatatatatttttaaaaatctacctgttcctgacttaaaacaaaaggaaagaaactacctttttataatgcacaactgttgatggtaggctgtatagtttttagtctgtgtagttaatttaatttgcagtttgtgcggcagattgctctgccaagatacttgaacactgtgttttattgtggtaattatgttttgtgattcaaacttctgtgtactgggtgatgcacccattgtgattgtggaagatagaattcaatttgaactcaggttgtttatgaggggaaaaaaacagttgcatagagtatagctctgtagtggaatatgtcttctgtataactaggctgttaacctatgattgtaaagtagctgtaagaatttcccagtgaaataaaaaaaaattttaagtgttctcggggatgcatagattcatcattttctccaccttaaaaatgcgggcatttaagtctgtccattatctatatagtcctgtcttgtctattgtatatataatctatatgattaaagaaaatatgcataatcagacaagcttgaatattgtttttgcaccagacgaacagtgaggaaattcggagctatacatatgtgcagaaggttactacctagggtttatgcttaattttaattggaggaaatgaatgctgattgtaacggagttaattttattgataataaattatacactatgaaaccgccattgggctactgtagatttgtatccttgatgaatctggggtttccatcagactgaacttacactgtatattttgcaatagttacctcaaggcctactgaccaaattgttgtgttgagatgatatttaactttttgccaaataaaatatattgattcttttct

SEQ ID NO: 13841 - DNA, 1358 bp, Homo sapiens
  source 1..1358: mol_type = unassigned DNA
attcgagccccagcgctgtgacatactgccgaaaggttgtagggcaagagggtgtctcccccaaacgggccgaccctcctgcggccttgacgcatggactataataggatgaactccttcttagagtacccactctgtaaccggggacccagcgcctacagcgcccacagcgccccaacctcctttcccccaagctcggctcaggcggttgacagctatgcaagcgagggccgctacggtggggggctgtccagccctgcgtttcagcagaactccggctatcccgcccagcagccgccttcgaccctgggggtgcccttccccagctccgcgccctcggggtatgctcctgccgcctgcagccccagctacgggccttctcagtactaccctctgggtcaatcagaaggagacggaggctattttcatccctcgagctacggggcccagctagggggcttgtccgatggctacggagcaggtggagccggtccggggccatatcctccgcagcatcccccttatgggaacgagcagaccgcgagctttgcaccggcctatgctgatctcctctccgaggacaaggaaacaccctgcccttcagaacctaacacccccacggcccggaccttcgactggatgaaggttaagagaaacccacccaagacagcgaaggtgtcagagccaggcctgggctcgcccagtggcctccgcaccaacttcaccacaaggcagctgacagaactggaaaaggagttccatttcaacaagtacctgagccgggcccggagggtggagattgccgccaccctggagctcaatgaaacacaggtcaagatttggttccagaaccgacgaatgaagcagaagaagcgcgagcgagaggaaggtcgggtccccccagccccaccaggctgccccaaggaggcagctggagatgcctcagaccagtcgacatgcacctccccggaagcctcacccagctctgtcacctcctgaactgaacctagccaccaatggggcttccaggcactggagcgccccagtccagccctatcccaggctctccccaaccccaggcctgggcttcactggcctggggatcctctctagggctgaaatgccagtttagagctgcctgggggtgggaggggggatggggaaacatttttctcagacctgggtggctgggggccctacaggaccagaggcctgggaggcatggaacctgtcaaatgtagagggaagggcttctgcctttgatctggggatcagctcagtgtcaacatgtggtgggggtgggggccagcctcatcctcctggattcatcctcctttcccttccaacttgggtttatt

SEQ ID NO: 13842 - DNA, 3467 bp, Homo sapiens
  source 1..3467: mol_type = unassigned DNA
aggagacagaaagctagggagggagaggaggagaaggaggtggggcccggctcctcgtcccctcttcctccgcccaccacgcctcccctccccccggacgtgtaaatgagactctgcaaactggaaagcagcgaaaggacacctccttccttttctctcttgttgtttttaagtggaatgagagagagaggagtggagagggaaaagaagagagagagggagaagagagagaggagagaaagagcgagagagcgagagagagagacagagacagagagagagagagagagagagagagagagaaagagagagagagagagagagaataagctggggtaaagtattttcgcagtttctgcctttaggattttattagcttctctcccccaggccgcagccaatcagcgcgcgtgcccgggcccctgcgtctcttgcgtcaagacggccgtgctgagcgaatgcaggcgacttgcgagctgggagcgatttaaaacgctttggattcccccggcctgggtggggagagcgagctgggtgccccctagattccccgcccccgcacctcatgagccgaccctcggctccatggagcccggcaattatgccaccttggatggagccaaggatatcgaaggcttgctgggagcgggaggggggcggaatctggtcgcccactcccctctgaccagccacccagcggcgcctacgctgatgcctgctgtcaactatgcccccttggatctgccaggctcggcggagccgccaaagcaatgccacccatgccctggggtgccccaggggacgtccccagctcccgtgccttatggttactttggaggcgggtactactcctgccgagtgtcccggagctcgctgaaaccctgtgcccaggcagccaccctggccgcgtaccccgcggagactcccacggccggggaagagtaccccagccgccccactgagtttgccttctatccgggatatccgggaacctaccagcctatggccagttacctggacgtgtctgtggtgcagactctgggtgctcctggagaaccgcgacatgactccctgttgcctgtggacagttaccagtcttgggctctcgctggtggctggaacagccagatgtgttgccagggagaacagaacccaccaggtcccttttggaaggcagcatttgcagactccagcgggcagcaccctcctgacgcctgcgcctttcgtcgcggccgcaagaaacgcattccgtacagcaaggggcagttgcgggagctggagcgggagtatgcggctaacaagttcatcaccaaggacaagaggcgcaagatctcggcagccaccagcctctcggagcgccagattaccatctggtttcagaaccgccgggtcaaagagaagaaggttctcgccaaggtgaagaacagcgctaccccttaagagatctccttgcctgggtgggaggagcgaaagtgggggtgtcctggggagaccaggaacctgccaagcccaggctggggccaaggactctgctgagaggcccctagagacaacacccttcccaggccactggctgctggactgttcctcaggagcggcctgggtacccagtatgtgcagggagacggaaccccatgtgacagcccactccaccagggttcccaaagaacctggcccagtcataatcattcatcctgacagtggcaataatcacgataaccagtactagctgccatgatcgttagcctcatattttctatctagagctctgtagagcactttagaaaccgctttcatgaattgagctaattatgaataaatttggaaggcgatccctttgcagggaagctttctctcagacccccttccattacacctctcaccctggtaacagcaggaagactgaggagaggggaacgggcagattcgttgtgtggctgtgatgtccgtttagcatttttctcagctgacagctgggtaggtggacaattgtagaggctgtctcttcctccctccttgtccaccccatagggtgtacccactggtcttggaagcacccatccttaatacgatgatttttctgtcgtgtgaaaatgaagccagcaggctgcccctagtcagtccttccttccagagaaaaagagatttgagaaagtgcctgggtaattcaccattaatttcctcccccaaactctctgagtcttcccttaatatttctggtggttctgaccaaagcaggtcatggtttgttgagcatttgggatcccagtgaagtagatgtttgtagccttgcatacttagcccttcccaggcacaaacggagtggcagagtggtgccaaccctgttttcccagtccacgtagacagattcacagtgcggaattctggaagctggagacagacgggctctttgcagagccgggactctgagagggacatgagggcctctgcctctgtgttcattctctgatgtcctgtacctgggctcagtgcccggtgggactcatctcctggccgcgcagcaaagccagcgggttcgtgctggtccttcctgcaccttaggctgggggtggggggcctgccggcgcattctccacgattgagcgcacaggcctgaagtctggacaacccgcagaaccgaagctccgagcagcgggtcggtggcgagtagtggggtcggtggcgagcagttggtggtgggccgcggccgccactacctcgaggacatttccctcccggagccagctctcctagaaaccccgcggcggccgccgcagccaagtgtttatggcccgcggtcgggtgggatcctagccctgtctcctctcctgggaaggagtgagggtgggacgtgacttagacacctacaaatctatttaccaaagaggagcccgggactgagggaaaaggccaaagagtgtgagtgcatgcggactgggggttcaggggaagaggacgaggaggaggaagatgaggtcgatttcctgatttaaaaaatcgtccaagccccgtggtccagcttaaggtcctcggttacatgcgccgctcagagcaggtcactttctgccttccacgtcctccttcaaggaagccccatgtgggtagctttcaatatcgcaggttcttactcctctgcctctataagctcaaacccaccaacgatcgggcaagtaaaccccctccctcgccgacttcggaactggcgagagttcagcgcagatgggcctgtggggagggggcaagatagatgagggggagcggcatggtgcggggtgaccccttggagagaggaaaaaggccacaagaggggctgccaccgccactaacggagatggccctggtagagacctttgggggtctggaacctctggactccccatgctctaactcccacactctgctatcagaaacttaaacttgaggattttctctgtttttcactcgcaataaattcagagcaaacaaaa

SEQ ID NO: 13843 - DNA, 528 bp, Homo sapiens
  source 1..528: mol_type = unassigned DNA
ccccgctgcccccccggcccccgagttcccttggatgaaagagaagaaatccgccaagaaacccagccaatccgccacgtctccttctccggccgcctccgccgttccggcggggtcggatcgcctgcagatggcctgggacggaggctggtggcggcggggcaggctgcgcacggcttacaccaacacgcagctgctggaactggagaattccactttaataagtacctgtgccggccacgccgcgtcgagatcgcggccttgctggacctcaccgaaaggcaggtcaaagtctggtttcagaaccggcgcatgaagcacaagcggcagacgcagcaccgagagccgccggatggggagcctgcctgcccgggagccctggaggacatctgcgaccctgccgaggaacccgcggccagcccgggcggccccctcgcgggcggcgtgggaagcctgctgtcacccgccggaggtggtgccgggggccttaagcgcggacccccggcctttagccgttcgcttagaggg

SEQ ID NO: 13844 - DNA, 2652 bp, Homo sapiens
  source 1..2652: mol_type = unassigned DNA
cttttttcttttttaactagcacaatggcaaaaatgggagggaaagtctctttgtcctaggggaaaatctccccaccacactcatgcacacacataacgctgatctgaactttgagagtgctctaagttaaaccaatggctacctcagttcttgttcatgtccctggatatggatacagatacaagcttgaggcttgagtgggtacatgcacatcttagactctgcctgtttttgggggatgtcacagagaagcatggaagcctgaaagtgaggaaagcaggggtacataaggggcagaggcagtgctgcaaacactgggcagagaagagaacccagaccatacagcgatggaggccagaggcccaaaaatgccccttatgctccatctcactcctatgtgtctgcctgggagttcctgtccatttcccaagatttaactgttgtttttggagggtaacagggatagtggtgtgatgattgtaaatctctttcttattttcaccttaatactgacctttttcaaagagtggaagcctctttcgactccctcttcctccaacgcggagatcctcactcatcttttcctggggaaggggagaagggaaggggatgctgctggccacgtaaagaaggccttaatttactctattaaaatacttggaaaagaggaaggtttctcccttagagtctcttcttttccaggcttctgaaaccttctaaccttcgaaggggatgaggaaaaggttcctctagcttttctggagaaacggaggcattggggagagagcatgtgaggcactggtgtaggaatgggggctcatggtgtcctggtcgtggtcctctggtgtttttgaatcaattaaaccaaataatgctctctgttttccaccaggcccagacgagcgattggcggaggccggtcccgtgaccacgaattccctgtaatttcgctggagtcctgggtttaatagagagagtccccatacgcttgtatttatcagcaatatacaattataaaggcccaaaattaaaaaaaagagagaccgaaatctccccctcccaaaatcgctccattacataaatcggggggggtgcaggaggggggtcccttccgatcctccctcctgacgccccccccagcagccccctcccccaccattgaaagccatgaattttgaatttgagagggagattgggtttataaacagccagccgtcgctcgccgagtgtctgacttccttccccgctgtcttggagacatttcaaacttcatcaatcaaggagtcgacattaattcctcctcctcctcctttcgagcaaaccttccccagcctccagcccggcgcctccacccttcagagacccaggagccaaaagcgagccgaagatgggcctgctctgccgccgccaccgccgccgccactccccgctgcccccccggcccccgagttcccttggatgaaagagaagaaatccgccaagaaacccagccaatccgccacgtctccttctccggccgcctccgccgttccggcctccggggtcggatcgcctgcagatggcctgggactgccggaggctggtggcggcggggcgcgcaggctgcgcacggcttacaccaacacgcagctgctggaactggagaaggaattccactttaataagtacctgtgccggccacgccgcgtcgagatcgcggccttgctggacctcaccgaaaggcaggtcaaagtctggtttcagaaccggcgcatgaagcacaagcggcagacgcagcaccgagagccgccggatggggagcctgcctgcccgggagccctggaggacatctgcgaccctgccgaggaacccgcggccagcccgggcggcccctccgcctcgcgggcggcgtgggaagcctgctgtcacccgccggaggtggtgccgggggccttaagcgcggacccccggcctttagccgttcgcttagagggcgcaggcgcgtcgagtcccggctgcgcgctgcgcggggccggcgggctggagcccgggccattgccagaagacgtcttctcggggcgccaggattcacctttccttcccgacctcaacttcttcgcggccgactcctgtctccagctatccggaggcctctcccctagcctacagggttctctcgacagcccggtccctttttccgaggaagagctggattttttcaccagtacgctctgtgccatcgacctgcagtttccctaacctgtttcctcctcccggtcctttcgacccccgcgctccttggccgtctactggaaaaatcgagcctctcccaccctcagtcgcatagacttatgtgttttgctaaaattcaggtattactgaattagcgtttaatccactccctttcttcttcttctaaaatattgggcactcggttatcttttaaaattcacacagaaaaattccgtttggtagactccttccaatgaaatctcaggaataattaaactctagggggactttcttaaaaataactagagggacctattttcctcttttttatgttttagactgtagattatttattaaaattctttaataataggaaaaggggaaagtatttattgtacattattttcatagattaaataaatgtctttataataccaaaa

SEQ ID NO: 13845 - DNA, 2642 bp, Homo sapiens
  source 1..2642: mol_type = unassigned DNA
ttttgcattcctccagcttgcagctccggtagttggaggctgggtagggcagggggaaccgacaggccggtgtccccagccgcaaaagagctgctgaactgtccgtttaaatgctgctgggagactcgtaaaaaaatcatcgtggacctggaggatgagaggggcgagctttatttcggtcggattgcggtgtggtggtttagctgcaaggggatgccgcagccccagttgagggggaaaatagttcttaaaaagcatatgcccccctaaggaatgtctctaaagaaccaaatcaaagctgctctttggaaggtatgaatagaatttaaaaaaaaaagatttctatggagcttaaagttcacagccattctgtgtagacaagagctaagaaaaatgtgagaattatacagaaaaccattaatcacttcttttctttaaatacgtatcctctctcctttgttattattcaacagcaaatctccttggaccggctgttgggggaaaaaagtgttagccgtctctcccggatctgcaagggggaaaaaatttggaaccataaagttgaaaacttttttctctcagtttggaagaagcccttcgtcatgaatgggatctgcagagttcgggcgagaggaggcgagaggcgcaaaggaggggagatttgtcgcctgccgctcgctctggggctcgatgtgaatatatattatgtctgcctgttctcccctcgtcggtggctaaggtcagccgcttggaacagaccccggaggaggggggcagagaggggaggtggggggggggggtccggcgtgtcacgtgacccccagggttgccaatgtccggtcctgagggtatcaggcctttccaagttgccacccactgcccaggcctcacccagcgatgcagaaagccacctactacgacaacgccgcggctgctctcttcggaggctattcctcgtaccctggcagcaatggcttcggcttcgatgtccccccccaacccccatttcaggccgccacgcacctggagggcgactaccagcgctcagcttgctcgctgcagtccctgggcaacgctgccccacatgccaagagcaaggagctcaacggcagctgcatgaggccgggtctggcccccgagcccctgtcggccccgcctggctcacccccgcccagtgccgcacctaccagtgccactagcaacagcagtaatgggggcgggcccagcaaaagtggtcccccaaagtgcggtcccggcaccaactccaccctcaccaaacagatattcccctggatgaaagagtcgaggcaaacgtccaagctgaaaaacaactcccccggcacagcagagggctgtggtggcggcggcggtggcggcggcggcggaggcagtggtggcagcgggggcggtggcggcggcggcgggggaggggacaagagccccccggggtcggcggcgtccaagcgggcgcggacggcgtacacgagcgcgcagctggtggagctggagaaggagttccattttaaccgctacctgtgccggcctcgccgtgtagagatggccaacctgctgaacctcagcgagcggcagatcaagatctggttccagaaccggcgcatgaagtacaagaaggaccagaaggccaagggattggcctcgtcgtcggggggcccatctccagccggcagccccccgcagcccatgcagtccacggccggcttcatgaacgccttacactccatgacccccagctacgagagcccgtccccacccgccttcggtaaagcccaccagaatgcctacgcgctgccctccaactaccagccccctctcaaaggctgcggcgccccgcagaagtaccctccgaccccggcgcccgagtatgagccgcacgtcctccaagccaacgggggcgcctacgggacgcccaccatgcagggcagtccggtgtacgtgggcgggggcggctacgcggatccgctgccgccccctgccggcccctccctctatggcctcaaccacctttcccatcacccttccgggaacctggactacaacggggcgccccctatggcgcccagccagcaccacggaccctgcgaaccccaccccacctacacagacctctcctctcaccacgcgcctcctcctcagggtagaatccaagaagcgcccaaattaacacacctgtgatgggaaagggcgaacgaggattaggggatggggaggaagagagagactgtggagctctggggggcaacctggaggtctgaaaagaggagccagagaaggtggtacccaggcttcctggtcagaaccggcctggagctccttcccttccccctggcctgagaggttgcttttaagtcttccaccccttgttccatctgcctgccaacccatcggaaaggaatccacatcatattggagatgaccccatcaaccccagggctccagcactaccaagttggaattccacgcccgggagtggggtagaggaagacgagacaggacgaggcagaaaagcacattttaaaaaccagacaagatggctaggccatcaccaaccaacggacttaccttacatctttgtaggtaattccccccaaatcttgatttttttttttcctcaattatccttt

SEQ ID NO: 13846 - DNA, 1525 bp, Homo sapiens
  source 1..1525: mol_type = unassigned DNA
actttaactgctcgctgtggtggggaagggggcagaggtaggtgagcactctcccagcctggagcagccggaccagcccagaaggcagcggcggcccaggccagcattcccgcagacacaagaggcttaagtacggcaaagcctttcatatcgtgatttatttgtcataagcaaataaaatgcggttaagctgtctccttttagacagaaggctctttggttattaaagttccgagagaggattccatgaggctggcctctttcctcgcagcataagaagcaaatctccttggaccggctgttgggggaaaaaagtgttagccgtctctcccggatctgcaagggggaaaaaatttggaaccataaagttgaaaacttttttctctcagtttggaagaagcccttcgtcatgaatgggatctgcagagttcgggcgagaggaggcgagaggcgcaaaggaggggagatttgtcgcctgccgctcgctctggggctcgatgtgaatatatattatgtctgcctgttctcccctcgtcggtggctaagatattcccctggatgaaagagtcgaggcaaacgtccaagctgaaaaacaactcccccggcacagcagagggctgtggtggcggcggcggtggcggcggcggcggaggcagtggtggcagcgggggcggtggcggcggcggcgggggaggggacaagagccccccggggtcggcggcgtccaagcgggcgcggacggcgtacacgagcgcgcagctggtggagctggagaaggagttccattttaaccgctacctgtgccggcctcgccgtgtagagatggccaacctgctgaacctcagcgagcggcagatcaagatctggttccagaaccggcgcatgaagtacaagaaggaccagaaggccaagggattggcctcgtcgtcggggggcccatctccagccggcagccccccgcagcccatgcagtccacggccggcttcatgaacgccttacactccatgacccccagctacgagagcccgtccccacccgccttcggtaaagcccaccagaatgcctacgcgctgccctccaactaccagccccctctcaaaggctgcggcgccccgcagaagtaccctccgaccccggcgcccgagtatgagccgcacgtcctccaagccaacgggggcgcctacgggacgcccaccatgcagggcagtccggtgtacgtgggcgggggcggctacgcggatccgctgccgccccctgccggcccctccctctatggcctcaaccacctttcccatcacccttccgggaacctggactacaacggggcgccccctatggcgcccagccagcaccacggaccctgcgaaccccaccccacctacacagacctctcctctcaccacgcgcctcctcctcagggtagaatccaagaagcgcccaaattaacacacctgtgatgggaaagggcgaacgaggattaggggatggggaggaagagagagactgtggagctctggggggcaa

SEQ ID NO: 13847 - DNA, 4208 bp, Homo sapiens
  source 1..4208: mol_type = unassigned DNA
ggagttgaacagctaggctgaatgagattaaagttttccaaacacacatggcagtatggaggttttatgaaaagtgatggtgaagagttgggagagatggagggaaaaaaatgcagtcagaagtttcagaacaaatacacaaaatcctatgttagtttgaatctttatttttctggcacacttttaaaaggctgtattaaaatagtgattttttttttttgcctcagggaacctcagtcaacaggaatacctctgtttctaacctagagaataatattgttaaaattgctttgttaatttttttttcctcaggaataattttctcttttggaaagcactttccccgtctcagtagaaaagtctagcagttgtaacttcttgtttcttatttgctttgggggaaatcaaagaaaacagacggtgaaggaaagggtgggaaaaattaagtctcatgaaaaaaaaaaaaagaggtccggggagagacctgggccaaatggtcacagcaccaactggcgtggcccaggaaattgaaacaatcctgctccatgtgggggccccacagggccactggctgcccgatcccaggtttggctgagcaaagacaagggctggaggtggtggtacctgcagcagggccatggacagatgagtctcggttcagctggctcttgaggttaaaaatcatcaggaagtttctaggtcaggctgttgttgtcttcctggtgggagagtggtgggaagtggagaggatacctcacaagagaagcttctctgctgaacttgcttctcctgcctgttcttttaggagatcctttggttttccttcaggctagactttgcttgggcaagagacctaaaccgacttggaaggaggcaaaggctggaagcatagaagcctctgggctcagaggagggtgttgatgatgcttttattttggagtctcctagtgtcccctcccttgagccatcctatcccagagttggggaggagagatagggagagagggactaggggaggtcaggggctagtgcacaggcaggagagaagcaatggcctttgccatagattctacatctaggcagtcttgaaaggcatatagtctttatttatttttttattttttagtggaaatgaaaactggtgggcttttttttctcagcatctgctttggagatgttggggaggggaaaagaaaaaaccctattgatgtcagttcccttttcagttcctaagatggattcgagccccagtcctcttctcccccttgtgtctcttctctcgcctcgcaggtcagccgcttggaacagaccccggaggaggggggcagagaggggaggtggggggggggggtccggcgtgtcacgtgacccccagggttgccaatgtccggtcctgagggtatcaggcctttccaagttgccacccactgcccaggcctcacccagcgatgcagaaagccacctactacgacaacgccgcggctgctctcttcggaggctattcctcgtaccctggcagcaatggcttcggcttcgatgtccccccccaacccccatttcaggccgccacgcacctggagggcgactaccagcgctcagcttgctcgctgcagtccctgggcaacgctgccccacatgccaagagcaaggagctcaacggcagctgcatgaggccgggtctggcccccgagcccctgtcggccccgcctggctcacccccgcccagtgccgcacctaccagtgccactagcaacagcagtaatgggggcgggcccagcaaaagtggtcccccaaagtgcggtcccggcaccaactccaccctcaccaaacagatattcccctggatgaaagagtcgaggcaaacgtccaagctgaaaaacaactcccccggcacagcagagggctgtggtggcggcggcggtggcggcggcggcggaggcagtggtggcagcgggggcggtggcggcggcggcgggggaggggacaagagccccccggggtcggcggcgtccaagcgggcgcggacggcgtacacgagcgcgcagctggtggagctggagaaggagttccattttaaccgctacctgtgccggcctcgccgtgtagagatggccaacctgctgaacctcagcgagcggcagatcaagatctggttccagaaccggcgcatgaagtacaagaaggaccagaaggccaagggattggcctcgtcgtcggggggcccatctccagccggcagccccccgcagcccatgcagtccacggccggcttcatgaacgccttacactccatgacccccagctacgagagcccgtccccacccgccttcggtaaagcccaccagaatgcctacgcgctgccctccaactaccagccccctctcaaaggctgcggcgccccgcagaagtaccctccgaccccggcgcccgagtatgagccgcacgtcctccaagccaacgggggcgcctacgggacgcccaccatgcagggcagtccggtgtacgtgggcgggggcggctacgcggatccgctgccgccccctgccggcccctccctctatggcctcaaccacctttcccatcacccttccgggaacctggactacaacggggcgccccctatggcgcccagccagcaccacggaccctgcgaaccccaccccacctacacagacctctcctctcaccacgcgcctcctcctcagggtagaatccaagaagcgcccaaattaacacacctgtgatgggaaagggcgaacgaggattaggggatggggaggaagagagagactgtggagctctggggggcaacctggaggtctgaaaagaggagccagagaaggtggtacccaggcttcctggtcagaaccggcctggagctccttcccttccccctggcctgagaggttgcttttaagtcttccaccccttgttccatctgcctgccaacccatcggaaaggaatccacatcatattggagatgaccccatcaaccccagggctccagcactaccaagttggaattccacgcccgggagtggggtagaggaagacgagacaggacgaggcagaaaagcacattttaaaaaccagacaagatggctaggccatcaccaaccaacggacttaccttacatctttgtaggtaattccccccaaatcttgatttttttttttcctcaattatcctttaaaaaataagaaaacacatttcaaacccaaaaggcacaaaacacgttcccttccaactttcccaaaacctcaaatttgttcccatttgaggtttattgaggtacacttctagcccccggtttttctgctctagaacattcatatctatacatcccacccccatcaattacagtttttagagggctcagggatggtgagagatcctgaaagagctgcctatattataaattatatacatttttttttaaggaaaagtgtggaggctagggcaggcaggttgttaggactgaaggtttgcccattctgctgcctccatctcagctccagctccatccccctctccacagaaagcagttggtgacacgaggttctatacttttcttctgttgctctcttgacttaacgtgaaaacagggtatatttgaacaaactgtcccaggcaggggctgggcagggcctgtgtgccttgctcagcctcctgacaggacacttttgttgcacttagaatttacattttaatggatgtaaaaacaactgtgagagatgtctgggcctgcagaagtccagcattgctcaaaaaagcgtgtgttctagtgaacattttcatatatatttattggttatagcctgttaaaatattttcttttttgtattatttatccccctacattatgtatttatatgagggaaaaaaaggaaaaaattgtacttttttagtatttacctgttacaaaggacattgtgtttcctgtcatgtaaaaccagctattttagttactattgtactctagaaaagagctgtagatttatgttaaactcgtacttacgaacaattgtaattagttctaaaaggcatgaactcagctcctaatcgtcactgtatagtcctgaatttgtagaactagagttaattccctcttggaactttctttgttcttcagtagttacttttttccttacctaaaagggttgtctgtcaaacaattcttgaataaactttctgttatcaatttta

SEQ ID NO: 13848 - DNA, 1909 bp, Homo sapiens
  source 1..1909: mol_type = unassigned DNA
gacactttaactgctcgctgtggtggggaagggggcagaggtaggtgagcactctcccagcctggagcagccggaccagcccagaaggcagcggcggcccaggccagcattcccgcagaggggagatttgtcgcctgccgctcgctctggggctcgatgtgaatatatattatgtctgcctgttctcccctcgtcggtggctaaggccgccacgcacctggagggcgactaccagcgctcagcttgctcgctgcagtccctgggcaacgctgccccacatgccaagagcaaggagctcaacggcagctgcatgaggccgggtctggcccccgagcccctgtcggccccgcctggctcacccccgcccagtgccgcacctaccagtgccactagcaacagcagtaatgggggcgggcccagcaaaagtggtcccccaaagtgcggtcccggcaccaactccaccctcaccaaacagatattcccctggatgaaagagtcgaggcaaacgtccaagctgaaaaacaactcccccggcacagcagagggctgtggtggcggcggcggtggcggcggcggcggaggcagtggtggcagcgggggcggtggcggcggcggcgggggaggggacaagagccccccggggtcggcggcgtccaagcgggcgcggacggcgtacacgagcgcgcagctggtggagctggagaaggagttccattttaaccgctacctgtgccggcctcgccgtgtagagatggccaacctgctgaacctcagcgagcggcagatcaagatctggttccagaaccggcgcatgaagtacaagaaggaccagaaggccaagggattggcctcgtcgtcggggggcccatctccagccggcagccccccgcagcccatgcagtccacggccggcttcatgaacgccttacactccatgacccccagctacgagagcccgtccccacccgccttcggtaaagcccaccagaatgcctacgcgctgccctccaactaccagccccctctcaaaggctgcggcgccccgcagaagtaccctccgaccccggcgcccgagtatgagccgcacgtcctccaagccaacgggggcgcctacgggacgcccaccatgcagggcagtccggtgtacgtgggcgggggcggctacgcggatccgctgccgccccctgccggcccctccctctatggcctcaaccacctttcccatcacccttccgggaacctggactacaacggggcgccccctatggcgcccagccagcaccacggaccctgcgaaccccaccccacctacacagacctctcctctcaccacgcgcctcctcctcagggtagaatccaagaagcgcccaaattaacacacctgtgatgggaaagggcgaacgaggattaggggatggggaggaagagagagactgtggagctctggggggcaacctggaggtctgaaaagaggagccagagaaggtggtacccaggcttcctggtcagaaccggcctggagctccttcccttccccctggcctgagaggttgcttttaagtcttccaccccttgttccatctgcctgccaacccatcggaaaggaatccacatcatattggagatgaccccatcaaccccagggctccagcactaccaagttggaattccacgcccgggagtggggtagaggaagacgagacaggacgaggcagaaaagcacattttaaaaaccagacaagatggctaggccatcaccaaccaacggacttaccttacatctttgtaggtaattccccccaaatcttgatttttttttttcctcaattatcctttaaaaaataagaaaacacatttcaaacccaaaaggcacaaaacacgttcccttccaactttcccaaaacctcaa

SEQ ID NO: 13849 - DNA, 1420 bp, Homo sapiens
  source 1..1420: mol_type = unassigned DNA
ttaactgctcgctgtggtggggaagggggcagaggtaggtgagcactctcccagcctggagcagccggaccagcccagaaggcagcggcggcccaggccagcattcccgcagcctcacccagcgatgcagaaagccacctactacgacaacgccgcggctgctctcttcggaggctattcctcgtaccctggcagcaatggcttcggcttcgatgtccccccccaacccccatttcaggccgccacgcacctggagggcgactaccagcgctcagcttgctcgctgcagtccctgggcaacgctgccccacatgccaagagcaaggagctcaacggcagctgcatgaggccgggtctggcccccgagcccctgtcggccccgcctggctcacccccgcccagtgccgcacctaccagtgccactagcaacagcagtaatgggggcgggcccagcaaaagtggtcccccaaagtgcggtcccggcaccaactccaccctcaccaaacagatattcccctggatgaaagagtcgaggcaaacgtccaagctgaaaaacaactcccccggcacagcagagggctgtggtggcggcggcggtggcggcggcggcggaggcagtggtggcagcgggggcggtggcggcggcggcgggggaggggacaagagccccccggggtcggcggcgtccaagcgggcgcggacggcgtacacgagcgcgcagctggtggagctggagaaggagttccattttaaccgctacctgtgccggcctcgccgtgtagagatggccaacctgctgaacctcagcgagcggcagatcaagatctggttccagaaccggcgcatgaagtacaagaaggaccagaaggccaagggattggcctcgtcgtcggggggcccatctccagccggcagccccccgcagcccatgcagtccacggccggcttcatgaacgccttacactccatgacccccagctacgagagcccgtccccacccgccttcggtaaagcccaccagaatgcctacgcgctgccctccaactaccagccccctctcaaaggctgcggcgccccgcagaagtaccctccgaccccggcgcccgagtatgagccgcacgtcctccaagccaacgggggcgcctacgggacgcccaccatgcagggcagtccggtgtacgtgggcgggggcggctacgcggatccgctgccgccccctgccggcccctccctctatggcctcaaccacctttcccatcacccttccgggaacctggactacaacggggcgccccctatggcgcccagccagcaccacggaccctgcgaaccccaccccacctacacagacctctcctctcaccacgcgcctcctcctcagggtagaatccaagaagcgcccaaattaacacacctgtga

SEQ ID NO: 13850 - DNA, 1279 bp, Homo sapiens
  source 1..1279: mol_type = unassigned DNA
atgaggctggcctctttcctcgcagcataagaagcaaatctccttggaccggctgttgggggaaaaaagtgttagccgtctctcccggatctgcaagggggaaaaaatttggaaccataaagttgaaaacttttttctctcagtttggaagaagcccttcgtcatgaatgggatctgcagagttcgggcgagaggaggcgagaggcgcaaaggaggggagatttgtcgcctgccgctcgctctggggctcgatgtgaatatatattatgtctgcctgttctcccctcgtcggtggctaagatattcccctggatgaaagagtcgaggcaaacgtccaagctgaaaaacaactcccccggcacagcagagggctgtggtggcggcggcggtggcggcggcggcggaggcagtggtggcagcgggggcggtggcggcggcggcgggggaggggacaagagccccccggggtcggcggcgtccaagcgggcgcggacggcgtacacgagcgcgcagctggtggagctggagaaggagttccattttaaccgctacctgtgccggcctcgccgtgtagagatggccaacctgctgaacctcagcgagcggcagatcaagatctggttccagaaccggcgcatgaagtacaagaaggaccagaaggccaagggattggcctcgtcgtcggggggcccatctccagccggcagccccccgcagcccatgcagtccacggccggcttcatgaacgccttacactccatgacccccagctacgagagcccgtccccacccgccttcggtaaagcccaccagaatgcctacgcgctgccctccaactaccagccccctctcaaaggctgcggcgccccgcagaagtaccctccgaccccggcgcccgagtatgagccgcacgtcctccaagccaacgggggcgcctacgggacgcccaccatgcagggcagtccggtgtacgtgggcgggggcggctacgcggatccgctgccgccccctgccggcccctccctctatggcctcaaccacctttcccatcacccttccgggaacctggactacaacggggcgccccctatggcgcccagccagcaccacggaccctgcgaaccccaccccacctacacagacctctcctctcaccacgcgcctcctcctcagggtagaatccaagaagcgcccaaattaacacacctgtgatgggaaagggcgaacgaggattaggggatggggaggaagagagagactgtggagctctggggggcaa

SEQ ID NO: 13851 - DNA, 1845 bp, Homo sapiens
  source 1..1845: mol_type = unassigned DNA
atagtaactgcctgctcgtgggggaggctgggagagaggtgaaccgcaggtcacggcgtctaaaaattattaaaatgtttgagagcctcgtgacgcgcctagctgtttaacaaagactgccaaagtatgagattaacacgaaaacttgcgcttccaaaacaaaaacacaccaaaaaaaaaagtcacgttccggcttctgagggagcccgtggctgtgtccgccgccgcggtccggttttccggacacacaatagtggacaggagagagctcagctgttgcccggcgcgtccgcgggcggctcggcggccggcggggctggggagcctcccgcaaatctccttggaccggctgttgggggaaaaaagtgttagccgtctctcccggatctgcaagggggaaaaaatttggaaccataaagttgaaaacttttttctctcagtttggaagaagcccttcgtcatgaatgggatctgcagagttcgggcgagaggaggcgagaggcgcaaaggaggggagatttgtcgcctgccgctcgctctggggctcgatgtgaatatatattatgtctgcctgttctcccctcgtcggtggctaaggccgccacgcacctggagggcgactaccagcgctcagcttgctcgctgcagtccctgggcaacgctgccccacatgccaagagcaaggagctcaacggcagctgcatgaggccgggtctggcccccgagcccctgtcggccccgcctggctcacccccgcccagtgccgcacctaccagtgccactagcaacagcagtaatgggggcgggcccagcaaaagtggtcccccaaagtgcggtcccggcaccaactccaccctcaccaaacagatattcccctggatgaaagagtcgaggcaaacgtccaagctgaaaaacaactcccccggcacagcagagggctgtggtggcggcggcggtggcggcggcggcggaggcagtggtggcagcgggggcggtggcggcggcggcgggggaggggacaagagccccccggggtcggcggcgtccaagcgggcgcggacggcgtacacgagcgcgcagctggtggagctggagaaggagttccattttaaccgctacctgtgccggcctcgccgtgtagagatggccaacctgctgaacctcagcgagcggcagatcaagatctggttccagaaccggcgcatgaagtacaagaaggaccagaaggccaagggattggcctcgtcgtcggggggcccatctccagccggcagccccccgcagcccatgcagtccacggccggcttcatgaacgccttacactccatgacccccagctacgagagcccgtccccacccgccttcggtaaagcccaccagaatgcctacgcgctgccctccaactaccagccccctctcaaaggctgcggcgccccgcagaagtaccctccgaccccggcgcccgagtatgagccgcacgtcctccaagccaacgggggcgcctacgggacgcccaccatgcagggcagtccggtgtacgtgggcgggggcggctacgcggatccgctgccgccccctgccggcccctccctctatggcctcaaccacctttcccatcacccttccgggaacctggactacaacggggcgccccctatggcgcccagccagcaccacggaccctgcgaaccccaccccacctacacagacctctcctctcaccacgcgcctcctcctcagggtagaatccaagaagcgcccaaattaacacacctgtgatgggaaagggcgaacgaggattaggggatggggaggaagagagagactgtggagctctggggggca

SEQ ID NO: 13852 - DNA, 2196 bp, Homo sapiens
  source 1..2196: mol_type = unassigned DNA
agtatatttcacattctccagaatgttaagtgacactttaactgctcgctgtggtggggaagggggcagaggtaggtgagcactctcccagcctggagcagccggaccagcccagaaggcagcggcggcccaggccagcattcccgcacaaatctccttggaccggctgttgggggaaaaaagtgttagccgtctctcccggatctgcaagggggaaaaaatttggaaccataaagttgaaaacttttttctctcagtttggaagaagcccttcgtcatgaatgggatctgcagagttcgggcgagaggaggcgagaggcgcaaaggaggggagatttgtcgcctgccgctcgctctggggctcgatgtgaatatatattatgtctgcctgttctcccctcgtcggtggctaaggtcagccgcttggaacagaccccggaggaggggggcagagaggggaggtggggggggggggtccggcgtgtcacgtgacccccagggttgccaatgtccggtcctgagggtatcaggcctttccaagttgccacccactgcccaggcctcacccagcgatgcagaaagccacctactacgacaacgccgcggctgctctcttcggaggctattcctcgtaccctggcagcaatggcttcggcttcgatgtccccccccaacccccatttcaggccgccacgcacctggagggcgactaccagcgctcagcttgctcgctgcagtccctgggcaacgctgccccacatgccaagagcaaggagctcaacggcagctgcatgaggccgggtctggcccccgagcccctgtcggccccgcctggctcacccccgcccagtgccgcacctaccagtgccactagcaacagcagtaatgggggcgggcccagcaaaagtggtcccccaaagtgcggtcccggcaccaactccaccctcaccaaacagatattcccctggatgaaagagtcgaggcaaacgtccaagctgaaaaacaactcccccggcacagcagagggctgtggtggcggcggcggtggcggcggcggcggaggcagtggtggcagcgggggcggtggcggcggcggcgggggaggggacaagagccccccggggtcggcggcgtccaagcgggcgcggacggcgtacacgagcgcgcagctggtggagctggagaaggagttccattttaaccgctacctgtgccggcctcgccgtgtagagatggccaacctgctgaacctcagcgagcggcagatcaagatctggttccagaaccggcgcatgaagtacaagaaggaccagaaggccaagggattggcctcgtcgtcggggggcccatctccagccggcagccccccgcagcccatgcagtccacggccggcttcatgaacgccttacactccatgacccccagctacgagagcccgtccccacccgccttcggtaaagcccaccagaatgcctacgcgctgccctccaactaccagccccctctcaaaggctgcggcgccccgcagaagtaccctccgaccccggcgcccgagtatgagccgcacgtcctccaagccaacgggggcgcctacgggacgcccaccatgcagggcagtccggtgtacgtgggcgggggcggctacgcggatccgctgccgccccctgccggcccctccctctatggcctcaaccacctttcccatcacccttccgggaacctggactacaacggggcgccccctatggcgcccagccagcaccacggaccctgcgaaccccaccccacctacacagacctctcctctcaccacgcgcctcctcctcagggtagaatccaagaagcgcccaaattaacacacctgtgatgggaaagggcgaacgaggattaggggatggggaggaagagagagactgtggagctctggggggcaacctggaggtctgaaaagaggagccagagaaggtggtacccaggcttcctggtcagaaccggcctggagctccttcccttccccctggcctgagaggttgcttttaagtcttccaccccttgttccatctgcctgccaacccatcggaaaggaatccacatcatattggagatgaccccatcaaccccagggctccagcactaccaagttggaattccacgcccgggagtggggtagaggaagacgagacaggacgaggcag

SEQ ID NO: 13853 - DNA, 3757 bp, Homo sapiens
  source 1..3757: mol_type = unassigned DNA
gagaattgaaaaccttgtaatcccaagaacagactcgcactgcctttttctgttcccagagctcaaaactagaacaaaacgaaataaaaccaaagcactcaaaccacaccccaaacgaagaaggcgcggaaagtaggagaactggaaaatttctgggccaagaagatctgtctgtcttctgtatataccctgtagatccgaatttgtgtaaggaattttgtggtcacaaattcgtatctaggggaatatgtagttgacataaacactccgctcttatttttccagaagaaaaaaatatatatatatgtatatgtagtatttttctgaatgaggacagtctggtgactggccacacgaagactccttcctctttattcctctatcttttcctccttcaactggttagagatggagaaatcatctacctgaactctccccacgcctgcccctgggagccttggtcccttttcacatctctttaagaggttaatgttattgttgttgaagttttaaatttatcttctcgtcccaaacgcacccattttctattctgggctcagggaggctttattggaaattgcgaaaaaaaatgacttgtcttcagtgtgcgaagaaggcaaaggaaatttgtttaacaaacggatgctgaggccgcctttccgtttcagttcagaacaagatgacctggaaatactcgattaccaaggagtgttattgtctgtgtgggtcacctctatggctgtatccccagtatcaaagggatgtgagatttctattcgccgcggaggcggcgacaattagaacgtctcggacccatggttagtattgctcgggtggttatggaattagcaaattgctaatcaattttgctctcaaaagttgcaggtttttttaccccagcgctctgtctatagtgtgggaaaccaagtcgtttctccaggcttgggccgtgtgggttaaagggaggagtggataggagaagggggacagacggactgacggacacagtctagctaaccgtgcagctaaatgagatttggaaggcgaagtctccccgaattagtgcatgaatttcctatcgatccgcccgcggttccattcatctctgacaagtccctctgcgcacccgccctctagctctggacgcctcctctctcacccctacccttccccatccagctgcagagaaaagccccaagctctgtgctctggcccccgtatgggttcccctttcgagacggagcccccaacccgccagtaacctaactccccatagagacgcagggtgctagcgctccctcccgccgaggggaggagactggggcctttggaaggtacagaatgctgggcagaggtgaggcagaacaggagggctacaccgggagccccaacttcttaagggatctagggtttgcgctctgcctagcgccccaacaggccctccagtcgcaacctgcgcgcgctctctctctcgctctctctctgatcccggagagagcgaggcaaggagggggtcgccccgcaggagccctatgtaaatcctggtgttgggtgggtgggtggggagggggaagggaagaaggggaaataaacctctttggctggagtggggtccgggtgagcagatttccttatccgggaatcgcaggcggggcggccattggctcggaggatcacgtgggcgcctaactttgttcacttgacagtaagtaggagggctttcggaaacaggaaaacgagtcaggggtcggaataaattttagtatattttgtgggcaattcccagaaattaatggctatgagttcttttttgatcaactcaaactatgtcgaccccaagttccctccatgcgaggaatattcacagagcgattacctacccagcgaccactcgcccgggtactacgccggcggccagaggcgagagagcagcttccagccggaggcgggcttcgggcggcgcgcggcgtgcaccgtgcagcgctacgcggcctgccgggaccctgggcccccgccgcctccgccaccacccccgccgcccccgccaccgcccggtctgtcccctcgggctcctgcgccgccacccgccggggccctcctcccggagcccggccagcgctgcgaggcggtcagcagcagccccccgccgcctccctgcgcccagaaccccctgcaccccagcccgtcccactccgcgtgcaaagagcccgtcgtctacccctggatgcgcaaagttcacgtgagcacggtaaaccccaattacgccggcggggagcccaagcgctctcggaccgcctacacgcgccagcaggtcttggagctggagaaggaatttcactacaaccgctacctgacacggcgccggagggtggagatcgcccacgcgctctgcctctccgagcgccagatcaagatctggttccagaaccggcgcatgaagtggaaaaaagaccacaagttgcccaacaccaagatccgctcgggtggtgcggcaggctcagccggagggccccctggccggcccaatggaggcccccgcgcgctctagtgcccccgcacgcgggagccacgaacctcggggtgggggtgggcagtgagtgcaggggatggggtggggggacaggagggggccctggggcctgggccccggaaaaatctatctgccctcccccacactttatatacgaataaacgcagaagagggggaggggaagctttatttatagaaatgacaatagagggccacggggaggcccccccagaagcaagattcaaatctcttgctttctttcttaaaaaaaagaaaaagaaaaagcaagaagaaggaagaaagaaaaagacagaaagagaaataggaggaggctgcagctcctcgttttcagctttggcgaagatggatccacgtttcatctttaatcacgccaggtccaggcccatctgtcttgtttcctctgccgaggagaagacgggcctcggtggcgaccattacctcgacacccgctaacaaatgaggcccggctcggccgcctccgcctctgctactgccgctgctggaagacagcctggatttcctttctttgtcccccactcccgatacccagcgaaagcaccctctgactgccagatagtgcagtgttttggtcacggtaacacacacacactctccctcatctttcgtgcccattcactgagggccagaatgactgctcacccacttccaccgtggggttgggggtgggcaacagaggaggggagcaagtagggaagggggtggccttgacaactcaggagtgagcaggaaaattgagtccaaggaaaaagagagactcagagacccgggagggccttcctctgaaaggccaagccaagccatgcttggcagggtgaggggccagttgagttctgggagctgggcactactctgccagtccagagttgtacagcagaagcctctctcctagactgaaaatgaatgtgaaactaggaaataaaatgtgcccctcccagtctgggaggaggatgttgcagagccctctcccatagtttattatgttgcatcgtttattattattattgataatattattattactatttttttgtgtcatgtgagtcctctctccttttctctttctgacattccaaaaccaggccccttcctacctctggggctgcttgagtctagaacccttcgtatgtgtgaatatctgtgtgctgtacagagtgacaatagaaataaatgtttggtttcttgtga

SEQ ID NO: 13854 - DNA, 2041 bp, Homo sapiens
  source 1..2041: mol_type = unassigned DNA
cattgaatcggccctaacgattctcggatcgtcattatttgtaaccatagagcatgaattacctcttgaggtcatcagcgagaatttacgactggtcaacaaaagcacgtgattccctaacgccccccaccccccttccaaccccccccccatatttggccgcatacatagcaaaacgaagtacagtgcatcgctataattcattaatacatcataaatcgtgaagcacagggttataacgaccacgatccacaaatcaagccctccaaaatcacccaaatgagctcgtactttgtaaactccttctcggggcgttatccaaatggcccggactatcagttgctaaattatggcagtggcagctctctgagcggctcttacagggatcccgctgccatgcacaccggctcttacggctacaattacaatgggatggacctcagcgtcaaccgctcctcggcctcctccagccactttggggcggtgggcgagagctcgcgcgccttccccgcgcccgcccaggagccccgcttcaggcaagcggcttcgagctgctccctgtcctcgcccgagtccctgccctgcaccaacggcgacagccacggcgccaagccctctgcttcgtccccctccgaccaggcgacctcagccagctccagcgccaatttcaccgaaatagacgaggccagcgcgtcctcggagcctgaggaagcggcaagccagctaagcagccccagcctagctcgggcgcagccagagcccatggccacctccacagccgcgcccgaggggcagactccgcaaatattcccctggatgaggaagcttcacatcagccatgatatgaccgggccggacgggaaaagggcccggaccgcgtatacccgctaccagaccctggagctggaaaaggagttccacttcaaccgctacctgacccggcgacggcgcatcgagatcgcccacgcactctgcctgtccgagcgccagatcaagatctggttccagaaccggcgcatgaagtggaagaaggacaacaaattgaaaagtatgagcctggctacagctggcagcgccttccagccctgagcccgcccagaggagcccagcggcccaagagcccgtgccacccccagccctggcccctccaatcctccccgctctgccgccgcccgctggggaccggttcccacaagcctgcctcgccttgtgttacgatatttcgtttggtcttaggtcttcctgtggctccctctctcctggactggttatcttgttattattgttaataataattattattattattttccttccatgctcccaactcccttctgcttgtcccaaatccgccagtgtttctgaatgtttgtgtctgtggttgcagtctttcccccaggaaaaaaaaaaaaagaaattcgcatgtttaatgtgaactctcccctccccatctgtgttctaacttatttataaaaagatgatcgctgtattttgagtttcagctggaaacttctgtaaggggcagcagttgaggtggggtagtgccgcagtggggtcaagctgagctggcttcggagatggagtcccttttcattctcctcctcctccctcctcactccctaggcccaagtctcctaggggcttggtcctagggtgggaaggggctagggaggaccaaagggatggtattgagaagagagaaagaagatagtgagatttaagttcctgctgcctgggtaggccccacaaggcctggtctgggagtatacggaaacaaaaatgatcctcagtgcaaaatgtcttgtgtatttctctgtgaatccatgggtctggctagagggcccaaagcttgtaaatatggggatagtctgggtcagacccatctctcccttacccatcttgcttccaagaccatttgtagtgagcgagtggatgctgtgctacgtgtgaaatctgtctttgcggggcctgtctcagtgattcgcttttggtatttgtttgtagctttcctggaagtcaaataaatgtttcccccactcca

SEQ ID NO: 13855 - DNA, 1660 bp, Homo sapiens
  source 1..1660: mol_type = unassigned DNA
caccacacctaggtcggagcactgtcgtccttcagggctccagcctcttgatatttttgtacttcagtatcagctcgatagagcaaaagagagagaggacgagagagggggtcagagaaggggaagcaacggctctcacgttgggacaatattatctggaagctgaagaagaaactgaatactccttccttcctccccacccattcctttaaatccggagggggaaaaaatcccaaggtctgcaaaggcgcggcgctcggactataaaacacaacaaatcataaacccggcggagcagcagcggccgcgcgcgcctcccctcccaatgagttcctatttcgtgaactccaccttccccgtcactctggccagcgggcaggagtccttcctgggccagctaccgctctattcgtcgggctatgcggacccgctgagacattaccccgcgccctacgggccagggccgggccaggacaagggctttgccacttcctcctattacccgccggcgggcggtggctacggccgagcggcgccctgcgactacgggccggcgccggccttctaccgcgagaaagagtcggcctgcgcactctccggcgccgacgagcagcccccgttccaccccgagccgcggaagtcggactgcgcgcaggacaagagcgtgttcggcgagacagaagagcagaagtgctccactccggtctacccgtggatgcagcggatgaattcgtgcaacagttcctcctttgggcccagcggccggcgaggccgccagacatacacacgttaccagacgctggagctggagaaggagtttcactacaatcgctacctgacgcggcggcggcgcatcgagatcgcgcacgccctgtgcctgacggagaggcagatcaagatatggttccagaaccgacgcatgaagtggaaaaaggagagcaaactgctcagcgcgtctcagctcagtgccgaggaggaggaagaaaaacaggccgagtgaaggtgctggaaagggagggaggacgcgaggggaaaggcctgtggggagccgagggcgtcagagagacccgggaaggaaggctctcgggtgggggagccaggagacctgctctccggcgcagacaggcggggcccagcgctctcctggacgcccccgcccgcacagctcccggcgggtgctctgaggcctcactactcgagcccacccagcatcccgcgcgcccttccttcccgaggaactcgcctcagcctgatcaggcttcctggtgagaactgaggagcggactcacttgatgtttcctggaagcagagcaaaatgctcttgtccctgtcgcgtctcattttgtccatgtcccccgtgcacggttcaatggtagattcgctgtcccctcagcgggggccttgaagactccctgatcccagacctgtcgtctctcccaccccctccccaaagccactggaaggagcacatactacctagaagtaagaagaggagcctcagaagaaaacaaagttctattttattaattttctatgtgttgtgtttgtagtcttgtcttagctctggacgtgaaatacttcgatgatgatgatgatgatgatgatgataataataataataataacaacaacaacaacaataataaagatgtgaaaactc

SEQ ID NO: 13856 - DNA, 3434 bp, Homo sapiens
  source 1..3434: mol_type = unassigned DNA
taatgcagcattcttttggacaccacacctaggtcggagcactgtcgtccttcagggctccagcctcttgatatttttgtacttcagtatcagctcgatagagcaaaagagagagaggacgagagaggggggtgaggagaaaagagagagagcgcgagagggagagggagagaaggaggggtgggaattacacaaagagagaaccaaaaataattttgattcctaagttaatttgctcactgatctgggattttagtcaccatggagggtaaatggacaatctgcccaggactgcagcccgatactatttttcaaagccagaacttactccattttctatgcaaatgtcagaaaaatgaaacaccctctctcccaagtcagagaaggggaagcaacggctctcacgttgggacaatattatctggaagctgaagaagaaactgaatactccttccttcctccccacccattcctttaaatccggagggggaaaaaatcccaaggtctgcaaagctaaaacccaatctcggatatactactaataggcgcggcgctcggactataaaacacaacaaatcataaacccggcggagcagcagcggccgcgcgcgcctcccctcccaatgagttcctatttcgtgaactccaccttccccgtcactctggccagcgggcaggagtccttcctgggccagctaccgctctattcgtcgggctatgcggacccgctgagacattaccccgcgccctacgggccagggccgggccaggacaagggctttgccacttcctcctattacccgccggcgggcggtggctacggccgagcggcgccctgcgactacgggccggcgccggccttctaccgcgagaaagagtcggcctgcgcactctccggcgccgacgagcagcccccgttccaccccgagccgcggaagtcggactgcgcgcaggacaagagcgtgttcggcgagacagaagagcagaagtgctccactccggtctacccgtggatgcagcggatgaattcgtgcaacagttcctcctttgggcccagcggccggcgaggccgccagacatacacacgttaccagacgctggagctggagaaggagtttcactacaatcgctacctgacgcggcggcggcgcatcgagatcgcgcacgccctgtgcctgacggagaggcagatcaagatatggttccagaaccgacgcatgaagtggaaaaaggagagcaaactgctcagcgcgtctcagctcagtgccgaggaggaggaagaaaaacaggccgagtgaaggtgctggaaagggagggaggacgcgaggggaaaggcctgtggggagccgagggcgtcagagagacccgggaaggaaggctctcgggtgggggagccaggagacctgctctccggcgcagacaggcggggcccagcgctctcctggacgcccccgcccgcacagctcccggcgggtgctctgaggcctcactactcgagcccacccagcatcccgcgcgcccttccttcccgaggaactcgcctcagcctgatcaggcttcctggtgagaactgaggagcggactcacttgatgtttcctggaagcagagcaaaatgctcttgtccctgtcgcgtctcattttgtccatgtcccccgtgcacggttcaatggtagattcgctgtcccctcagcgggggccttgaagactccctgatcccagacctgtcgtctctcccaccccctccccaaagccactggaaggagcacatactacctagaagtaagaagaggagcctcagaagaaaacaaagttctattttattaattttctatgtgttgtgtttgtagtcttgtcttagctctggacgtgaaatacttcgatgatgatgatgatgatgatgatgataataataataataataacaacaacaacaacaataataaagatgtgaaaactcgacgctcggtcacctccaatcctcccctgccattttttcctctctcctcaacccccagcctctccatctttcctgagccagaattcttcagcaaaggcgagagccctggcccgccgaagcgagccctgttcgactgggaagttacagctgagataaaggctggagcgatcagtcctgcccaggccccagcgctgcgtttccctggtgctgaggctcacagccgcttctccccgtgcagacttgggggatggagaggtgctgtgtccctctcattctctagcctttcctcgtgtatacacagcactaagggagccactgaggcccctaaagctctctggcggagacggagccatagtctgggggcctctgcagcgcttttctgtcctcaccttcgcagcgacccctggtctttggcccgtccacatggccaggttttttcgccagccttggccctccgctcctggcctgtggctctggagactgaaaaatggggccactgggtatctctcaccctgcagctgaaggctccaggtgccccttcccacctcaagtagcagatcagcctcaagtaggagatcagcctcaagtaggggaatgtaaagccaccagccaggcacaggccgaaggccacaactttcccttgctccttggagaccccagggcaggaggccaggtgatggggcttttagtgtcatcctctcaacccagaatggctcattctctctctgcttgcaccggcacccagaaggcaagctgcggtcactgttttcctttattcctccgccctctcgcttcctttcttatttttaaagaaaatagtcccctcctaataggagaccagctgcggcggtctctggccgcccagcgtgctcagcaaagcatgcgggtccttggaaccccttttccgggaaggcggctgccaccaggcaaattctcaaactgcctagctgcgagtgagggacctgtagtggggcctccgaatgcaatagccgaggaggaggggaagggatcccgctttacaaactctcagacacatgttactactcaaactaagcagcagacgcggtggccgctgcagtcttttcggcaactaggccgcttagccccagctgtgctcggtttctggggtccctgtcctgctctgtcactccccacgcctgggctaaggaccaccaaggaggtccggaaggggatttcgaacttccaagtggcccaggagaagtgaacgcttctccttctttttcaagcctcccgcccagccctgccggctcggcctgggcgctgtggaccggtaacagcagttccaccaggatgcaggccggactaagctcctggggaaaacccgttgcaataattgtttttcacacacaacttccaacccttcccccatttccgcctccaattcggagacttgcaaagcccaagaaagggaaaagcaactctatctttgatcttctcatccaaagttaaaataat

SEQ ID NO: 13857 - DNA, 1367 bp, Homo sapiens
  source 1..1367: mol_type = unassigned DNA
ctttttggtgtaaatctggactctaattctgtaatatatcaaggaatctcgtaaaaccgacactaaaacgtccctgcctacaaatcatccggccaaattatgagttcattgtattatgcgaatactttattttctaaatatccagcctcaagttcggttttcgctaccggagccttcccagaacaaacttcttgtgcgtttgcttccaacccccagcgcccgggctatggagcgggttcgggcgcttccttcgccgcctcgatgcagggcttgtaccccggcggggggggcatggcgggccagagcgcggccggcgtctacgcggccggctatgggctcgagccgagttccttcaacatgcactgcgcgccctttgagcagaacctctccggggtgtgtcccggcgactccgccaaggcggcgggcgccaaggagcagagggactcggacttggcggccgagagtaacttccggatctacccctggatgcgaagctcaggaactgaccgcaaacgaggccgccagacctacacccgctaccagaccctggagctggagaaagaatttcactacaatcgctacctgacgcggcggcggcgcatcgagatcgcgcacacgctctgcctcacggaaagacagatcaagatttggtttcagaaccggcgcatgaagtggaaaaaggagaacaagaccgcgggcccggggaccaccggccaagacagggctgaagcagaggaggaagaggaagagtgagggatggagaaagggcagaggaagagacatgagaaagggagaggaagagaagcccagctctgggaactgaatcaggaaactcaaatcgaatagggaagtaaaaaaacaaaacaaaaaacaaaaaaaacaaaaaaaaaaccctatttaaatgaaaggagtttaaaaacattttttaaggagggagaaaggagaaattttggtttttcaacactgaaaaaatactacctataggaaagtctgtcaggtttggtttttttgtacaatatgaaaaggatattatctacctgttctgtagctttctggaatttacctccccttttctatgttgctattgtaaggtctttgtaaaatcttgcagttttgtaagccctctttaatgctgtctttgtggactgtgggtctggactaaccctgtggttgcctgccctcctgagcctccgccttcccagcagcggcaccaaggggccttagggagccccaaaacctaccactcgcgtgttccccaagcgcctggctgctgcttcttgcttcccgtcccccagccccatgctcccttttacattctgtgtgtatctaaaggatggaaaaataaaacgcaattaaaaataaacaga

SEQ ID NO: 13858 - DNA, 475 bp, Homo sapiens
  source 1..475: mol_type = unassigned DNA
gcggccgctggctccgcaccttccgacggccgcgcactgccggcaccgccgccgcccaggaactgaccgcaaacgaggccgccagacctacacccgctaccagaccctggagctggagaaagaatttcactacaatcgctacctgacgcggcggcggcgcatcgagatcgcgcacacgctctgcctcacggaaagacagatcaagatttggtttcagaaccggcgcatgaagtggaaaaaggagaacaagaccgcgggcccggggaccaccggccaagacagggctgaagcagaggaggaagaggaagagtgagggatggagaaagggcagaggaagagacatgagaaagggagaggaagagaagcccagctctgggaactgaatcaggaaactcaaatcgaatagggaagtaaaaaaacaaaacaaaaaacaaaaaaaacaaaaaaaaaaccctatttaaatgaaaggagttta

SEQ ID NO: 13859 - DNA, 3437 bp, Homo sapiens
  source 1..3437: mol_type = unassigned DNA
gctctctcctcactccctggcgctctctcgctctagctctctctctcgctcgctctctctcgctctcaccctcgctctgcgttctgtccgggaggagtacgaagaagccaataggatgcggggtctctaatggatgcaaatgatcatgaaaagacagtgcaaaatatgaaacaactcatttgcagggaagtaaatcaccgaaaactgtttatgaactggcatcccttcttcgaaatgtaaagcgaggacctctttaagtggtggtatatttttgtttggggggtggggggtggggggagggcgagcgagccgcggctgccatgcaagcttagacttttggaggcttctctgtccttttctattcctggaaaccacaaaaagtgtgtcggcttcgagatcttcttcgccttttctttcttttctttttttccctcctctctttccctctcctttcctggcgagggtgactaggagccggcgaatccgcgtttttttctctctctccctccctttccccctccccaccccctccccaacagcccccaactatagcctccgccgccgccgccgcctcaaaattcaataaaatgagctcttatttcgtcaactcactgttctccaaatacaaaaccggggagtccctgcgccccaattattatgactgcggcttcgcccaggacctgggcggccgacccaccgtggtgtacggtcccagcagcggcggcagcttccagcacccgtcgcaaatccaggagttctaccacgggccgtcgtcgctgtccacggctccctaccagcagaacccgtgcgccgtggcgtgccacggggaccccggcaatttctacggctacgacccgctgcaacgccagagcctattcggtgcgcaggatccagacctggtgcagtacgcagactgcaagcttgccgccgccagcggcctgggcgaggaggccgagggctccgagcagagcccgtcgcccacacagctcttcccctggatgcgcccgcaagcagccgccggacgcaggcgaggccgacagacctacagccgctaccagaccctggagctggagaaggagttcctatttaatccctatctgactcgtaagcggcgaatcgaggtatcgcacgccctgggactgacagagagacaggtcaaaatctggttccagaaccggaggatgaagtggaaaaaagagaacaacaaagacaagttccccagcagcaaatgcgagcaggaggagctggagaaacagaagctggagcgggccccagaggcggcggacgagggcgacgcgcagaagggcgacaagaagtaggcttcagctgggactgccagggccgcggccgcccgcacgtccgcgggtcccggccgcgccgccgccgcgcgcccctgcccgagagagctctggccccgctagcggggccaggagccgggcctcccaccgcagcgtcccccgccgcgccagtccccgctagtggtagtatctcgtaatagcttctgtgtgtgagctaccgtggatctccttcccttctcttgggggccggggggaaagaaaaggatttaagcaaaggctccctcgccctgtgagggcgagcggcaaaggcccggctgagccccccatgcccctcccctccccgtgtaaaaagcctccttgtgcaattgtcttttttttcctttgaacgtgcttctttgtaatgaccaaggtaccgatttctgctaagttctcccaacaacatgaaactgcctattcacgccgtaattctttctgtctcccttctctctctctctctcgctcgctcgctctcgctctcgctctctctcgctgcgtcctcatttcccctcccaatcctctctcccctctgcaaccccccagctcgctggctttctctctggcttctctcttttcctcctccacccaccccctttggtttgacaattttgtcttaagtgtttctcaaaagaggttactttagttagcatgcgcgctgtgggcaattgttacaagtgttcttaggtttactgtgaagagaatgtattctgtatccgtgaattgctttatgggggggagggagggctaattatatattttgttgttcctctatactttgttctgttgtctgcgcctgaaaagggcggaagagttacaataaagtttacaagcgagaacccgagactggcccggccagcgctcctcatttgctcccgggtgccttgcagagccggtggggagcctgtcaccgggctcctgcgcctgctgaggctaggctgcagagaggagggggcgggggctggaggcaggtggtgcgagtccctcggcccaggggcgctgggggtgagggaggcggctgagcctgattggaggagagaaaaacgagggaggggagccaagagaaaccccctcctctcgcgttccgaggctgcccggccagggaggccagggcgcccaggccacgctggagacctgcggctgggctggtggctgtgtcccccgccacctccctctttgttttgctgtgtgtcctcccaagatgtgtgtcgggaggtggggtggggggcaggcataaaggtggagtgcaggcctgctgagcatactttttttccctcggactgttgttgttgggggagcaggaggagaagggagaccgctcttccctgcctctccctctcagggacttggccaccttcgctctgttctgaggccatggctctctgccttccttccttcgctgcctctgcttctctggtagtcacgctccactgaggcatccgcctccgggaaccgggagagcagcgcgcccgggccaacctccacccttcctttctctccccaccctcccaaccccctttttcttttactttcaaacctttttttttctttttctttctttctttctttttttttttgccaccagaaacggcagcgtccaaggcccgtgggctggatcctgtgccctaggagcacctaggaagacttgctccatctccgcccgcatatctggggcaccaagagagacagagtcgtgagccaggctcgcctcattcctcgtcttgggagaaccggaccaacttccccaaaaggccttgccgtgcagaattggcctggtttaataaagaacagacctgccccaagcacccacccacccagttgcgtgcattcaatccctgcgtttgtctctcgctcggtaacgggctgaagaggatgggtggagggtgacacggatcgccccgaggttatttattttcccttccactcaatctcttcctccccaaatctcgcctgcaagcggcctccagcccgcgggagtcggcagcggcccttgagcccccagccccaatccacagggctcggctttcccattcattattgatcatattttataaatccaacgccacacaattttttccacattaccgggagccgtggggagacggc

SEQ ID NO: 13860 - DNA, 2705 bp, Homo sapiens
  source 1..2705: mol_type = unassigned DNA
aatcattttgcaaggagagctgagacgggctgctccactgtactttgttggctgagaagttgagcagggggtgggggtgggagggtggggggctgggggggtcgcgtccgaaagccctcacaccggtccgggtgccacctctccctgcttgggcgccgccgcgcgagcgcttcccttccccctgcaagcgcccggataatgtctgagaatgtccatttctgggacgcttagcagctattatgtcgactcgatcataagtcacgagagtgaggacgcgcctccagccaagtttccttctggccagtacgcgagctcgcggcagccgggccacgcggagcacctggagttcccctcgtgcagcttccagcccaaagcgccggtgttcggcgcctcctgggcgccgctgagcccgcacgcgtccgggagcctgccgtccgtctaccacccttacatccagccccagggcgtcccgccggccgagagcaggtacctccgcacctggctggagccggcgccgcgcggcgaagcggccccggggcagggccaggcggcggtgaaggcggagccgctgctgggcgcgcctggggagctgctcaaacagggcacgcccgagtacagtttggaaacttcggcgggcagggaggccgtgctgtctaatcaaagacccggctacggggacaataaaatttgcgaaggaagcgaggacaaagagaggccggatcaaaccaacccctccgccaactggctgcacgctcgctcttcccggaaaaagcgctgtccctacaccaaataccagacgctggagctagagaaggagtttctgttcaatatgtacctcaccagggaccgtaggcacgaagtggccagactcctcaatctgagtgagagacaagtcaaaatctggtttcagaaccggcggatgaaaatgaagaaaatgaataaggagcagggcaaagagtaaagattaaagattacccccagtcctccctagctcttccccatctcactcttagttatgtgacgactgcaaagccagtgctgtctgggatgtattcaagtgaatggggaagggagtctctcttccaagtcctttatctgcacctagaacctccctcctttcctttgcccttacctgtctctctcttctctctaggtgtcaggagaaagttttgttgatttagaagatagaaatagttggttcctaagaatgtgatgggccacaaggaaagagagaccccagtcaagctcctagtatgccctgtaatttttctgggaagtcctagcccctcacttccagcttgcctgtttcttctctacacccacccaaaagtcacccagggacactccaactctacacagctcagcagacatccacacacagtaatggggtgagctcacaaccaccattcagtcaagtgaggtgacactccagttgcagaccatcgcacaccaaatttggcaaaacagccctcagactgtcaggcaagcccgggttctacccctaatgcaaatacccaccagggagatgtctagaggcagactcctgagtgaggtgttgcagcccaaaggctgcagcattgccataccattcccatggagttgccaactattctcaggccaagggccatggggaagatggagcaaacctagcccccaagccggtgggctagaaagtacaagaaaaggcagcacgtggttttatgaagctatcttaggtggagctactccccacctcccaccaacatatacattttgttgcaggaaatgtttaattccgcatgatgtttccctctccttccaacaaaagaaggtcaaactgtgggtcgtagagccttgacaatgttgtcctcctgttcatctgtgcaccacttgacagactgtagcttctcttgctctcgaccggccctgcattcttccgcaccctccctagctctgaaatcaactctcttcggtcgtatccaccttgcacccgcaagtcaagccgccccttgtagaaaaatccctccaccttccgttccccgctaggtcaaccccactgtagacaggaaagccaggccaggagagtccgaatgagaatttattgtgaatcgattcccaagctcccttccgggacaagtggtctgggacagggaggagcaacggccccagcgcgcaacgctctgcgcgttcctccgaatcccgtcggcttctcgacccacgcagagaagccccgggcttggcggctctagccccagcgccaaaggagacccgccccagggccgggcttggcctcctgcttcatgggcctggatgcagatctgcgtggctggtgcgtgcgcgcgcttctgggaaacagtcccgcgtgcaaaggaaaggggcaaaatggcacctaagcatcagatggaagcttactctctgcttccgttcctccccctgctcccctacttctcagtccccttcaatttgtagactcttgctcctgcttctcctgatcctgcaaggggacattccagtagaagttttttgctttgtcggtggctgtcgtgaaattgtgcttgtgtttcgtgatttctttgggggtgattgtctcgcttgttttcagttgtcgattatatgggagggttctgggtgggagtggggagggcgaggggcctagagctctaattgtttgttttggaagaaaaaaagaaaaagaacaaaaaatatatatcactctagaaaataaa

SEQ ID NO: 13861 - DNA, 2516 bp, Homo sapiens
  source 1..2516: mol_type = unassigned DNA
acaccggtccgggtgccacctctccctgcttgggcgccgccgcgcgagcgcttcccttccccctgcaagcgcccggataatgtctgagaatgtccatttctgggacgcttagcagctattatgtcgactcgatcataagtcacgagagtgaggacgcgcctccagccaagtttccttctggccagtacgcgagctcgcggcagccgggccacgcggagcacctggagttcccctcgtgcagcttccagcccaaagcgccggtgttcggcgcctcctgggcgccgctgagcccgcacgcgtccgggagcctgccgtccgtctaccacccttacatccagccccagggcgtcccgccggccgagagcaggtacctccgcacctggctggagccggcgccgcgcggcggagctgctcaaacagggcacgcccgagtacagtttggaaacttcggcgggcagggaggccgtgctgtctaatcaaagacccggctacggggacaataaaatttgcgaaggaagcgaggacaaagagaggccggatcaaaccaacccctccgccaactggctgcacgctcgctcttcccggaaaaagcgctgtccctacaccaaataccagacgctggagctagagaaggagtttctgttcaatatgtacctcaccagggaccgtaggcacgaagtggccagactcctcaatctgagtgagagacaagtcaaaatctggtttcagaaccggcggatgaaaatgaagaaaatgaataaggagcagggcaaagagtaaagattaaagattacccccagtcctccctagctcttccccatctcactcttagttatgtgacgactgcaaagccagtgctgtctgggatgtattcaagtgaatggggaagggagtctctcttccaagtcctttatctgcacctagaacctccctcctttcctttgcccttacctgtctctctcttctctctaggtgtcaggagaaagttttgttgatttagaagatagaaatagttggttcctaagaatgtgatgggccacaaggaaagagagaccccagtcaagctcctagtatgccctgtaatttttctgggaagtcctagcccctcacttccagcttgcctgtttcttctctacacccacccaaaagtcacccagggacactccaactctacacagctcagcagacatccacacacagtaatggggtgagctcacaaccaccattcagtcaagtgaggtgacactccagttgcagaccatcgcacaccaaatttggcaaaacagccctcagactgtcaggcaagcccgggttctacccctaatgcaaatacccaccagggagatgtctagaggcagactcctgagtgaggtgttgcagcccaaaggctgcagcattgccataccattcccatggagttgccaactattctcaggccaagggccatggggaagatggagcaaacctagcccccaagccggtgggctagaaagtacaagaaaaggcagcacgtggttttatgaagctatcttaggtggagctactccccacctcccaccaacatatacattttgttgcaggaaatgtttaattccgcatgatgtttccctctccttccaacaaaagaaggtcaaactgtgggtcgtagagccttgacaatgttgtcctcctgttcatctgtgcaccacttgacagactgtagcttctcttgctctcgaccggccctgcattcttccgcaccctccctagctctgaaatcaactctcttcggtcgtatccaccttgcacccgcaagtcaagccgccccttgtagaaaaatccctccaccttccgttccccgctaggtcaaccccactgtagacaggaaagccaggccaggagagtccgaatgagaatttattgtgaatcgattcccaagctcccttccgggacaagtggtctgggacagggaggagcaacggccccagcgcgcaacgctctgcgcgttcctccgaatcccgtcggcttctcgacccacgcagagaagccccgggcttggcggctctagccccagcgccaaaggagacccgccccagggccgggcttggcctcctgcttcatgggcctggatgcagatctgcgtggctggtgcgtgcgcgcgcttctgggaaacagtcccgcgtgcaaaggaaaggggcaaaatggcacctaagcatcagatggaagcttactctctgcttccgttcctccccctgctcccctacttctcagtccccttcaatttgtagactcttgctcctgcttctcctgatcctgcaaggggacattccagtagaagttttttgctttgtcggtggctgtcgtgaaattgtgcttgtgtttcgtgatttctttgggggtgattgtctcgcttgttttcagttgtcgattatatgggagggttctgggtgggagtggggagggcgaggggcctagagctctaattgtttgttttggaagaaaaaaagaaaaagaacaaaaaatatatatcactctag

SEQ ID NO: 13862 - DNA, 1936 bp, Homo sapiens
  source 1..1936: mol_type = unassigned DNA
tcccggatggggaaaaaaaaagatgtcagctcctccgctgtagtattgctccttaaaaacccctctctctgaaaatgacatgccctcgcaatgtaactccgaactcgtacgcggagcccttggctgcgcccggcggaggagagcgctatagccggagcgcaggcatgtatatgcagtctgggagtgacttcaattgcggggtgatgaggggctgcgggctcgcgccctcgctctccaagagggacgagggcagcagccccagcctcgccctcaacacctatccgtcctacctctcgcagctggactcctggggcgaccccaaagccgcctatcgcctggaacaacctgttggcaggccgctgtcctcctgctcctacccacctagtgtcaaggaggagaatgtctgctgcatgtacagcgcagagaagcgggcgaaaagtggccccgaggcagctctctactcccaccccttgccggagtcctgccttggggagcacgaggtacccgtgcccagctactaccgcgccagcccgagctactccgcgctggacaagacgccccactgttctggggccaacgacttcgaagcccctttcgagcagcgggccagtctcaacccgcgcgccgaacatctggaatcgcctcagctggggggcaaagtgagtttccctgagacccccaagtccgacagccagacccccagccccaatgaaatcaagacggagcagagcctggcgggccctaaagggagcccctcggagagcgaaaaggagagggccaaagctgccgactccagcccagacacctcggataacgaagcgaaagaggagataaaggcagaaaacaccacaggaaattggctgacagcaaagagcggaaggaagaagaggtgcccctatactaaacaccagacgctggaattggagaaagaatttctgttcaatatgtatttgacgcgagagcgccgcctggagattagcaagaccattaaccttacagacagacaagtcaaaatctggtttcaaaatcgcagaatgaaactcaagaaaatgaaccgagagaatcggatccgggaactgacctccaattttaatttcacctgagagcgcggcctctcctcctcccttcccgctccttcctctccccgcccctcctccctttgtgcctggtgatatatttttttttcctccctgagtataaatgcaatgcgactgcaaaaaaggcaaagacctcagactctccttccaagggacctgtggttcgtgctgcgaagatgcttccacttaaagcatgagaaatggggtgccgggatgtggggtgtggtgtgtgccctcatagatgggggtgggagtgtggctggtgtgtgtgtcaagccctcactcacccacgcactcacacacagcattctgttctccatgcaaagttaagatcgaatccatccgcttgtaggggaaaaaaaggaaaaaaattaaccagagagggtctgtaatctcgcagagcacaggcagaatcgttccttccttgctgcatttcctccttagactaatagacgttttggaaagttcggctagtgttcgtgtgtttgtcgtagcacccagagcctccaccaaaccctctccatgtctttacctcccagtcgctctaagaatctgcttgaagtctcgtatttgtactgctttctgcttttctcccacccctcctagcacccccacatcccccatctagtaacatctcagaaatttcatccagaggaacaaaaaaattaaaaatagaacatagcaaagcaaagacagaatgcccccccccccaaatattgtcctgtccctgtctgggagttgtgttatttaaagatattctgtatgttgtatcttttgcatgtagcttccttaatggagaaaaaaaaacctaataaatttccagaatcataatcctcaaa

SEQ ID NO: 13863 - DNA, 3261 bp, Homo sapiens
  source 1..3261: mol_type = unassigned DNA
gtgctcagagagagagagactaagacggataacgcgtcatctcgccttcccaaattttcccccctcgctagaccgggtccaaaacctccatccggagccggcaggagaggagaacgatgtttaactcggtcaacctgggcaacttctgctctccgtcgcgcaaggagaggggcgcagatttcggcgagcgagggagctgcgcctccaacctctatctgcccagttgcacttactacatgcccgagttctccacggtctcctccttcctgccccaggccccctctcgtcagatctcctatccctactcggcccaagtgcccccggtccgggaggtctcctacggcctggagccatccggcaagtggcaccatcggaacagctactcctcctgctatgcggcggccgacgagcttatgcaccgggagtgcctgcctccttccaccgtcaccgagatcctcatgaaaaacgaaggctcctacggcggccaccaccaccccagcgccccgcacgcaacccccgccggcttctactcctcagtcaacaagaacagcgtcctgcctcaagccttcgaccgtttcttcgacaacgcctactgcggtggcggcgacccgcccgccgagcccccctgctccggcaagggcgaggccaagggggagcccgaggcacccccggcctcgggactggcgtcccgggctgaggcgggtgccgaggcggaggctgaggaggagaacacaaatcccagctcgtccggttcagcccactccgtggccaaggagccggccaaaggagccgcccccaacgccccccgcacccgcaagaagcgctgcccttattcgaaattccagatccgggaactggagcgagagtttttcttcaacgtgtatatcaacaaagagaagcggctgcagctgtcccggatgctgaacctgacggaccgacaagtgaaaatttggtttcagaacagaaggatgaaagaaaagaaactgagcagagaccggctgcagtatttctcgggaaatcctctgctgtaacctgcagaccgggcccttttgggggcggggggaggggaaaattattttattttatttttattttttattttctaactcgtcttctttccgccggtggaaaactggactgtggccagggctggcccccaccgctgtggccggcactccattccggaacctcctggaccctctatctgactctcgctgtgggacagggaccgggcctggaaagggggtgaagggaagtgtctgatgcacggcgagtgaacaccgttggcgccgaggccaagactttgatttaaaagaaaacacacctcggcgacaatgtcttgctgctcggattaggtgggggaggggcgacagtagtgagcgcctgagccgaacaatcctcgaactaaaagccttcccttgcccatgtgaaaagatccgctaagacagcatgtctgccagcggaaacttctcgagctcccccctctaccccgccccaccttgcagctaaatgtgatcctgccttgctgtgaaatttctgtaccttcaacctggtgttaggtgtgcaaagtccgtgtcctacctccgtcttcgccaaggccccgcccgagcctagttgttctccccctgaatgtgtagaaccttcctttgaaatttcttaatcggtgcattgaggtttccacatctttttccaagcagtgccccacttcatggatttatagctatagtctatgcagtcgttacctcttttttttttttttttaagaaaattgaagattggggtggtggaggcagtagggagatgggattgggcacctcccccgtgctggggcctggatttttgtaaataaatttcccaagcgtttctttccacctggagggaaagggggggacgcccccagtgagattcaaatcacgcatctctactcctctgcgtgagtgcgtgtgtacatgtgcactccccaccctgctcccttcccagagggattgctgtgaaatttttttggtggcaaataaagataaatttcattctgttcaatattatgattttatttgacccttttattaacccctctcctcttaaaatcctccatgctcccatggcagcggcggaggaggaggaggcaggcaggcagagcccagcgggtgaggacaggcaggcagaggtgagataggccggtgctagccggcctggagctcctctccgctggcagggccaagagtatggccgtagtctcctcacattctcaagctgaggacattccatagctactctgaagctctcctttctcacgtgcagctcgagctgtgtccaaacgcccagcaacggctttctgtttaagtacacgtttgttgtggagttaattgtaaccatcatcgaatttaaatttataggaatttttttggctccaccgcccttctgccagatgtctccgtctgtcgcagttaaatgtgtagtgtggaggttagggcttttttttttttttctctaggagaaatctgtattggaatttttatacactgtttttaaggaaggaggggacagaaggagaaaccagccccctccctctcctctccacagctcctgggggtgggaaggtggggcctggctgctttccctctggcacaaatggccaggctcttccagacacaacaagacgcctatactggggccaccctgatgtttatacattgggtgtcccacagtagaaagccccagaggtttgttttgtaggggttggcactggggatggagatgacctgcggggacagtcaccatacccatctatatttgctgcatgtttcttctgtataaagataatcatggcccttgcagtgctttcagtgagggcacttcgttggtctctgtttcaaattcgttatttgggggcagaggttcaggacaactcatctcatctttccctcctctttctgtctttgtataattcaaagaaaatatttttgtcaatacaattctgttggatgaaaggaaaaagcatcatgactatcaaatctaggttctgtcatttttgatggtaggaatccctgcagcttaggtatctaaatttctaatttgtaaacgtgggtcgggtcgtgagacaagatttgcaaactagggtgtatatgcagcccacaattccctcatgtgcccacacacaaacgttttatttaactcggtgtgcctatgggtgcacataagaaggaatattatttatatgcttttgtctgttgcatggagtaaacctgaccacatacacatcta

SEQ ID NO: 13864 - DNA, 1041 bp, Homo sapiens
  source 1..1041: mol_type = unassigned DNA
cgtgagtggggcggccaatgggtgactggtgcagatttaactatgtttaatgtcagatagcaataaagtagaagctgccggtcgggccccgcggaaatgggcgagcataatctcctgaatcccgggtttgtggggccgctggtaaacatccacacgggagacaccttctacttccccaacttccgcgcgtccggggcgcagcttcccgggctgccttcgctgtcctacccacgccgcgacaacgtgtgctccctgtcctggccgtcggcggagccgtgcaatggctacccgcagccctacctcggcagcccagtgtctctcaaccctcccttcggccgcacgtgcgagctggcgcgcgtggaggacggcaagggttactaccgcgagccgtgcgccgagggtggcggcgggggcctgaagcgtgaggagcgcgggcgcgacccgggagccgggcccggggcagcgctgctcccgctggagccgtcggggccgcctgcgctcggcttcaagtacgactacgcggcgggcggcggcggtggcgacggcggcggcggcgcaggacctccgcacgacccgccctcctgccagtcgctggaatccgactccagttcgtccctgctcaacgagggcaacaagggcgccggcgcaggcgaccccggcagcttggtatcgccgttgaaccccggcggcgggctctcggccagcggcgcgccctggtacccgatcaacagccgctctcggaagaagcgcaagccctattcgaagttgcaactggcagagctggagggcgagtttctggtcaacgagttcatcacacgccagcgccggagggaactctcagaccgcttgaatcttagtgaccagcaggtcaagatctggtttcagaaccggagaatgaaaaagaaaagacttctgttgagggagcaagctctctccttcttttaaggtgcaggacacgggcgccagccccagactgagcctgtccctggcagagagcaaaagagggcgccgcctagaacacagtccccacttagaacgcca

SEQ ID NO: 13865 - DNA, 2437 bp, Homo sapiens
  source 1..2437: mol_type = unassigned DNA
agggaatgtagggagggaggtggaagcactaggaggaggggaggggtggagagaaaagaggggagggatggggggaggggaaacaggagcgaggtgtctccctagctcgctgcctctggcaagtggagtttttaaaaagctccagcagatcatgtcatgacgacttcgctgctcctgcatccacgctggccggagagccttatgtacgtctatgaggacagcgcggcggagagcggcatcggcggcggcggcggaggaggaggcggcggcacgggcggagcggggggtggctgcagcggagcgagccccggcaaagccccgagcatggatggtctgggcagcagctgcccggccagccactgccgcgacctgcttccgcaccccgtgctgggccgcccgccggctcccctgggcgcccctcagggcgccgtctatacggacatcccggccccggaggcggcgcgccagtgtgccccgccgcccgcaccccccacctcgtccagcgccaccctgggctacggctaccccttcgggggcagctactacggctgccgcctgtcgcacaacgtgaacctgcagcagaagccttgcgcctaccacccgggcgataaatacccggagccgtcgggcgccctgcccggtgacgacctgtcctctagggccaaggagttcgccttctaccccagcttcgccagctcctaccaggcgatgcccggctacctggacgtgtcggtggtgcccgggatcagcgggcacccggagccgcgtcacgacgccctcatccccgtcgaaggctaccagcactgggctctctccaatggctgggacagtcaggtgtactgctccaaggagcagtcgcagtccgcccacctctggaagtctcccttcccagacgtggttcccctgcagcccgaggtgagcagctaccggcgcgggcgcaagaaacgcgtgccctacactaaggtgcagctgaaggagctagagaaggaatacgcggctagcaagttcatcaccaaagagaagcgccggcgcatctccgccaccacgaacctctctgagcgccaggtaaccatctggttccagaaccggcgggtcaaagagaagaaggtggtcagcaaatcgaaagcgcctcatctccactccacctgaccacccacccgctgcttgccccatctatttatgtctccgctttgtaccataaccgaacccacggaaagacgctgcgcgggtgcagaagagtatttaatgttaaggaaagagaagaaccgcgccgcccggaggcagagaggctccatggccgtgctgctgggccatccccaactccctatcccatccccagcctccacccccatccagatgggactcacgtggcttcaacagctttggaaatgggtcccgagtgggccgtgcgaggaaggctgtcgacctctactcctccttgcgctcaccttgccagaaagtctggtggcagcgcagagcccaatcattccaaccaaagcagggttggggaatcccgaatggccccaattcttgcctcatcctatgaccaggcttttagaggaccttccctaagggcgcagcttcggagcaggatctgtccagctcatactttccttcgctgtccctcccgcactccttaggcaagatttcccagtaaagattttctgtgcgtattttaaaagtcgtgttaatactcatgataattattagggacctggcagcgtgattggagtatggatgtttccgtaaaagctggaattccgtaaaagcattgacgcagcccctacactccatcccaaccaagaaactgcatttcctggggccaggtgggagctgcctttgccccactgcctcccctgttctgctctctcagtcaacatgtggaaatccaaggaggacaaagactccagccacgctgctaaatagggctcctctctcctctctctctctctaggtggtaaggttggggattagtccaggtacagaagcagaacttttttctaaggataaacatctcttccaaggggatggagagtgggtccctcaacaaagtccctgtccagtcacctttccatcagggcactagcccaggaatgactcctcacactttcacctttactgatttccagaggaaagctagaggatctagttcaagaggcaagaagatctggccctcaattagctagatgtagatgctgcctaacagttccctcctcaaaggccaccttggtgctgtgggggccccttgcctcttcccttcccactggtgcattacaaaacagtgttcttttgaaatgttcatcaggaataggcttttttaaaaaatgttgtgtatctgtatatagtattgtgatgtctgaatgacaatgtactgaatgcaaaaaggaaaaaaacccacaaacatgtttttaaaataaaatatctttttttgccttga

SEQ ID NO: 13866 - DNA, 1524 bp, Homo sapiens
  source 1..1524: mol_type = unassigned DNA
acctgccctgggcgctcccttcattagcagtattttttttaaattaatctgattaataattatttttcccccatttaattttttttcctcccaggtggagttgccgaagctgggggcagctggggagggtggggatgggaggggagagacagaagttgagggcatctctctcttccttcccgaccctctggcccccaaggggcaggaggaatgcaggagcaggagttgagcttgggagctgcagatgcctccgcccctcctctctcccaggctcttcctcctgcccccttcttgcaactctccttaattttgtttggcttttggatgattataattatttttatttttgaatttatataaagtatatgtgtgtgtgtgtggagctgagacaggctcggcagcggcacagaatgagggaagacgagaaagagagtgggagagagagaggcagagagggagagagggagagtgacagcagcgctcgcgggggctcaacccccagacctccagaaatgacgtcagaatcatttgcatcccgctgcctctacctgcctggtccagctgggaccctgcctcgccggccgcatggccagagggttggaaattaatgatcatgagctcgtatttgatggactctaactacatcgatccgaaatttcctccatgcgaagaatattcgcaaaatagctacatccctgaacacagtccggaatattacggccggaccagggaatcgggattccagcatcaccaccaggagctgtacccaccaccgcctccgcgccctagctaccctgagcgccagtatagctgcaccagtctccaggggcccggcaattcgcgaggccacgggccggcccaggcgggccaccaccaccccgagaaatcacagtcgctctgcgagccggcgcctctctcaggcgcctccgcctccccgtccccagccccgccagcctgcagccagccagcccccgaccatccctccagcgccgccagcaagcaacccatagtctacccatggatgaaaaaaattcacgttagcacggtgaaccccaattataacggaggggaacccaagcgctcgaggacagcctatacccggcagcaagtcctggaattagagaaagagtttcattacaaccgctacctgacccgaaggagaaggatcgagatcgcccactcgctgtgcctctctgagaggcagatcaaaatctggttccaaaaccgtcgcatgaaatggaagaaggaccaccgactccccaacaccaaagtcaggtcagcacccccggccggcgctgcgcccagcaccctttcggcagctaccccgggtacttctgaagaccactcccagagcgccacgccgccggagcagcaacgggcagaggacattaccaggttataaaacataactcacacccctgcccccaccccatgcccccaccctcccctcacacacaaattgactcttatttatagaatttaatatatatatatatatatatatatataggttcttttctctct

SEQ ID NO: 13867 - DNA, 1666 bp, Homo sapiens
  source 1..1666: mol_type = unassigned DNA
agaaaaacgacaaagcgagaaaaattattttccactccagaaattaatgatcatgagctcgtatttgatggactctaactacatcgatccgaaatttcctccatgcgaagaatattcgcaaaatagctacatccctgaacacagtccggaatattacggccggaccagggaatcgggattccagcatcaccaccaggagctgtacccaccaccgcctccgcgccctagctaccctgagcgccagtatagctgcaccagtctccaggggcccggcaattcgcgaggccacgggccggcccaggcgggccaccaccaccccgagaaatcacagtcgctctgcgagccggcgcctctctcaggcgcctccgcctccccgtccccagccccgccagcctgcagccagccagcccccgaccatccctccagcgccgccagcaagcaacccatagtctacccatggatgaaaaaaattcacgttagcacggtgaaccccaattataacggaggggaacccaagcgctcgaggacagcctatacccggcagcaagtcctggaattagagaaagagtttcattacaaccgctacctgacccgaaggagaaggatcgagatcgcccactcgctgtgcctctctgagaggcagatcaaaatctggttccaaaaccgtcgcatgaaatggaagaaggaccaccgactccccaacaccaaagtcaggtcagcacccccggccggcgctgcgcccagcaccctttcggcagctaccccgggtacttctgaagaccactcccagagcgccacgccgccggagcagcaacgggcagaggacattaccaggttataaaacataactcacacccctgcccccaccccatgcccccaccctcccctcacacacaaattgactcttatttatagaatttaatatatatatatatatatatatatataggttcttttctctcttcctctcaccttgtcccttgtcagttccaaacagacaaaacagataaacaaacaagccccctgccctcctctccctcccactgttaaggacccttttaagcatgtgatgttgtcttagcatggtacctgctgggtgtttttttttaaaaggccattttggggggttatttattttttaagaaaaaaagctgcaaaaattatatattgcaaggtgtgatggtctggcttgggtgaatttcaggggaaatgaggaaaagaaaaaaggaaagaaattttaaagccaattctcatccttctcctcctcctccttccccccctctttccttaggccttttgcattgaaaatgcaccaggggaggttagtgagggggaagtcattttaaggagaacaaagctatgaagttcttttgtattattgttgggggggggtgtgggaggagagggggcgaagacagcagacaaagctaaatgcatctggagagcctctcagagctgttcagtttgaggagccaaaagaaaatcaaaatgaactttcagttcagagaggcagtctataggtagaatctctccccacccctatcgtggttattgtgtttttggactgaatttacttgattattgtaaaacttgcaataaagaattttagtgtcgatgtgaaatgccccgtgatcaataataaaccagtggatgtgaattagtttta

SEQ ID NO: 13868 - DNA, 1805 bp, Homo sapiens
  source 1..1805: mol_type = unassigned DNA
ggttgggctttgccaacatatcgagatgcttttcgccggcttccatcactaacctcccggaggtcatcaagccaaatttatgagtggccgctcgagtcacgtgactctatttaaggctcccttatttgggaagagcgcataggataaagaaagagatatctccacctataaattgtccactttggagaacaaaaaacccctcaacttcaaagagtcacaaatcacccttaatcaaaaagggtgcagaaatttttttgggccctccccgccatgagctcctacgtagccaattcattctataagcagagccccaatatccctgcctataacatgcaaacttgtgggaactatggatcggcctcagaggtgcaggcatccaggtactgctacggcggattggacttaagcatcactttcccaccgcctgcgccttccaactctctccacggggtagacatggctgccaacccccgggctcaccccgaccgccccgcctgcagcgccgcggccgctccgggacacgctccgggcagagacgaagcggctcctctgaaccccgggatgtacagtcagaaggcggctcgcccggcgctggaggagcgagctaagagcagtggggagatcaaagaggagcaggcgcagacagggcagcccgccggactgagccagccaccggccccgccacagatttacccgtggatgaccaaactgcacatgagccacgagacggacggcaagcggtcccgaaccagttacacgcgctaccagactctggaactcgagaaagaattccactttaaccgctacctcactcgccgcaggcgcatagagatcgccaacaacttgtgtctcaatgagagacagatcaagatctggttccagaaccgcaggatgaagtggaagaaagattccaaaatgaaaagcaaagaggctctttagaggcagcgggggaggcccgcagagcgcgcccctagccggttcctgtccctgcgcctttccttttcgcctttcctctctatatttcgggtcgggggcaggtgctggagcactgggctcccgggccccacagacaaaagcgcttttccttggcattccgcatccctaccgacccagggttcccgcggggctgtcggcgctgccccatctcccctcagctcggctcagctcggtacccggggcccagggcaagctccgcaggacttccccggagggctgcggcgtacaggctggcgcagaacgaaccttggcctgggccgtatctccggctcccagcctcagcgcggccctcccgagttaaggtgggcccggcccgcgccacaggaccctcgccggaccctctaacctcgccctctcctttgttcccggctggacgggttagacagccaaaggctggcgagagtctggccctagactcggggtgcttccttgtagcgactaaactagattttcacttatgaatgatttgcatatgaaaggagagcatcggcctagggcccccacagttgctctatgctttccaaaccttatctccacaacctcttccccccaaaacccgggaacctccccagcctgcgcctgctgcatgccctctcaggccggcagccccagcctgctagctagctcaactagtggggtttcctggcactggaccccagcaagtggtcctagaggccctttgctgtcccatagtccctgccacgaatttctgtgccctcctgacccattgctgttgtccaactatttattgactctgggtccttcctgaaactatattttgtcatatcaaataaagagagaacaggact

SEQ ID NO: 13869 - DNA, 1733 bp, Homo sapiens
  source 1..1733: mol_type = unassigned DNA
ttcctgacatctggcttgcgattggctgggagggggtcagctgactttgtcattttgtctgtcctggattggagccgtccctataaccatctagttccgagtacaaactggagacagaaataaatattaaagaaatcatagaccgaccaggtaaaggcaaagggatgaattcctacttcactaacccttccttatcctgccacctcgccgggggccaggacgtcctccccaacgtcgccctcaattccaccgcctatgatccagtgaggcatttctcgacctatggagcggccgttgcccagaaccggatctactcgactcccttttattcgccacaggagaatgtcgtgttcagttccagccgggggccgtatgactatggatctaattccttttaccaggagaaagacatgctctcaaactgcagacaaaacaccttaggacataacacacagacctcaatcgctcaggattttagttctgagcagggcaggactgcgccccaggaccagaaagccagtatccagatttacccctggatgcagcgaatgaattcgcacagtggggtcggctacggagcggaccggaggcgcggccgccagatctactcgcggtaccagaccctggaactggagaaggaatttcacttcaatcgctacctaacgcggcgccggcgcatcgagatcgccaacgcgctttgcctgaccgagcgacagatcaaaatctggttccagaaccgccggatgaagtggaaaaaagaatctaatctcacatccactctctcggggggcggcggaggggccaccgccgacagcctgggcggaaaagaggaaaagcgggaagagacagaagaggagaagcagaaagagtgaccaggactgtccctgccacccctctctccctttctccctcgctccccaccaactctcccctaatcacacactctgtatttatcactggcacaattgatgtgttttgattccctaaaacaaaattagggagtcaaacgtggacctgaaagtcagctctggaccccctccctcaccgcacaactctctttcaccacgcgcctcctcctcctcgctcccttgctagctcgttctcggcttgtctacaggcccttttccccgtccaggccttgggggctcggaccctgaactcagactctacagattgccctccaagtgaggacttggctcccccactccttcgacgcccccacccccgccccccgtgcagagagccggctcctgggcctgctggggcctctgctccagggcctcagggcccggcctggcagccggggagggccggaggcccaaggagggcgcgccttggccccacaccaacccccagggcctccccgcagtccctgcctagcccctctgccccagcaaatgcccagcccaggcaaattgtatttaaagaatcctgggggtcattatggcattttacaaactgtgaccgtttctgtgtgaagatttttagctgtatttgtggtctctgtatttatatttatgtttagcaccgtcagtgttcctatccaatttcaaaaaaggaaaaaaaagagggaaaattacaaaaagagagaaaaaaagtgaatgacgtttgtttagccagtaggagaaaataaataaataaataaatcccttcgtgttaccctcctgtataaatccaacctctgggtccgttctcgaatatttaataaaactgatattatttttaaaacttta

SEQ ID NO: 13870 - DNA, 2943 bp, Homo sapiens
  source 1..2943: mol_type = unassigned DNA
acattgaatcaggaaatttttctgagaaaggcaggtgggtatgggcaatctgacacgatccaaaaggcttactgccttgcacccctccccgcaaaaaggaagtagagaccaagatcttgggctttaattttatttttaattgtaaaaagatttcaaataagccaccatttgaactgggaagggaaactagggatggtcttgggggaaaatgtcattctctctaagaaagggaccccggggatgtgggtcgttttgagggtcctagaagttgaccccaattctcacctctcctgctgcactgcaggattgcccagggtaggtctagtcccctaggttcttcagaccactccaggtcaggtttggttgggtggctgccagtggtcttccactactgttcctgtctagggtggagtaggagctttcaggggtacggcatagaggggatgttgttctcttactaaaaaaaaaaaaaaaaaaaaaaggtaggggtagggaggcaccctttcaatccctgcaattcaccagccatcactgcctcaaggccacaaatctttgcaaagctttgaattccgcctgatccaaccttaatgcccccatttattaaggacaatatttaaaactcggcaagccaggagaggcaaccgaccctcagtgcttgaagctttctttcgcctgggcgtccgccctcagctctttctgcgctcgcctgcagcagcctggcccgtggggagtgggcggtgggtgggggtaggggtggggtgggggtccggggatgctccctctatgagagaattgggtaaacatggcgaccgcggcgcccatttgcacacgctacacaaatgcatcgcattcccggttgtttgcagaaaatttacagctgagtaataaaagtttacgatcgactcacaagttggattggccacaagaagtcatgtggattccatccatgaacgtgaactttttattgtggtttgtccgttccgagcgctccgcagaacagtcctccctgtaagagcctaaccattgccagggaaacctgccctgggcgctcccttcattagcagtattttttttaaattaatctgattaataattatttttcccccatttaattttttttcctcccaggtggagttgccgaagctgggggcagctggggagggtggggatgggaggggagagacagaagttgagggcatctctctcttccttcccgaccctctggcccccaaggggcaggaggaatgcaggagcaggagttgagcttgggagctgcagatgcctccgcccctcctctctcccaggctcttcctcctgcccccttcttgcaactctccttaattttgtttggcttttggatgattataattatttttatttttgaatttatataaagtatatgtgtgtgtgtgtggagctgagacaggctcggcagcggcacagaatgagggaagacgagaaagagagtgggagagagagaggcagagagggagagagggagagtgacagcagcgctcggacgtcctccccaacgtcgccctcaattccaccgcctatgatccagtgaggcatttctcgacctatggagcggccgttgcccagaaccggatctactcgactcccttttattcgccacaggagaatgtcgtgttcagttccagccgggggccgtatgactatggatctaattccttttaccaggagaaagacatgctctcaaactgcagacaaaacaccttaggacataacacacagacctcaatcgctcaggattttagttctgagcagggcaggactgcgccccaggaccagaaagccagtatccagatttacccctggatgcagcgaatgaattcgcacagtggggtcggctacggagcggaccggaggcgcggccgccagatctactcgcggtaccagaccctggaactggagaaggaatttcacttcaatcgctacctaacgcggcgccggcgcatcgagatcgccaacgcgctttgcctgaccgagcgacagatcaaaatctggttccagaaccgccggatgaagtggaaaaaagaatctaatctcacatccactctctcggggggcggcggaggggccaccgccgacagcctgggcggaaaagaggaaaagcgggaagagacagaagaggagaagcagaaagagtgaccaggactgtccctgccacccctctctccctttctccctcgctccccaccaactctcccctaatcacacactctgtatttatcactggcacaattgatgtgttttgattccctaaaacaaaattagggagtcaaacgtggacctgaaagtcagctctggaccccctccctcaccgcacaactctctttcaccacgcgcctcctcctcctcgctcccttgctagctcgttctcggcttgtctacaggcccttttccccgtccaggccttgggggctcggaccctgaactcagactctacagattgccctccaagtgaggacttggctcccccactccttcgacgcccccacccccgccccccgtgcagagagccggctcctgggcctgctggggcctctgctccagggcctcagggcccggcctggcagccggggagggccggaggcccaaggagggcgcgccttggccccacaccaacccccagggcctccccgcagtccctgcctagcccctctgccccagcaaatgcccagcccaggcaaattgtatttaaagaatcctgggggtcattatggcattttacaaactgtgaccgtttctgtgtgaagatttttagctgtatttgtggtctctgtatttatatttatgtttagcaccgtcagtgttcctatccaatttcaaaaaaggaaaaaaaagagggaaaattacaaaaagagagaaaaaaagtgaatgacgtttgtttagccagtaggagaaaataaataaataaat

SEQ ID NO: 13871 - DNA, 538 bp, Homo sapiens
  source 1..538: mol_type = unassigned DNA
cggatctgattgcctggggtgctgggctgggcgcaccccactgctgctgggggtcaccccaagagccccccacccatccaaggaaaggaataaacttaaccgctggaggggcatgaggagctcagcccccccaacctcgacagcagctaacagaaacgccaggagcagcaggaggaggaggcagcgacaaggacgtcctccccaacgtcgccctcaattccaccgcctatgatccagtgaggcatttctcgacctatggagcggccgttgcccagaaccggatctactcgactcccttttattcgccacaggagaatgtcgtgttcagttccagccgggggccgtatgactatggatctaattccttttaccaggagaaagacatgctctcaaactgcagacaaaacaccttaggacataacacacagacctcaatcgctcaggattttagttctgagcagggcaggactgcgccccaggaccagaaagccagtatccagatttacccctggatgcagcgaatgaattcgcacagtgg

SEQ ID NO: 13872 - DNA, 358 bp, Homo sapiens
  source 1..358: mol_type = unassigned DNA
aagcgggattggaccaaaccagagggacagagtcttctgggtctctctgcctgaggccctggagggagagaaggagaatgtcgtgttcagttccagccgggggccgtatgactatggatctaattccttttaccaggagaaagacatgctctcaaactgcagacaaaacaccttaggacataacacacagacctcaatcgctcaggattttagttctgagcagggcaggactgcgccccaggaccagaaagccagtatccagatttacccctggatgcagcgaatgaattcgcacagtgtgtgttttgtgcccggatctttaggggtcggctacggagcggaccggaggcgcggccgc

SEQ ID NO: 13873 - DNA, 3371 bp, Homo sapiens
  source 1..3371: mol_type = unassigned DNA
gctcgccgcccgccgccgccgccgcccgcgccccagccccgggagctctgctgatccggccgagctcagcaccgaggcgccccccaacctgcccagcccccagcccaccagcccagcccagtcccggggagccagctggcctggggttcggtcccggggggaggggagtttcgggggtactgggcggggtactcgtgagccagaggggagggggccgcgggttttcatgtacccagcatgagctcctacttcgtcaaccccctgttctccaaatacaaagccggcgagtccctggaaccggcctattacgactgccggttccctcagagcgtgggcaggagccatgcgctggtgtacgggcccggcggctcggcgcccggcttccagcacgcttcgcaccacgttcaagacttcttccaccacggcacctccggcatctccaactcaggctaccagcagaacccgtgctcgcttagctgccacggagacgcctccaaattctatggctacgaggcgctccccagacagtccctttatggggctcagcaagaggcgagcgtggtgcaatatcccgactgtaaatcctccgccaacactaacagtagcgaaggacaaggccacttaaatcaaaactcgtctcccagcctcatgtttccatggatgagaccccacgctccggggaggcgcagtggacggcaaacttacagccggtatcagaccttggaactagaaaaggagtttctctttaatccttatttgacacgaaaacgtcggattgaagtctctcatgccctgggactgaccgagagacaagtgaagatctggttccagaaccgaaggatgaagtggaaaaaggagaacaacaaggataaactgccgggagcccgagatgaggagaaggtggaggaagaaggaaatgaggaagaggagaaagaagaggaggaaaaggaagaaaacaaggactaagcaaaaaagaaagacccccccccccttagcaactcccttgaagtttcgttttatggtagcagataaattgagaagtttacgactgtcatttgcttttatagagaatagaatgacactcacaactctaactacctgtcagatacttgcagctctggttttattacctttggacttcccccactctttatttgtttgggggctggaggggggagacggagaaacagtgaaaagttcggactctctgtctcactccttgccccacacacacttgtccctgcccccacccttctgagtccttcctggattttaaggtctgagacctggcctccgtgctcctcggtctgtctctcaccacactcccacctccctgcttctctggtatttattttagaggggagccccctcgaaatgcagaaaaggacttgtggttttgtttttatgctaaggctagtgtactagatgtactttttctaaaaaggaaaggacagaaaaaaatgaagaaaggaaaggaagacaaatgtaaagaaataaggaaaaaagcaaggaatatcccctccccctccccctccccctccccagggctccctgcttagaaaaacccccttgactttctctaggaacctgatggaaacctgaaggagatgtgggtctttcccctccccccatttccagaagggtagataggagcctgcagtcgcctctaaaatcctacctaaccatcccatggtcactcgggcccatgccttcctctccttcgctgtttgatttctattctgttgggcccgccttcctctgagctgcattagtgttagtgctcagaaatcaccataatcacgaaaataataataataaatctttaacatactacctaaagggaacctgcaataatcttgaaaaagaaaaagagaaaaattttaaaatcctgctataggagaaaaaaagagaaaaaaataaaaatcaaaaaaaaaaaaaagaaagaaagaaacctccagcgtattttatcactacctatagaaagaaatcctgctttgagagtatttgtaatgcggttttgttgtcgtttgttgctgcttatttcactaagaaaacccaacaactgagactgcctagcccgccggtcctgtgcgcttttattgtgcttctaaccccagtagagtagaactaaattgcactgaatgtatagttaactctgtcttgaattctctgtttatgcaatgtgctcgaaagaaaaaaatgttaaaaatatatctataataataattttttgtcatttgtctttatgtccagctatgaatgtagattttgtgtcccgacagccctgttcctggtccaagtactttgtattgtatacgtgagtcataataataaaaagaagaagaaaaataatagaagctggaatgacttgctttttctccacagctcttccctattctctaccttctctctccttatccccctgtccaactctctggaaaaggtctgcttcactgctctggctttggggttcagaaactcacgtggagagaagcctgggaattgagaaagcatgctggcctgggagggcaggtgaaaggggtgaggggttgagaggaggaagaaaaggagcagtccattggttgagagagtaaggagtctataggtatgcccttgggggaatcttggctccaaacaaagtgggtttccagacgccaggatcccaatgggaagaaagatttcctcactcatccaccctcctcctcctcagccttgggctgggcccagacaaagaatctgccctatgcaactatgactttttcttccagggtctggggctgaggatgagatagtgggattccttctgatctccgcatgccccttgtggccagaccttagcacccagcacccagcactagaataatgaaccgggtggggatgtgtgaggctcagggcaactggctggcctgtctgcagggcttgcctgaagatgggggatgctaagaatggagggtgaggaagcttaagcctgaaggagaggagaaaggaaggggaaagtaagtgagctcgtaggcaaccagcctgagcccacatcctgaaattcacattcaatcctctgcacaggaagattgtcatcactgtcattcagcccgcttgcatccactccaacttctgttcagacggtttaaagtccactccccacttcaccttggcaattggtcagcttacccagcccccatagtgtgggccattggcctggaggatgggcctgctgagtggacatcctgccaccccagtcacagcggggtaagagggcgtctttattggtatcttcattccccaaaatgaagaattgaaggctcagggacccagggggtagaagggtctctcacttctctctggagagtcctggacttaaaaattctgtttat

SEQ ID NO: 13874 - DNA, 1516 bp, Homo sapiens
  source 1..1516: mol_type = unassigned DNA
gttctgtgagcagataaaaagtacatatacagttcatacaataatcttatgtatgtaaaaccccgttacgatgtcggcgacggggcccatcagtaactattacgtggactcgctcatctctcacgacaatgaagacctcctagcgtccaggtttccggccaccggggctcatcccgccgccgccagacccagcggtttggtgccggactgtagcgattttccgtcctgtagcttcgcgcccaagccggcagtgttcagcacgtcgtgggcgcccgtgccctctcagtcgtccgtggtatatcacccgtacggcccccagccccacctcggcgccgacacgcgctacatgcggacttggctcgagccgctgtccggcgccgtctccttccccagcttcccggccgggggccgtcactacgccctcaagccggacgcctaccccgggcgccgcgcggactgcggcccaggggagggccgcagctacccggactacatgtacggctcgcccggggagctgcgcgaccgcgccccgcagacactgccctcgcccgaggcggacgcgctcgccggcagcaagcacaaagaggagaaggccgacctggaccccagcaaccccgtggccaactggattcacgcccgctccacgaggaagaagcgctgcccctacaccaagtaccagacgctggaactggagaaggagtttctcttcaatatgtatttaaccagggaccgtcggtatgaggtggcccgggttctcaatctcaccgagcggcaggtcaaaatctggtttcagaatcgaaggatgaagatgaaaaagatgaataaagagaaaaccgacaaggagcagtcctaaaccctacccagcctgctgcctcagcacagccaagggaaaaacaaaaaccccacaaaataccccaacacaggcgggggagagacgaaaaagaaaaggaaagagcaagatagacaaaagccaatcagcttaaaaagaaaaacaaggaaggggaaaagaaaactcttgcgatttgggagggttcagtgttgagatattggtgttttagagttagttctacccagcgaggaggaggcggggagagaaactgcgttctctttccccagcgcaaccgaaataaatgacacatacaaatgtgatttttttcctcctttcttcagagaagccagtacttgaatcgctatatttctatttttttttccctgtatcgtatttggtccaggtcatccctccccgggcctggggcgctctgcgtgcagattttgtacaaaaaaaaaaaagacacacacacatacatgataatgattcccagcccaggagctgaggggtgagggctggggaccatgccgcgggctaggtcgggcccgtgcaggccggcgccttgggctgtacatagtgttccctctcatccccagggttcgtccccagcgtccgtcctgtaacgtgcttctgtttgttatggtagaacagccctgtgttaatatattgaagtcacttaaccagaaa

SEQ ID NO: 13875 - DNA, 1505 bp, Homo sapiens
  source 1..1505: mol_type = unassigned DNA
tgcaaatttccttgcgacacatacatcacacaaaagatcagataaaaagtacatatacagttcatacaataatcttatgtatgtaaaaccccgttacgatgtcggcgacggggcccatcagtaactattacgtggactcgctcatctctcacgacaatgaagacctcctagcgtccaggtttccggccaccggggctcatcccgccgccgccagacccagcggtttggtgccggactgtagcgattttccgtcctgtagcttcgcgcccaagccggcagtgttcagcacgtcgtgggcgcccgtgccctctcagtcgtccgtggtatatcacccgtacggcccccagccccacctcggcgccgacacgcgctacatgcggacttggctcgagccgctgtccggcgccgtctccttccccagcttcccggccgggggccgtcactacgccctcaagccggacgcctaccccgggcgccgcgcggactgcggcccaggggagggccgcagctacccggactacatgtacggctcgcccggggagctgcgcgaccgcgccccgcagacactgccctcgcccgaggcggacgcgctcgccggcagcaagcacaaagaggagaaggccgacctggaccccagcaaccccgtggccaactggattcacgcccgctccacgaggaagaagcgctgcccctacaccaagtaccagacgctggaactggagaaggagtttctcttcaatatgtatttaaccagggaccgtcggtatgaggtggcccgggttctcaatctcaccgagcggcaggtcaaaatctggtttcagaatcgaaggatgaagatgaaaaagatgaataaagagaaaaccgacaaggagcagtcctaaaccctacccagcctgctgcctcagcacagccaagggaaaaacaaaaaccccacaaaataccccaacacaggcgggggagagacgaaaaagaaaaggaaagagcaagatagacaaaagccaatcagcttaaaaagaaaaacaaggaaggggaaaagaaaactcttgcgatttgggagggttcagtgttgagatattggtgttttagagttagttctacccagcgaggaggaggcggggagagaaactgcgttctctttccccagcgcaaccgaaataaatgacacatacaaatgtgatttttttcctcctttcttcagagaagccagtacttgaatcgctatatttctatttttttttccctgtatcgtatttggtccaggtcatccctccccgggcctggggcgctctgcgtgcagattttgtacaaaaaaaaaaaagacacacacacatacatgataatgattcccagcccaggagctgaggggtgagggctggggaccatgccgcgggctaggtcgggcccgtgcaggccggcgccttgggctgtacatagtgttccctctcatccccagggttcgtccccagcgtccgtcctgtaacgtgcttctgtttgttatggtagaa

SEQ ID NO: 13876 - DNA, 2028 bp, Homo sapiens
  source 1..2028: mol_type = unassigned DNA
gccgagcggagaggccgcccattggccggccagcgccacgtggccgcccccgccggtatattaggccactatttacctccggctcactcgccatgggttggagagggcagctcgggtagagagggctggcggagcggcgcagacggcggcagtcctgctcagcctctgcccggctccgtactccggccccggcctgcgccctcagaaaggtggggcccgaaccatgagctcctacctggagtacgtgtcatgcagcagcagcggcggggtcggcggcgacgtgctcagcttggcacccaagttctgccgctccgacgcccggcccgtggctctgcagcccgccttccctctgggcaacggcgacggcgccttcgtcagctgtctgcccctggccgccgcccgaccctcgccttcgcccccggccgcccccgcgcggccgtccgtaccgcctccggccgcgccccagtacgcgcagtgcaccctggagggggcctacgaacctggtgccgcacctgccgcggcagctgggggcgcggactacggcttcctggggtccgggccggcgtacgacttcccgggcgtgctggggcgggcggccgacgacggcgggtctcacgtccactacgccacctcggccgtcttctcgggcggcggctctttcctcctcagcggccaggtggattacgcggccttcggcgaacccggcccttttccggcttgtctcaaagcgtcagccgacggccaccctggtgctttccagaccgcatccccggccccaggcacctaccccaagtccgtctctcccgcctccggcctccctgccgccttcagcacgttcgagtggatgaaagtgaagaggaatgcctctaagaaaggcaaactcgccgagtatggggccgctagcccctccagcgcgatccgcacgaatttcagcaccaagcaactgacagaactggaaaaagagtttcatttcaataagtacttaactcgagcccggcgcatcgagatagccaactgcttgcacctgaatgacacgcaagtcaaaatctggttccagaaccgcaggatgaaacagaagaaaagggaacgagaagggcttctggccacggccattcctgtggctcccctccaacttcccctctctggaacaacccccactaagtttatcaagaaccccggcagcccttctcagtcccaagagccttcgtgaggccggtacttggggccgaaaaactgtggcctgcagaagtcccaggcgacccccatccctatctagacttaggagctcagtttgggatggaggtgggagaacaaaaatgaatagggatttcacttgggaaatgaagtactttagttggcttccgagttccagactatatgtccagatattaattgactgtcttgtaagccacttgtttggttatgatttgtgtcttatcagggaaaaggtgcccagctgccagcccagctccgctgctatctttgcctcacttagtcatgtgcaattcgcgttgcagagtggcagaccattagttgctgagttctgtcagcactctgatgtgctcagaagagcacctgcccaaagtttttctggttttaatttaaaggacaaggctacatatattcagctttttgagatgaccaaagctagttagggtctccttgatgtagctaagctgcttcagtgatcttcacatttgcactccagtttttttttctttaaaaaagcggtttctacctctctatgtgcctgagtgatgatacaatcgctgtttagttactagatgaacaaatccacagaatgggtaaagagtagaatctgaactatatcttgacaaatattattcaaacttgaatgtaaatatatacagtatgtatattttttaaaaagatttgcttgcaatgaccttataagtgacatttaatgtcatagcatgtaaagggttttttttgtaataaaaattatagaatctgctgctctctgcttttcttacactctttaataatgattctctttctttaaagttg

SEQ ID NO: 13877 - DNA, 1702 bp, Homo sapiens
  source 1..1702: mol_type = unassigned DNA
ttggagagggcagctcgggtagagagggctggcggagcggcgcagacggcggcagtcctgctcagcctctgcccggctccgtactccggccccggcctgcgccctcacctcgccttcgcccccggccgcccccgcgcggccgtccgtaccgcctccggccgcgccccagtacgcgcagtgcaccctggagggggcctacgaacctggtgccgcacctgccgcggcagctgggggcgcggactacggcttcctggggtccgggccggcgtacgacttcccgggcgtgctggggcgggcggcccttttccggcttgtctcaaagcgtcagccgacggccaccctggtgctttccagaccgcatccccggccccaggcacctaccccaagtccgtctctcccgcctccggcctccctgccgccttcagcacgttcgagtggatgaaagtgaagaggaatgcctctaagaaagacagcggtttgggttttgtggaggagacgcgttcccgggcgaattccatggagtctgcctcgagtacagattcggaaaatgtgccaggcattgagaaaatttcaggaaggagctctccgtggaacttctcctggcaaactcgccgagtatggggccgctagcccctccagcgcgatccgcacgaatttcagcaccaagcaactgacagaactggaaaaagagtttcatttcaataagtacttaactcgagcccggcgcatcgagatagccaactgcttgcacctgaatgacacgcaagtcaaaatctggttccagaaccgcaggatgaaacagaagaaaagggaacgagaagggcttctggccacggccattcctgtggctcccctccaacttcccctctctggaacaacccccactaagtttatcaagaaccccggcagcccttctcagtcccaagagccttcgtgaggccggtacttggggccgaaaaactgtggcctgcagaagtcccaggcgacccccatccctatctagacttaggagctcagtttgggatggaggtgggagaacaaaaatgaatagggatttcacttgggaaatgaagtactttagttggcttccgagttccagactatatgtccagatattaattgactgtcttgtaagccacttgtttggttatgatttgtgtcttatcagggaaaaggtgcccagctgccagcccagctccgctgctatctttgcctcacttagtcatgtgcaattcgcgttgcagagtggcagaccattagttgctgagttctgtcagcactctgatgtgctcagaagagcacctgcccaaagtttttctggttttaatttaaaggacaaggctacatatattcagctttttgagatgaccaaagctagttagggtctccttgatgtagctaagctgcttcagtgatcttcacatttgcactccagtttttttttctttaaaaaagcggtttctacctctctatgtgcctgagtgatgatacaatcgctgtttagttactagatgaacaaatccacagaatgggtaaagagtagaatctgaactatatcttgacaaatattattcaaacttgaatgtaaatatatacagtatgtatattttttaaaaagatttgcttgcaatgaccttataagtgacatttaatgtcatagcatgtaaagggttttttttgtaataaaaattatagaatctgc

SEQ ID NO: 13878 - DNA, 1989 bp, Homo sapiens
  source 1..1989: mol_type = unassigned DNA
ctgggccggttgtctccagcgcgcactatcgcgggcgcgtagtagatgtcgctgttgtccgtgcttacccggccggccggccaggctctggagcacgtgacccgagaggaggctgcggctcaaggccattttcaaatctcattggcttggttgtcatgtggtcggcagaggcatccacaattacacggggaatgttttcctagagatgtcagcctacaaaggacacaatctctcttcttcaaattcttccccaaaatgtcctttcccaacagctctcctgctgctaatacttttttagtagattccttgatcagtgcctgcaggagtgacagtttttattccagcagcgccagcatgtacatgccaccacctagcgcagacatggggacctatggaatgcaaacctgtggactgctcccgtctctggccaaaagagaagtgaaccaccaaaatatgggtatgaatgtgcatccttatatacctcaagtagacagttggacagatccgaacagatcttgtcgaatagagcaacctgttacacagcaagtccccacttgctccttcaccaccaacattaaggaagaatccaattgctgcatgtattctgataagcgcaacaaactcatttcggccgaggtcccttcgtaccagaggctggtccctgagtcttgtcccgttgagaaccctgaggttcccgtccctggatattttagactgagtcagacctacgccaccgggaaaacccaagagtacaataatagccccgaaggcagctccactgtcatgctccagctcaaccctcgtggcgcggccaagccgcagctctccgctgcccagctgcagatggaaaagaagatgaacgagcccgtgagcggccaggagcccaccaaagtctcccaggtggagagccccgaggccaaaggcggccttcccgaagagaggagctgcctggctgaggtctccgtgtccagtcccgaagtgcaggagaaggaaagcaaagaggaaatcaagtctgatacaccaaccagcaattggctcactgcaaagagtggcagaaagaagaggtgcccttacactaagcaccaaacgctggaattagaaaaagagttcttgttcaatatgtacctcacccgcgagcgccgcctagagatcagtaagagcgttaacctcaccgacaggcaggtcaagatttggtttcaaaaccgccgaatgaaactcaagaagatgagccgagagaaccggatccgagaactgaccgccaacctcacgttttcttaggtctgaggccggtctgaggccggtcagaggccaggattggagagggggcaccgcgttccagggcccagtgctggaggactgggaaagcggaaacaaaaccttcaccgctctttgtttgttgttttgttgtattttgttttcctgctagaatgtgactttggggtcattatgttcgtgctgcaagtgatctgtaatccctatgagtatatatatatatatatatatatatatataaaaacttagcacgtgtaatttattattttttcatcgtaatgcagggtaactattattgcgcattttcatttgggtcttaacttattggaactgtagagcatccatccatccatccatccagcaatgtgactttttcatgtctttcctaacacaaaaggtctatgtgtgtggttagtccatgaactcatggcattttgaatacatccagtactttaaaaatgacatatatatttaaaaaaaaaagattaagaaaacccacaagttggagggagggggacttaaaaagcacattacaatgtatcttttcacaaatgaatttagcagttgtccttggtgagatgggatattggcgatttatgccttgtagcctttcccttgtggtgcatctgtggtttggtagaagtacaacagcaacctgtcctttctgtgcatgttctggtcgcatgtataatgcaataaactctggaaatgagttca

SEQ ID NO: 13879 - DNA, 1939 bp, Homo sapiens
  source 1..1939: mol_type = unassigned DNA
tgcaatcgatggctcaggttggctgcgcggggagcggccagaggctcgctggcgcgcacgccgcggagtcatgaacgactttgacgagtgcggccagagcgcagccagcatgtacctgccgggctgcgcctactatgtggccccgtctgacttcgctagcaagccttcgttcctttcccaaccgtcgtcctgccagatgactttcccctactcttccaacctggctccgcacgtccagcccgtgcgcgaagtggccttccgcgactacggcctggagcgcgccaagtggccgtaccgcggcggcggcggcggcggcagcgcggggggcggcagcagcgggggcggccccggcgggggcggcggcggcgcggggggctacgctccctactacgcggcggcggcggcggcggctgcggcggccgcggcggccgaggaggcggccatgcaacgcgagcttctcccgcccgcgggccgccggccggacgtgctcttcaaggcgcctgagccggtgtgcgctgcgccggggccgccgcacggccccgcgggcgccgcctccaacttctacagcgcggtgggccgcaatggcatcttgccacagggcttcgaccagttctacgaggcagcgcccgggcccccgttcgccgggccgcagcccccgccgccacccgcgccgccacagcccgagggcgcagccgacaagggcgaccccaggaccggggctggtggcggcgggggcagtccctgcaccaaggcgacccctggctcggagcccaagggggcagcagaaggcagcggtggcgacggcgagggccccccgggagaggcgggggccgagaagagcagcagcgcagttgccccccagcggtcccggaaaaagcgctgtccctataccaagtaccagatccgcgaactggaacgcgagtttttctttaacgtgtacataaacaaagagaaaagacttcaactctctcggatgctcaacctcactgaccggcaagtcaaaatctggttccagaatcgcaggatgaaagaaaagaaactgaacagagaccgtctgcagtatttcactggaaaccccttattttgagagctccaggaagcgccctcaccccagccccactcacccaccctccttcccaccagcctgctctccgcaggcccactgtccttgggtttaatgacgtctcttctctgtggaacttcacgattccttcccacggtcaactcgggacctcccagcgaccactgcagcctgcggacgaggccgggacttggccgagcggatcctaataaggggaaaatggtaaatgcaaacgtcccgttacaattttaccgccagtgtgctgtcgttccccctccccctctccgagtcctcgtggggacacggcggggtctgtaggaagttgggccgggttgggggttgctagaaggcgctggtgttttgctctgagttttaagagatcccttccttcctcttcggtgaatgcaggttatttaaactttgggaaatgtacttttagtctgtcatatcaaggcatgagtcactgtctttttttgtgtgaataaatggtttctagtaaaatggaggttacagcttcaatacactgtatgaattctcctctttgaggtttagtgcctccttaggatattttagtggccagaacccatgcaactgaaaatcgaatgaaatactttttagtcccactaaaatagtagtcgtaccctcccaccacctctaggttacactggttttaaaaatcatgttagtgatgaatttctgaattgacgatgtgaccaagcaatgctggcgctgccttctccaggcagtaaggctggggcagcaggaacctaagaagaaaactcccacccccaccactagtctagtgaacttgggatttctgaaaagacagcaaccatttttaaaaactggttagaaaat

SEQ ID NO: 13880 - DNA, 926 bp, Homo sapiens
  source 1..926: mol_type = unassigned DNA
atgtacctgccgggctgcgcctactatgtggccccgtctgacttcgctagcaagccttcgttcctttcccaaccgtcgtcctgccagatgactttcccctactcttccaacctggctcccggcgggggcagtccctgcaccaaggcgacccctggctcggagcccaagggggcagcagaaggcagcggtggcgacggcgagggccccccgggagaggcgggggccgagaagagcagcagcgcagttgccccccagcggtcccggaaaaagcgctgtccctataccaagtaccagatccgcgaactggaacgcgagtttttctttaacgtgtacataaacaaagagaaaagacttcaactctctcggatgctcaacctcactgaccggcaagtcaaaatctggttccagaatcgcaggatgaaagaaaagaaactgaacagagaccgtctgcagtatttcactggaaaccccttattttgagagctccaggaagcgccctcaccccagccccactcacccaccctccttcccaccagcctgctctccgcaggcccactgtccttgggtttaatgacgtctcttctctgtggaacttcacgattccttcccacggtcaactcgggacctcccagcgaccactgcagcctgcggacgaggccgggacttggccgagcggatcctaataaggggaaaatggtaaatgcaaacgtcccgttacaattttaccgccagtgtgctgtcgttccccctccccctctccgagtcctcgtggggacacggcggggtctgtaggaagttgggccgggttgggggttgctagaaggcgctggtgttttgctctgagttttaagagatcccttccttcctcttcggtgaatgcaggttatttaaactttgggaaatgtacttttagtctgtcatatcaa

SEQ ID NO: 13881 - DNA, 1805 bp, Homo sapiens
  source 1..1805: mol_type = unassigned DNA
tctgagcctgtcctcttattcccggttgtaactaaatactgttgcgagcgcagccgaagccctttgttggagatgtgtgagcgcagtctctacagagcgggctatgtgggctcgcttctgaatctgcagtcgccagactctttctacttctccaacctgaggccgaatggcggccagttggccgcgcttccccctatctcctacccgcgcggcgcgctgccctgggccgccacgcccgcctcctgcgcccccgcgcagcctgcgggcgccactgccttcggcggcttctcgcagccctacctggctggctccgggcctctcggcctgcagcccccaacagccaaagacggacccgaagagcaggctaagttctatgcgcccgaagcggccgctgggccagaggagcgcggtcgtacccggccgtccttcgcccccgagtctagcctggctcctgcagtggctgctctcaaagcggccaagtatgactacgctggtgtgggtcgtgccacgccgggctccacgaccctgctccagggggctccctgcgcccctggcttcaaggacgacaccaagggcccgctcaacttgaacatgacagtgcaggcggcgggcgttgcctcttgcctgcgaccttcactgcccgacggcctgccgtggggggcggccccggggagggcccgcaagaagcggaaaccctacacgaagcagcagattgcggagttggagaacgaattcctcgtcaacgaattcatcaacaggcagaaacgcaaggaattgtccaataggctgaacctcagcgaccagcaagtcaaaatctggttccagaacaggcgtatgaagaagaagcgcgtggtgcttcgggagcaggcgctggcgctctactagccgcgcgcgtggccagggccgggttggatctgcccttttggacagaggccttgtttggggagggggatctggggctaaggctaaggcttttccttcggttccttctctgctggccccagaagccaccaagagatttacagaccaggccagttgggcctccttgctttcctcagtccctgagaagcccgtgagaaacgtgcggaagtaccagtgcaactctggctggccttaaggcttccacgttgggggactgaggccaactctccttgctcctggctggggcatttgcacccaccgctcattcttgctccccggtacctggatttttctgtttccacccaattcgttctccctttccccctctctccagccccttcagcgtatagcagtcgcctagttagggctcagagtggaaggcctcctgagggaatggaaaggactgtgggtacaattaggtctctgcagcagaagccctttgtggcaaggccaggatcttcactctggagaaaggaaagggcaccatccaccctccaccctcctgtctgccctggctgatttgagagaacaaaagccacactagatcttcagactttgggaggaaaagggagggaaggggaggggctgggtagtggggtaaacttggagatatctcgaaatgagaaatgcgaaataggctggcctatttccagctgggtagaatatgtggaaccttcatttcctgagatgggatgagagagactgggactccagacaagtgccatctccagacaagactggcaaacattgccctactcccaccttctcaaacatgcctaggccaggcctatgaaccctgtaactggatccccagaggctagctctggtgaaaggagctgttggtctgctttgaagctctgttgcacagggagagggaaaaatat

SEQ ID NO: 13882 - DNA, 4050 bp, Homo sapiens
  source 1..4050: mol_type = unassigned DNA
gcctccacagatatcaaaagaaacctgaagagcctacaaaaaaaaaagagataaagacaaaattcaagaaaacacacacatacataattgtggtcacctggagcctgggggccggcccagctctctcaggattcagcagacattggaggtggcagtgaaggatacagtggtagtcaatgttatttgagcagggtcagcaggccctggagcttcctgagtgcacaatgcagaaggctgcttactatgaaaacccaggactgtttggaggctatggctacagcaaaactacggacacttacggctacagcaccccccaccagccctacccaccccctgctgctgccagctccctggacactgactatccaggttctgcctgctccatccagagctctgcccctctgagagccccagcccacaaaggagctgaactcaatggcagctgcatgcggccgggcactgggaacagccagggtgggggtggtggcagccagcctcctggtctgaactcagagcagcagccaccacaaccccctcctccaccaccgaccctgcccccatcttcacccaccaatcctggaggtggagtgcctgccaagaagcccaaaggtgggcccaatgcttctagctcctcagccaccatcagcaagcagatcttcccctggatgaaagagtctcgacagaactccaagcagaagaacagctgtgccactgcaggagagagctgcgaggacaagagcccgccaggcccagcatccaagcgggtacgcacggcatacacgagcgcgcagctggtggaattggaaaaggaattccacttcaaccgctacttgtgccggccgcgccgcgtggagatggccaacctgctgaatctcacggaacgccagatcaagatctggttccagaaccggcgcatgaagtacaagaaggaccagaaggccaagggcatcctgcactcgccggctagccagtcccctgagcgcagcccaccgctcggcggcgccgctggccacgtggcctactccggccagctgccgccagtgcccggcctggcctacgacgcgccctcgccgcctgctttcgccaaatcacagcccaatatgtacggcctggccgcctacacggcgccactcagcagctgcctgccacaacagaagcgctacgcagcgccggagttcgagccccatcccatggcgagcaacggcggcggcttcgccagcgccaacttgcagggcagcccggtgtacgtgggcggcaacttcgtcgagtccatggcgcccgcgtccgggcctgtcttcaacctgggccacctctcgcacccgtcgtcggccagcgtggactacagttgcgccgcgcagattccaggcaaccaccaccatggaccttgcgaccctcatcccacctacacagatctctcggcccaccactcgtctcagggacgactgccggaggctcccaaactgacgcatctgtagcggccgccgccagcccgaactcgcggcaaaattacctctcttgctgtagtggtggggtagagggtggggcccgcggggcagttcgggaacccccttccccgctcttgccctgccgccgcctcccgggtctcaggcctccagcggcggaggcgcaggcgaccgggcctcccctccatgggcgtcctttgggtgactcgccataaatcagccgcaaggatccttccctgtaaatttgacagtgccacatactgcggaccaagggactccaatctggtaatggtgtcccaaaggtaagtctgagacccatcagcggcgcgccctgcagagggaccagagcttggagagtcttgggcctggcccgcgtctagcttagtttcagagaccttaatttatattctccttcctgtgccgtaaggattgcatcggactaaactatctgtatttattatttgaagcgagtcatttcgttccctgattatttatccttgtctgaatgtatttatgtgtatatttgtagatttatccagccgagcttaggaattcgcttccaggccgtgggggccacatttcacctccttagtccccctggtctgaactagttgagagagtagttttgaacagtcgtaaccgtggctggtgtttgtagttgacataaaggattaagaccgcaaattgtccttcatgggtagagtcaggaagcccggtggcgtggcacaacacactttggtcatttctcaaaaaccacagtcctcaccacagtttattgatttcaaattgtctggtactattggaacaaatatttagaataaaaaaatttcccagtcggaactgtatctgtgttaatcatgcacacttgcaagcagatcactatgcctttatctcgcacaatccccatggaaggccccgaaacagactgacactttgaaaaaaatattttatttatttggagtctagtgcataaattggttctcgggatacttgattactttccagctattgaaattaggggagggggaaatgaggatgcaaacctaagaaggttctgggcgggatgatttgggcagggctttttgaaagcagcgcctgctttgctgtttttactgccttctttctagacacaatcgacttttacactggggagaccagagctcacttttctgcattaagtaacaaaaaataaactttgaaagaaaactgacaatcaaagaaaaaacacaagagaagttgtaagaagaattgagctatgaaaaagctaaggtgtagaaaaagaaaccatcatttggagacgcgtacctaagctttttctctaggaaatgctgtcatgaattcttcctttgtagtgatcattagttcatttctaaagaaaacaaacattccccaagatgtaaagtaataatatttcattaatgaaacataacaagtataaacaccttgtttactcctgtttcttatacaaaatgggcaaaaatgtcttcaaggatttataaccattttgtaaatattaatgtggcttctgctaggggtggacaacttcccggcttctatgggaggggccacttagaaaacgccttcagataaggttcaattcttttgtatttcagcaaagtcagcccacgcatctctatttggtttgacaaataatgcaactcctactacatccccgatgacacgaagtgaaattcctattgtgtggaaataatttaacttctaatcttctggtggaacaacaatcgtttctatttggatgtttgtatttcactaagtaatgatggctcaaaataatatttagtttccttgttcctttgtgctgtttttaaaatggcatgttagatttgggggtgggaggggatatccttttgctaaatttcactttatctgagcaggtttaaaatatatatgttgtagaagtgtatcaacagaataaatgacttcaatcgaaggcacattttacccactttcaaggcttaacattgttttctatgaaatttgcatccataggcagaatttctaattgtcttgtaagaaattattttttaagctattagagaaatcaaaggagagctcactgccttgcagggattacaaccacctttcttaactggctaaatattaactagctgaattgtcaggctgcttagattcagcccgattttccctcatctcctcttcctaccataaataataataaaaatacgtaatgtgtcatggctccaggcgttttccagcacagtgtgttaccgcaggagtatctgctgagtctgcgggtgtctgcaaagccccaagtgtcatttgcggcttagggtttcatggattagactttaaacggtgtctagcccggctgacattagcttcctctcacactcaggctccaaggaagtgtgggatcaggggctccctctccaggcagccacagctttccccgacgccctcctctcgagtggggtgagggcttggaccaaatctgccaccttctgtcatctctggaggttcccgagacttctaatagctcggatctgttcctgccattggcgtgagactcatctgaggggcgtgggtgggggtgggcggcgagccg

SEQ ID NO: 13883 - DNA, 2384 bp, Homo sapiens
  source 1..2384: mol_type = unassigned DNA
agttgaacctcagcctggttccgttctaccgggaattccgtgtgctcgagtatatggccgtgtctgcgagcgcgcaagaccagggttgggacagtgttgtctgcagacaaagggggaaggctagctctgccccccactggcgcccactctgaggccgaggacaccaggtttatgataaattgggatccaggtcacctggagcctgggggccggcccagctctctcaggattcagcagacattggaggtggcagtgaaggatacagtggtagtcaatgttatttgagcagggtcagcaggccctggagcttcctgagtgcacaatgcagaaggctgcttactatgaaaacccaggactgtttggaggctatggctacagcaaaactacggacacttacggctacagcaccccccaccagccctacccaccccctgctgctgccagctccctggacactgactatccaggttctgcctgctccatccagagctctgcccctctgagagccccagcccacaaaggagctgaactcaatggcagctgcatgcggccgggcactgggaacagccagggtgggggtggtggcagccagcctcctggtctgaactcagagcagcagccaccacaaccccctcctccaccaccgaccctgcccccatcttcacccaccaatcctggaggtggagtgcctgccaagaagcccaaaggtgggcccaatgcttctagctcctcagccaccatcagcaagcagatcttcccctggatgaaagagtctcgacagaactccaagcagaagaacagctgtgccactgcaggagagagctgcgaggacaagagcccgccaggcccagcatccaagcgggtacgcacggcatacacgagcgcgcagctggtggaattggaaaaggaattccacttcaaccgctacttgtgccggccgcgccgcgtggagatggccaacctgctgaatctcacggaacgccagatcaagatctggttccagaaccggcgcatgaagtacaagaaggaccagaaggccaagggcatcctgcactcgccggctagccagtcccctgagcgcagcccaccgctcggcggcgccgctggccacgtggcctactccggccagctgccgccagtgcccggcctggcctacgacgcgccctcgccgcctgctttcgccaaatcacagcccaatatgtacggcctggccgcctacacggcgccactcagcagctgcctgccacaacagaagcgctacgcagcgccggagttcgagccccatcccatggcgagcaacggcggcggcttcgccagcgccaacttgcagggcagcccggtgtacgtgggcggcaacttcgtcgagtccatggcgcccgcgtccgggcctgtcttcaacctgggccacctctcgcacccgtcgtcggccagcgtggactacagttgcgccgcgcagattccaggcaaccaccaccatggaccttgcgaccctcatcccacctacacagatctctcggcccaccactcgtctcagggacgactgccggaggctcccaaactgacgcatctgtagcggccgccgccagcccgaactcgcggcaaaattacctctcttgctgtagtggtggggtagagggtggggcccgcggggcagttcgggaacccccttccccgctcttgccctgccgccgcctcccgggtctcaggcctccagcggcggaggcgcaggcgaccgggcctcccctccatgggcgtcctttgggtgactcgccataaatcagccgcaaggatccttccctgtaaatttgacagtgccacatactgcggaccaagggactccaatctggtaatggtgtcccaaaggtaagtctgagacccatcagcggcgcgccctgcagagggaccagagcttggagagtcttgggcctggcccgcgtctagcttagtttcagagaccttaatttatattctccttcctgtgccgtaaggattgcatcggactaaactatctgtatttattatttgaagcgagtcatttcgttccctgattatttatccttgtctgaatgtatttatgtgtatatttgtagatttatccagccgagcttaggaattcgcttccaggccgtgggggccacatttcacctccttagtccccctggtctgaactagttgagagagtagttttgaacagtcgtaaccgtggctggtgtttgtagttgacataaaggattaagaccgcaaattgtccttcatgggtagagtcaggaagcccggtggcgtggcacaacacactttggtcatttctcaaaaaccacagtcctcaccacagtttattgatttcaaattgtctggtactattggaacaaatatttagaataaaa

SEQ ID NO: 13884 - DNA, 428 bp, Homo sapiens
  source 1..428: mol_type = unassigned DNA
agacgcccggaccgaccgccgcctgtagctcggcagccttcgggtcacctggagcctgggggccggcccagctctctcaggattcagcagacattggaggtggcagtgaaggatacagtggtagtcaatgttatttgagcagggtcagcaggccctggagcttcctgagtgcacaatgcagaaggctgcttactatgaaaacccaggactgtttggaggctatggctacagcaaaactacggacacttacggctacagcaccccccaccagccctacccaccccctgctgctgccagctccctggacactgactatccaggttctgcctgctccatccagagctctgcccctctgagagccccagcccacaaaggagctgaactcaatggcagctgcatgcggccgggcactgggaacagccagggtg

SEQ ID NO: 13885 - DNA, 4217 bp, Homo sapiens
  source 1..4217: mol_type = unassigned DNA
ggtcgatgcaaaaacttcacgtttcttcggaatagccagagaccaaagtgcgacatggagactagaagcagccggcgctggtcagccgcctcgttctgttttattaccttggactccaggaggatcagctgcgcctggtgacatagagcagcttttcctctccagaagctcctcacctttaaacagagtatcctctgggtgctgaaaagaaagaaagacagaaagagagaaagagagagagagagagaaagagagaatgcaagcctaattggttgcatggatgcagggccaaagggctaggttttggggtactagggagtgaggtacaaggccagcttgcccagtcccagctctgccctccaggaacatgaggtgcaaaggtacccaaatgggggcttgcttgtatttggggcctgtgggaagaaagcaagcttcaaagaagcccagtggggagctctagggtgcattttgacaaggtggaggtgcccttgccaccatcccagcccacccccagctacatgggcaagggcagcgagggccccctgctattttggcagggcccagctttggctgggaacccccgggcctgggcactggtagaaagcatggcggttactcattgcctaatttgattcaagctggccagattctggtaacttttgggtgaccctgatgaagacaaagccaggacggcggcctttgtatggcagaatccctgctcccgccggctgcaggcagggcgggcaggcaggaaccctcctcgcctggggcactctgcccaactcagaggcgagttcacccacccacctttcattgctctgtaccccaataggaggattcattctcccttgagctgtgcctacttggtgtcggggggcgggggttgcattcagctgggggtgagtggaagggccacggaaggttggcaaaatcagtggcagacaaaagctgggattacctgaggggaatggggtgctggggactggaactacattaatatctggcaggggctctcaaatgtgccatagcaagctacttgattacacgtatgttatttagttaaatttgtgaaaattatgagatgctcaccaacccggtgataaacttgctccctcgccattggctggcctggtcacatggctgcccaactttattcagttgacagcaagtaggagggccctatggaaggagaaaaaaagacaacacgagaaaaattagtattttctaccttctgaaattaatggtcatgagttcgtatatggtgaactccaagtatgtggaccccaagttccctccgtgcgaggagtatttgcagggcggctacctaggcgagcagggcgccgactactacggcggcggcgcgcagggcgcagacttccagcccccggggctctacccacggcccgacttcggtgagcagcctttcggaggcagcggccccgggcctggctcggcgctgcctgcgcggggtcacggacaagagccaggcggccccggcggtcactacgccgctccaggagagccttgcccagctcccccggcgcctccgccggcgcccctgcctggcgcccgggcctacagtcagtccgaccccaagcagccgccctccgggacggcactcaagcagccggccgtggtctacccctggatgaagaaggtgcacgtgaattcgggtatctgacaaggcgccgtcggattgaaatcgctcacaccctgtgtctgtcggagcgccagatcaagatctggttccagaaccggaggatgaagtggaaaaaagatcataagctgcccaacactaaaggcaggtcatcgtcctcatcttcctcctcatcttgctcctcctcagtcgcccccagccagcatttacagccgatggccaaagaccaccacacggacctgacgaccttatagaagtggggaccctgggcccatctctccctgcgcaccaggctgagccgaagctgcgggggcaggccgggcctgctgtcacctcgctgggctctaaggtcacctggagcctgggggccggcccagctctctcaggattcagcagacattggaggtggcagtgaaggatacagtggtagtcaatgttatttgagcagggtcagcaggccctggagcttcctgagtgcacaatgcagaaggctgcttactatgaaaacccaggactgtttggaggctatggctacagcaaaactacggacacttacggctacagcaccccccaccagccctacccaccccctgctgctgccagctccctggacactgactatccaggttctgcctgctccatccagagctctgcccctctgagagccccagcccacaaaggagctgaactcaatggcagctgcatgcggccgggcactgggaacagccagggtgggggtggtggcagccagcctcctggtctgaactcagagcagcagccaccacaaccccctcctccaccaccgaccctgcccccatcttcacccaccaatcctggaggtggagtgcctgccaagaagcccaaaggtgggcccaatgcttctagctcctcagccaccatcagcaagcagatcttcccctggatgaaagagtctcgacagaactccaagcagaagaacagctgtgccactgcaggagagagctgcgaggacaagagcccgccaggcccagcatccaagcgggtacgcacggcatacacgagcgcgcagctggtggaattggaaaaggaattccacttcaaccgctacttgtgccggccgcgccgcgtggagatggccaacctgctgaatctcacggaacgccagatcaagatctggttccagaaccggcgcatgaagtacaagaaggaccagaaggccaagggcatcctgcactcgccggctagccagtcccctgagcgcagcccaccgctcggcggcgccgctggccacgtggcctactccggccagctgccgccagtgcccggcctggcctacgacgcgccctcgccgcctgctttcgccaaatcacagcccaatatgtacggcctggccgcctacacggcgccactcagcagctgcctgccacaacagaagcgctacgcagcgccggagttcgagccccatcccatggcgagcaacggcggcggcttcgccagcgccaacttgcagggcagcccggtgtacgtgggcggcaacttcgtcgagtccatggcgcccgcgtccgggcctgtcttcaacctgggccacctctcgcacccgtcgtcggccagcgtggactacagttgcgccgcgcagattccaggcaaccaccaccatggaccttgcgaccctcatcccacctacacagatctctcggcccaccactcgtctcagggacgactgccggaggctcccaaactgacgcatctgtagcggccgccgccagcccgaactcgcggcaaaattacctctcttgctgtagtggtggggtagagggtggggcccgcggggcagttcgggaacccccttccccgctcttgccctgccgccgcctcccgggtctcaggcctccagcggcggaggcgcaggcgaccgggcctcccctccatgggcgtcctttgggtgactcgccataaatcagccgcaaggatccttccctgtaaatttgacagtgccacatactgcggaccaagggactccaatctggtaatggtgtcccaaaggtaagtctgagacccatcagcggcgcgccctgcagagggaccagagcttggagagtcttgggcctggcccgcgtctagcttagtttcagagaccttaatttatattctccttcctgtgccgtaaggattgcatcggactaaactatctgtatttattatttgaagcgagtcatttcgttccctgattatttatccttgtctgaatgtatttatgtgtatatttgtagatttatccagccgagcttaggaattcgcttccaggccgtgggggccacatttcacctccttagtccccctggtctgaactagttgagagagtagttttgaacagtcgtaaccgtggctggtgtttgtagttgacataaaggattaagaccgcaaattgtccttcatgggtagagtcaggaagcccggtggcgtggcacaacacactttggtcatttctcaaaaaccacagtcctcaccacagtttattgatttcaaattgtctggtactattggaacaaatatttagaataaaaaaatttcccagtcggaa

SEQ ID NO: 13886 - DNA, 1464 bp, Homo sapiens
  source 1..1464: mol_type = unassigned DNA
ataggaggattcattctcccttgagctgtgcctacttggtgtcggggggcgggggttgcattcagctgggggtgagtggaagggccacggaaggttggcaaaatcagtggcagacaaaagctgggattacctgaggggaatggggtgctggggactggaactacattaatatctggcaggggctctcaaatgtgccatagcaagctacttgattacacgtatgttatttagttaaatttgtgaaaattatgagatgctcaccaacccggtgataaacttgctccctcgccattggctggcctggtcacatggctgcccaactttattcagttgacagcaagtaggagggccctatggaaggagaaaaaaagacaacacgagaaaaattagtattttctaccttctgaaattaatggtcatgagttcgtatatggtgaactccaagtatgtggaccccaagttccctccgtgcgaggagtatttgcagggcggctacctaggcgagcagggcgccgactactacggcggcggcgcgcagggcgcagacttccagcccccggggctctacccacggcccgacttcggtgagcagcctttcggaggcagcggccccgggcctggctcggcgctgcctgcgcggggtcacggacaagagccaggcggccccggcggtcactacgccgctccaggagagccttgcccagctcccccggcgcctccgccggcgcccctgcctggcgcccgggcctacagtcagtccgaccccaagcagccgccctccgggacggcactcaagcagccggccgtggtctacccctggatgaagaaggtgcacgtgaattcggtgaaccccaactacaccggtggggaacccaagcggtcccgaacggcctacacccggcagcaagtcctagaactggaaaaagaatttcattttaacaggtatctgacaaggcgccgtcggattgaaatcgctcacaccctgtgtctgtcggagcgccagatcaagatctggttccagaaccggaggatgaagtggaaaaaagatcataagctgcccaacactaaaggcaggtcatcgtcctcatcttcctcctcatcttgctcctcctcagtcgcccccagccagcatttacagccgatggccaaagaccaccacacggacctgacgaccttatagaagtggggaccctgggcccatctctccctgcgcaccaggctgagccgaagctgcgggggcaggccgggcctgctgtcacctcgctgggctctaaggtactgtggggtggacctgggacaagcaggccgccctcggactaggttagcatcctgcccgagggcagccccctccctagagcgggatggggatgggagggggggcgggattctctctctaagtatattatatggcaggagctactgagaacataaaatcttggcgagtcattaaacttatgaaaatca

SEQ ID NO: 13887 - DNA, 2583 bp, Homo sapiens
  source 1..2583: mol_type = unassigned DNA
tccgtgcagtgctgtggtgcgaaaatgcctcgccggtgcgcaccgggtcggcagcctcggcggcgggggcgagattggcgggaggggggcgcggggggggcgcggtaagaggtggcggcgggcagagggtgttttttttcttttccctccagagccggggtttgtaaaccgaggccagagtgtccccgtgggccgagcgcacttttttcttgtccgggtgcgctcagtcactggtgcctgagaggaaacagtggaggcagcggggcaggtcgcctggggcgtcggcgattatattgcggccgagccggggcgcgccgggaaaggccgggagggcggcggcgcgcgggggctgggcgaggccccgcgacccgcgagggaggcggcgcgaagccgaggcggcgggcgcaagagccgggcatgagcgcccagtagctgagcgcccgcggctgcctggcctcagaagcgacgcgcgagcgcgggcgggcggcagcagcgacgtagcccggcggtcccggcggcgagagcagccgccccacaggcccccgcggcagtgcggccgagtcgaggctcgctctctggctgcttagcgccgcccgcccgcccggggccgccgccgctgacgccccaatgagttcgtacttcgtgaacccgctgtactccaagtacaaggcggcggctgcggcggcggcggcggcgggcgaggccatcaatcccacttactacgactgtcacttcgcgcccgaggtcggcggccgtcacgccgccgccgcagcagccctgcagctctatggcaacagcgccgccggcttcccgcacgcgcccccgcaggcgcacgcgcacccgcacccgtccccgccgccctccgggactgggtgcggcggtagggaaggccggggccaggagtacttccaccccggcgggggcagcccggccgctgcctaccaggccgccccccctcctcctccgcatcctccgcctccgccgccacctcccccctgcggcgggattgcctgtcacggggagcccgcgaagttttacggatacgataacttacagagacagccgatttttacgacccagcaagaggccgagctggtacaatatcctgactgtaaatcgtccagtggtaatattggcgaggacccagaccacttaaatcagagctcgtctccttctcaaatgtttccgtggatgagaccacaagcagctcctggtagacgaagaggaagacaaacctacagtcgcttccaaactctagagttggaaaaggaatttctttttaacccctatctgaccaggaaaagaagaatcgaggtttcccacgccctagccctcaccgagagacaggtaaaaatctggttccagaacaggagaatgaaatggaaaaaggaaaacaacaaggacaaatttcccgtttcccggcaggaggtgaaggacggggaaacgaaaaaggaagcccaagagctggaggaagacagagccgaaggcctgacaaattaacttctacctttaaaatttaccacagactattaaaactaataatcaccatatgctgtggacaccacctattttctttgttggaaaggaccttacctgtgtttcaagctaccttcatgtcactgctcttgaggttttctgtgctttgagagggatttgggtgtttaaaaaagtttctagtatcacatagaagctgtccttgagctgtcctatggaagggtaatttgatactgaccttgtagctatatttttataatggtttttaatgtctgagctagtgatttgcctcaacaacgtaaacttcctaatgattagcacttaataattgcatataaaatgctttattaattaaacaagtgcacttgaacattttaatatttgtggtgagtaaattaaaaggagtttattaattaaaaaaaattatgtctgcagaatactttatattatttgattacaatgtattatttatggattttttattctttcctttataatgaatagttcgggtgcgttttgtttactcctaaaaggtttctttgcgtattttctaaatgtaatatctcggggaaaatattagaaaagcacgtattagctgaagaatgtaacttgtagtccagctctgcagcttccttaaacttaagaaaaagattgggccagtgacaagaatttaaagacaatgtccaagttgacaattatttttctatagtccatacaaattaaataatctggcaactctggcaaatcgccttgtaaaatgcgtctcattttttaacttgctttcgttttgaaccgcccttgtaatcgcctgaaatcgctagttctttatgcggtggctgccgctgtgttccgttattttcagtaggtgtcatatttatttgtattgcctttgttctgttcgccgctggttttaaaccagcttgctgtgtgcatctcagacgtcggttggtacgtcctccgctgttcttcaggaaagcgatagcctcacctatttgaaacaagccctgagaggaaacgcagaaaaacctgagtgtaaacaactccggaatgtcgctagctccttagtaaataaatgaatctctttctgga

SEQ ID NO: 13888 - DNA, 1268 bp, Homo sapiens
  source 1..1268: mol_type = unassigned DNA
tgacgccccaatgagttcgtacttcgtgaacccgctgtactccaagtacaaggcggcggctgcggcggcggcggcggcgggcgaggccatcaatcccacttactacgactgtcacttcgcgcccgaggtcggcggccgtcacgccgccgccgcagcagccctgcagctctatggcaacagcgccgccggcttcccgcacgcgcccccgcaggcgcacgcgcacccgcacccgtccccgccgccctccgggactgggtgcggcggtagggaaggccggggccaggagtacttccaccccggcgggggcagcccggccgctgcctaccaggccgccccccctcctcctccgcatcctccgcctccgccgccacctcccccctgcggcgggattgcctgtcacggggagcccgcgaagttttacggatacgataacttacagagacagccgatttttacgacccagcaagaggccgagctggtacaatatcctgactgtaaatcgtccagtggtaatattggcgaggacccagaccacttaaatcagagctcgtctccttctcaaatgtttccgtggatgagaccacaagctcctggtagacgaagaggaagacaaacctacagtcgcttccaaactctagagttggaaaaggaatttctttttaacccctatctgaccaggaaaagaagaatcgaggtttcccacgccctagccctcaccgagagacaggtaaaaatctggttccagaacaggagaatgaaatggaaaaaggaaaacaacaaggacaaatttcccgtttcccggcaggaggtgaaggacggggaaacgaaaaaggaagcccaagagctggaggaagacagagccgaaggcctgacaaattaacttctacctttaaaatttaccacagactattaaaactaataatcaccatatgctgtggacaccacctattttctttgttggaaaggaccttacctgtgtttcaagctaccttcatgtcactgctcttgaggttttctgtgctttgagagggatttgggtgtttaaaaaagtttctagtatcacatagaagctgtccttgagctgtcctatggaagggtaatttgatactgaccttgtagctatatttttataatggtttttaatgtctgagctagtgatttgcctcaacaacgtaaacttcctaatgattagcacttaataattgcatataaaatgctttattaattaaacaagtgcacttgaacattttaatatttgtggtgagtaa

SEQ ID NO: 13889 - DNA, 1932 bp, Homo sapiens
  source 1..1932: mol_type = unassigned DNA
gccagagtgtccccgtgggccgagcgcacttttttcttgtccgggtgcgctcagtcactggtgcctgagaggaaacagtggaggcagcggggcaggtcgcctggggcgtcggcgattatattgcggccgagccggggcgcgccgggaaaggccgggagggcggcggcgcgcgggggctgggcgaggccccgcgacccgcgagggaggcggcgcgaagccgaggcggcgggcgcaagagccgggcatgagcgcccagtagctgagcgcccgcggctgcctggcctcagaagcgacgcccgcccggggccgccgccgctgacgccccaatgagttcgtacttcgtgaacccgctgtactccaagtacaaggcggcggctgcggcggcggcggcggcgggcgaggccatcaatcccacttactacgactgtcacttcgcgcccgaggtcggcggccgtcacgccgccgccgcagcagccctgcagctctatggcaacagcgccgccggcttcccgcacgcgcccccgcaggcgcacgcgcacccgcacccgtccccgccgccctccgggactgggtgcggcggtagggaaggccggggccaggagtacttccaccccggcgggggcagcccggccgctgcctaccaggccgccccccctcctcctccgcatcctccgcctccgccgccacctcccccctgcggcgggattgcctgtcacggggagcccgcgaagttttacggatacgataacttacagagacagccgatttttacgacccagcaagaggccgagctggtacaatatcctgactgtaaatcgtccagtggtaatattggcgaggacccagaccacttaaatcagagctcgtctccttctcaaatgtttccgtggatgagaccacaagctcctggtagacgaagaggaagacaaacctacagtcgcttccaaactctagagttggaaaaggaatttctttttaacccctatctgaccaggaaaagaagaatcgaggtttcccacgccctagccctcaccgagagacaggtaaaaatctggttccagaacaggagaatgaaatggaaaaaggaaaacaacaaggacaaatttcccgtttcccggcaggaggtgaaggacggggaaacgaaaaaggaagcccaagagctggaggaagacagagccgaaggcctgacaaattaacttctacctttaaaatttaccacagactattaaaactaataatcaccatatgctgtggacaccacctattttctttgttggaaaggaccttacctgtgtttcaagctaccttcatgtcactgctcttgaggttttctgtgctttgagagggatttgggtgtttaaaaaagtttctagtatcacatagaagctgtccttgagctgtcctatggaagggtaatttgatactgaccttgtagctatatttttataatggtttttaatgtctgagctagtgatttgcctcaacaacgtaaacttcctaatgattagcacttaataattgcatataaaatgctttattaattaaacaagtgcacttgaacattttaatatttgtggtgagtaaattaaaaggagtttattaattaaaaaaaattatgtctgcagaatactttatattatttgattacaatgtattatttatggattttttattctttcctttataatgaatagttcgggtgcgttttgtttactcctaaaaggtttctttgcgtattttctaaatgtaatatctcggggaaaatattagaaaagcacgtattagctgaagaatgtaacttgtagtccagctctgcagcttccttaaacttaagaaaaagattgggccagtgacaagaatttaaagacaatgtccaagttgacaattatttttctatagtccatacaaattaaataatctggcaactctggc

SEQ ID NO: 13890 - DNA, 1560 bp, Homo sapiens
  source 1..1560: mol_type = unassigned DNA
cgcgcggatccctccgcggggctcctcgtccccgtcacgctgactttccgtgcagtgctgtggtgcgaaaatgcctcgccgagacagccgatttttacgacccagcaagaggccgagctggtacaatatcctgactgtaaatcgtccagtggtaatattggcgaggacccagaccacttaaatcagagctcgtctccttctcaaatgtttccgtggatgagaccacaagcagctcctggtagacgaagaggaagacaaacctacagtcgcttccaaactctagagttggaaaaggaatttctttttaacccctatctgaccaggaaaagaagaatcgaggtttcccacgccctagccctcaccgagagacaggtaaaaatctggttccagaacaggagaatgaaatggaaaaaggaaaacaacaaggacaaatttcccgtttcccggcaggaggtgaaggacggggaaacgaaaaaggaagcccaagagctggaggaagacagagccgaaggcctgacaaattaacttctacctttaaaatttaccacagactattaaaactaataatcaccatatgctgtggacaccacctattttctttgttggaaaggaccttacctgtgtttcaagctaccttcatgtcactgctcttgaggttttctgtgctttgagagggatttgggtgtttaaaaaagtttctagtatcacatagaagctgtccttgagctgtcctatggaagggtaatttgatactgaccttgtagctatatttttataatggtttttaatgtctgagctagtgatttgcctcaacaacgtaaacttcctaatgattagcacttaataattgcatataaaatgctttattaattaaacaagtgcacttgaacattttaatatttgtggtgagtaaattaaaaggagtttattaattaaaaaaaattatgtctgcagaatactttatattatttgattacaatgtattatttatggattttttattctttcctttataatgaatagttcgggtgcgttttgtttactcctaaaaggtttctttgcgtattttctaaatgtaatatctcggggaaaatattagaaaagcacgtattagctgaagaatgtaacttgtagtccagctctgcagcttccttaaacttaagaaaaagattgggccagtgacaagaatttaaagacaatgtccaagttgacaattatttttctatagtccatacaaattaaataatctggcaactctggcaaatcgccttgtaaaatgcgtctcattttttaacttgctttcgttttgaaccgcccttgtaatcgcctgaaatcgctagttctttatgcggtggctgccgctgtgttccgttattttcagtaggtgtcatatttatttgtattgcctttgttctgttcgccgctggttttaaaccagcttgctgtgtgcatctcagacgtcggttggtacgtcctccgctgttcttcaggaaagcgatagcctcacctatttgaaacaagccctgagaggaaacgcagaaaaacctgagtgtaaacaac

SEQ ID NO: 13891 - DNA, 2418 bp, Homo sapiens
  source 1..2418: mol_type = unassigned DNA
gcggccgctccgtgtgccctggactcgccgcccgcggctcggaagctggagagtcagcgacggggcccgactgcgggaccgagggctgcaagaagaagcgaacaaatagtccccagcgcctcctctggatgcggtcgcgtctgtggtcctggcagccgctgggcgggccaggccaggtcgggccgggccgagccgggcacatggacctgggcctgcgggctctaattgcggcgcttatgttgatgattttttttttaatcacagcagcccccagtttagcggactgatttactcccggtattggtaaatatgatcacgtgggccgcgcgaccaatggtggaggctgcagcctgcgaactagtcggtggctcgggcgccggcggggagctgctcggcggcggacagtgtaatgttgggtgggagtgcgggacgcctcaaaatgtcttccagtggcaccctcagcaactactacgtggactcgcttataggccatgagggcgacgaggtgttcgcggcgcgcttcgggccgccggggccaggcgcgcagggccggcctgcaggtgtggctgatggcccggccgccaccgccgccgagttcgcctcgtgtagttttgcccccagatcggccgtgttctctgcctcgtggtccgcggtgccctcccagcccccggcagcggcggcgatgagcggcctctaccacccgtacgttcccccgccgcccctggccgcctctgcctccgagcccggccgctacgtgcgctcctggatggagccgctgcccggcttcccgggcggtgcgggcggtggcggtggtggtggaggcggcggtccgggccgcggtcccagccctggccccagcggcccagccaacgggcgccactacgggattaagcctgaaacccgagcggccccggcccccgccacggccgcctccaccacctcctcctcctccacttccttatcctcctcctccaaacggactgagtgctccgtggcccgggagtcccaggggagcagcggccccgagttctcgtgcaactcgttcctgcaggagaaggcggcagcggcgacggggggaaccgggcctggggcagggatcggggccgcgactgggacgggcggctcgtcggagccctcagcttgcagcgaccacccgatcccaggctgttcgctgaaggaggaggagaagcagcattcgcagccgcagcagcagcaacttgacccaaacaaccccgccgcgaactggatccacgctcgctccacccggaaaaagcgctgtccctacaccaaataccagacgcttgagctggagaaagaattcctcttcaacatgtacctcacccgggaccggcgctacgaggtggccaggattctcaacctaacagagagacaggtcaaaatctggtttcagaaccgtaggatgaaaatgaaaaagatgagcaaggagaaatgccccaaaggagactgacccggcgcggtgctggcgggagcgctcaagggcagcggatttgttgttgttgctgttttcctttgtgggtgtttggtgcttgatttccagaaactctccagcgacttggacttcttcttctttttttttttctttttagatagaagtgactgtgtggttggtctctgaggtatttgggggactctgtatttgctcgtttacgtgttggaaaaaccaagtggctttggggtttcgccctatcccactccctctctttcctgctccattggttccttaagaaatgctatattttgtgagtgcaagctggcttggggagccctctcttgtgtaaatgtcccccatgtttctgaaaagtgctgtagtttagtcccctcacccccagcactgcccaaacaggggccaagtgcgccccaattccaagaatgaaggcagagcgacaacagtgcggacaccccggctgctagcccacggtgaagcccggcggggttgcccaccagttgcgaaagccccctttcctcagggagcacgcgggacctcggtggagatctccagtgaggcttagaggagcccagggcctcgggcgggttggggtttgtcctcagtgcattggacgcgctgctctctcccctgaaggctgggctcgcgtgggcggccgcgggtggtggccctcccggttcctgcccgaggaccagttgtaaatgttactgcttcctactaataaatgctgacctgatcaaatggagcccagacgctggccctaaacattgtgtgcctgctttctctgcctctctgcaaaatatcacactcaggatatttctcctctacccctgggagtgagacattgttaaaaattcagggcccttccacctgacagatctctctgatgtgtctctgccttctctgcctcacatccctttgtgtaggcagatgcagcagcacagaccctgtgg

SEQ ID NO: 13892 - DNA, 2757 bp, Homo sapiens
  source 1..2757: mol_type = unassigned DNA
cttcagcctgtttatgagagtatggcctcacatgtgcaagttttctcccctcacacccttcaatcaagtgccttctgtagtgtgaagaaactgaaaatagagccgagttccaactgggacatgactgggtacggctcccacagcaaagtgtatagccagagcaagaacatccccctgtcgcagccagccaccacaaccgtcagcacctccttgccggtcccaaacccaagcctaccttacgagcagaccatcgtcttcccaggaagcaccgggcacatcgtggtcacctcagcaagcagcacttctgtcaccgggcaagtcctcggcggaccacacaacctaatgcgtcgaagcactgtgagcctccttgatacctaccaaaaatgtggactcaagcgtaagagcgaggagatcgagaacacaagcagcgtgcagatcatcgaggagcatccacccatgattcagaataatgcaagcggggccactgtcgccactgccaccacgtctactgccacctccaaaaacagcggctccaacagcgagggcgactatcagctggtgcagcatgaggtgctgtgctccatgaccaacacctacgaggtcttagagttcttgggccgagggacgtttgggcaagtggtcaagtgctggaaacggggcaccaatgagatcgtagccatcaagatcctgaagaaccacccatcctatgcccgacaaggtcagattgaagtgagcatcctggcccggttgagcacggagagtgccgatgactataacttcgtccgggcctacgaatgcttccagcacaagaaccacacgtgcttggtcttcgagatgttggagcagaacctctatgactttctgaagcaaaacaagtttagccccttgcccctcaaatacattcgcccagttctccagcaggtagccacagccctgatgaaactcaaaagcctaggtcttatccacgctgacctcaaaccagaaaacatcatgctggtggatccatctagacaaccatacagagtcaaggtcatcgactttggttcagccagccacgtctccaaggctgtgtgctccacctacttgcagtccagatattacagggcccctgagatcatccttggtttaccattttgtgaggcaattgacatgtggtccctgggctgtgttattgcagaattgttcctgggttggccgttatatccaggagcttcggagtatgatcagattcggtatatttcacaaacacagggtttgcctgctgaatatttattaagcgccgggacaaagacaactaggtttttcaaccgtgacacggactcaccatatcctttgtggagactgaagacaccagatgaccatgaagcagagacagggattaagtcaaaagaagcaagaaagtacattttcaactgtttagatgatatggcccaggtgaacatgacgacagatttggaagggagcgacatgttggtagaaaaggctgaccggcgggagttcattgacctgttgaagaagatgctgaccattgatgctgacaagagaatcactccaatcgaaaccctgaaccatccctttgtcaccatgacacacttactcgattttccccacagcacacacgtcaaatcatgtttccagaacatggagatctgcaagcgtcgggtgaatatgtatgacacggtgaaccagagcaaaacccctttcatcacgcacgtggcccccagcacgtccaccaacctgaccatgacctttaacaaccagctgaccactgtccacaaccaggctccctcctctaccagtgccactatttccttagccaatcccgaagtctccatactaaactacccatctacactctaccagccctcagcggcatccatggctgcagtggcccagcggagcatgcccctgcagacaggaacagcccagatttgtgcccggcctgacccgttccagcaagctctcatcgtgtgtccccccggcttccaaggcttgcaggcctctccctctaagcacgctggctactcggtgcgaatggaaaatgcagttcccatcgtcactcaagccccaggagctcagcctcttcagatccaaccaggtctgcttgcccagcaggcttggccaagtgggacccagcagatcctgcttcccccagcatggcagcaactgactggagtggccacccacacatcagtgcagcatgccaccgtgattcccgagaccatggcaggcacccagcagctggcggactggagaaatacgcatgctcacggaagccattataatcccatcatgcagcagcctgcactattgaccggtcatgtgacccttccagcagcacagcccttaaatgtgggtgtggcccacgtgatgcggcagcagccaaccagcaccacctcctcccggaagagtaagcagcaccagtcatctcaaagaaaaaacgtcatcagctgtgtcacagtccacgactccccctactccgactcctccagcaacaccagcccctactccgtgcagcagcgtgctgggcacaacaatgccaatgcctttgacaccaaggggagcctggagaatcactgcacggggaacccccgaaccatcatcgtgccacccctgaaaacccaggccagcgaagtattggtggagtgtgatagcctggtgccaggtaatttggggccaggacagggcaggaacctctccctggagagtggttttcctgcttttctgctgctagaaatgttgctgtatgggagctag

SEQ ID NO: 13893 - DNA, 15049 bp, Homo sapiens
  source 1..15049: mol_type = unassigned DNA
ctcaagatggcagattccgactgaggctgggggggccgagctcgcgcgccgctttcccgtccccgttgccatgaaccgcggacaccccggccccgatggcccccgtgtacgaaggtatggcctcacatgtgcaagttttctcccctcacacccttcaatcaagtgccttctgtagtgtgaagaaactgaaaatagagccgagttccaactgggacatgactgggtacggctcccacagcaaagtgtatagccagagcaagaacatccccctgtcgcagccagccaccacaaccgtcagcacctccttgccggtcccaaacccaagcctaccttacgagcagaccatcgtcttcccaggaagcaccgggcacatcgtggtcacctcagcaagcagcacttctgtcaccgggcaagtcctcggcggaccacacaacctaatgcgtcgaagcactgtgagcctccttgatacctaccaaaaatgtggactcaagcgtaagagcgaggagatcgagaacacaagcagcgtgcagatcatcgaggagcatccacccatgattcagaataatgcaagcggggccactgtcgccactgccaccacgtctactgccacctccaaaaacagcggctccaacagcgagggcgactatcagctggtgcagcatgaggtgctgtgctccatgaccaacacctacgaggtcttagagttcttgggccgagggacgtttgggcaagtggtcaagtgctggaaacggggcaccaatgagatcgtagccatcaagatcctgaagaaccacccatcctatgcccgacaaggtcagattgaagtgagcatcctggcccggttgagcacggagagtgccgatgactataacttcgtccgggcctacgaatgcttccagcacaagaaccacacgtgcttggtcttcgagatgttggagcagaacctctatgactttctgaagcaaaacaagtttagccccttgcccctcaaatacattcgcccagttctccagcaggtagccacagccctgatgaaactcaaaagcctaggtcttatccacgctgacctcaaaccagaaaacatcatgctggtggatccatctagacaaccatacagagtcaaggtcatcgactttggttcagccagccacgtctccaaggctgtgtgctccacctacttgcagtccagatattacagggcccctgagatcatccttggtttaccattttgtgaggcaattgacatgtggtccctgggctgtgttattgcagaattgttcctgggttggccgttatatccaggagcttcggagtatgatcagattcggtatatttcacaaacacagggtttgcctgctgaatatttattaagcgccgggacaaagacaactaggtttttcaaccgtgacacggactcaccatatcctttgtggagactgaagacaccagatgaccatgaagcagagacagggattaagtcaaaagaagcaagaaagtacattttcaactgtttagatgatatggcccaggtgaacatgacgacagatttggaagggagcgacatgttggtagaaaaggctgaccggcgggagttcattgacctgttgaagaagatgctgaccattgatgctgacaagagaatcactccaatcgaaaccctgaaccatccctttgtcaccatgacacacttactcgattttccccacagcacacacgtcaaatcatgtttccagaacatggagatctgcaagcgtcgggtgaatatgtatgacacggtgaaccagagcaaaacccctttcatcacgcacgtggcccccagcacgtccaccaacctgaccatgacctttaacaaccagctgaccactgtccacaaccaggctccctcctctaccagtgccactatttccttagccaatcccgaagtctccatactaaactacccatctacactctaccagccctcagcggcatccatggctgcagtggcccagcggagcatgcccctgcagacaggaacagcccagatttgtgcccggcctgacccgttccagcaagctctcatcgtgtgtccccccggcttccaaggcttgcaggcctctccctctaagcacgctggctactcggtgcgaatggaaaatgcagttcccatcgtcactcaagccccaggagctcagcctcttcagatccaaccaggtctgcttgcccagcaggcttggccaagtgggacccagcagatcctgcttcccccagcatggcagcaactgactggagtggccacccacacatcagtgcagcatgccaccgtgattcccgagaccatggcaggcacccagcagctggcggactggagaaatacgcatgctcacggaagccattataatcccatcatgcagcagcctgcactattgaccggtcatgtgacccttccagcagcacagcccttaaatgtgggtgtggcccacgtgatgcggcagcagccaaccagcaccacctcctcccggaagagtaagcagcaccagtcatctgtgagaaatgtctccacctgtgaggtgtcctcctctcaggccatcagctccccacagcgatccaagcgtgtcaaggagaacacacctccccgctgtgccatggtgcacagtagcccggcctgcagcacctcggtcacctgtgggtggggcgacgtggcctccagcaccacccgggaacggcagcggcagacaattgtcattcccgacactcccagccccacggtcagcgtcatcaccatcagcagtgacacggacgaggaggaggaacagaaacacgcccccaccagcactgtctccaagcaaagaaaaaacgtcatcagctgtgtcacagtccacgactccccctactccgactcctccagcaacaccagcccctactccgtgcagcagcgtgctgggcacaacaatgccaatgcctttgacaccaaggggagcctggagaatcactgcacggggaacccccgaaccatcatcgtgccacccctgaaaacccaggccagcgaagtattggtggagtgtgatagcctggtgccagtcaacaccagtcaccactcgtcctcctacaagtccaagtcctccagcaacgtgacctccaccagcggtcactcttcagggagctcatctggagccatcacctaccggcagcagcggccgggcccccacttccagcagcagcagccactcaatctcagccaggctcagcagcacatcaccacggaccgcactgggagccaccgaaggcagcaggcctacatcactcccaccatggcccaggctccgtactccttcccgcacaacagccccagccacggcactgtgcacccgcatctggctgcagccgctgccgctgcccacctccccacccagccccacctctacacctacactgcgccggcggccctgggctccaccggcaccgtggcccacctggtggcctcgcaaggctctgcgcgccacaccgtgcagcacactgcctacccagccagcatcgtccaccaggtccccgtgagcatgggcccccgggtcctgccctcgcccaccatccacccgagtcagtatccagcccaatttgcccaccagacctacatcagcgcctcgccagcctccaccgtctacactggatacccactgagccccgccaaggtcaaccagtacccttacatataaacactggaggggagggagggagggagggagggagagaatggcccgagggaggagggagagaaggagggaggcgctcctgggaccgtgggcgctggccttttatactgaagatgccgcacacaaacaatgcaaacggggcaggggcgggggggggggggggggcagagggcagggggacgggtcgggacaccagtgaaacttgaaccgggaagtgggaggacgtagagcagagaagagaacatttttaaaaggaagggattaaagagggtgggaaatctatggtttttattttaaaaaagaaaaaggaaaaaaaaaaagtcaataacaaaaaacccagctcaagaacccattctacgccaaactggaaaggagaagagagcaacaggaagattccagaaacggggggccccagtttttgaagaactttatgaacttttcaaagattattttcatatggcagcaagtgatacggaagactgctgtcagggacacctgatatggaaatcaaatagatttttaattaattgaacataagatttagggatttttccagaactcgaaagggtcaacagccctccagaatgtcgggctgcagcctgaggaggctgatgtttggagctggtgtgggattggcgaagcccagtccgggctccctagtcaggaaagacgggggacggccaggctgctggaaggcccccgggggcgcggggcgagttttctttttctgagcactctggataaatccctaagcaacgttgtttctcaaatgtcattaataatgtgtgttgcaaactttaggtttttttcttttctgaaaatgtattttctctttgaatccacccctagtcgcgtagcgtagggctagcggtcgtcacagacaccctagtagaatgtagcactcagcacccttgtctcctaccttgtgttcaactccaatgataccaatagaatattcctcaatgtaattgcacaaaaaaaagcgatataacataggcatgtaaccaatgtggcggtgcaggtgtgcgggtgagcgagcacgtgtgggtgtgcacgcgccgccctccccgcgtggccctcggcgccgccaccctagctggcgcagtcttgacactgcatccttccctcctagtgccttaccgagcgacagacgcggcgtgagggtttacttccactggtactccaagaaactgaggctagtcagacacaatctcagctcttctgttgtgctgttgtaacagtttacgctggccttttttttttctttttctttttctttttaaaatgttaatgcccgttgtctttcctgggctgtttgctagcggaaggatgccagggaagccagcaggagctaggagagagtccgtggatctcgaaagaaatatgggagacagatgcccggcgggtgcgtctggagatggggacggcgggagttgagttgtggcagtagttgagttgtaatttgtgggcggaggcccagagagactccccacccttcacccctgccccactctgtccccagttccgccatttgtgaggccagaggtttccggactgttggcctcgccaggcagccgtctcccgccccaggcggcatcccccagtccctcccgcctccacgagagcctggagctctcagcctcgcccggggctccactctctcctccggctccctgggctgttttgctctaacgatcttgccagatccctccctctgtagacaaccaccaacctctgtttgctgttgaattctctcctcacattacccaggtctgctcaagacatgattttggttttggtttctgagggttctagtgggcagaaggttggagggacacttatgagggtggccgggggtctgacgctgcactttggaaaaactcacacagttgaatttccaaagaaatctgccctttgccctctttgcacctttgatacattctggaagttttctcaggctttggacacttctggggatggaggtgtggagaagtggggagttccctctcttcatagtaaataactctgaaatatgtgaatgtgaatggcaggagaatctggccaaggatggggccgaaaagggtggttctaattgtttgcttctgatgttgagtctttagctgaccccacaggcaggtttccaaggtgcaaagagatctttcccgagtcagcggccccatcctcatcctccctccctttacttcctcactgtgcagtctccctcaaggatctactgtgaaaggtgtgtttgtagtgatatccaacctaactcagtaacgaagtcgttacttagctcttagctgtgaaataactctggaaacttccccaccccaaccataaattcttacttataaagaaacaggtccccaaactggaaacagcttagtccaggcctcagcgagaaggaaggacaccatgactgctccatgctgggcacagccgggcagtcttgccaagtgcctgctggaggctgtgccggcaagaggcctgcagcaaggagattcccttccctcgggccattatcaatactgtctttatctggaggtggggaagcgcagccctctgagacagcaggacaatggtcagttcagagagggtgagggcagcaaacgcttcagaggacacagaagccagaggacccccccccgccccacagctgggtcagcctggaaaatccatctattagggactttttggcagccagatggcagcaatagcccattaggtctcatcccgagttccaagtcttggctgcaaatgagcctcagttcgccttactggagagcacccccagattcctgggcacagttcatttccagccctttctagatctgatcttttagggggaaagacagcttaaaatgttcttttcattttaaagaaaattattctgtctgcttaagttggaggctacttactctttcacctgacattttctttccttttattcttccagatcaggaatgaaatttccatgctgctcataaagataatattattgtactaattatttttattaccattgtaattatgatcattatgttgatattttagtcagggttttaaatgcacatttattccaagtatctttgtgttttctctttaatatttaaacttattctctctgtgagtatataagtagactggagggacatccagatgtccagttttgtcaggcaaaaaaaaaaaggaaagacttaggaagtaggaaaattgtttctgtcatctctatcccaacaagagacgtcaagaaagatccaccacagaacaaaagtttaaagaagaatcaaagccttgattgggcttctgacaacatggtcaccatcaaggttgtcattttctagatcccagaggcctgggatgcgacgtcaggtggcatctcatgggctcggggaatgtcgagtcactgactgtccagcccttagccagcttctctcccacatcctcagagctctcctgtgcttctgaaatctgttaactaaatctttggcttgcctctggtatttaagcaagaaaattccctcccagaggtgaccccatccgcttccccacaatccatccttttgccatcggcgcacctggggcgtggcttaggttcttcaatgcagggacatttgccccctcccagaagctgctgggcacagtgaggtggcgtaagagtgactggcaggtggtaccttccccaggaaatttcaccacaccacccagttcctcagcctgccccctccccctgtgatgcatgcccccagcacccaattctagccagctggaagtgggtggagggacagcaggaggccagagaaaccctgaacaaagctgggcggctgctcaggcatcacaggctgcaccccctctgaaagcatccccactgggctccggccacatcttcagtgcactgtgctgtgtgcgctgggtgctcacacgctgtccccagacccacaaagtgctaggccccagttgaagaaaggggtgaaatagccagcttcaccgaagggaagggaagggaagtattgggcgatgccagccccacagacgctcagcaaacattagtgcacattctcctagtcctcacccaatggcctcctctacccccatgcatggagctgccacatcagaagccccaagagaagctccctgcaggagaggccagctccctggatgcccaattgcatacctggccgaatctgccattgagtcaccttagcaaataggctgctgtcactaggaccaagctctcaagcagagggatgccaacctagtccttacttagcccacgaatcatctagagcatcctctagtcttttgtgggctccctccttcccatttgaagagacattgttcagaggaagaggggaagatttgaaatgtcaggtcacggaggagtgtttaactggagcctggtgaaccgcagggcaatttgcttctgctcactgggttctgactggcccgtctggacgtgggcccccatgtctctgtgcttagggcctcttcatgatgttttggatgtttccaagggaagtgggtgagcagatcaaggggtgggagagtcgaggcttgatgccagttaatactgtgaagtggagcgtgcggtcagtggaattcagaggaaaaagaagggttggagcaaagcggcattcatctcctggactgttagcctttctagtcttcctggtggctgaggtgttcacgggctgggggagccagctgacctttgtcctcttcaacctagaagactcagcccgcccagacaccaacgtgtgagacggatggacatcaggaagggaaggggagattagcccaactgctgacagaacgatttcccttggttggaccttgggaatggcaaacactcatattggaacaagcttggggtggaagatttaggccgtgtgagcatgtgtgagtgagtggaacaaactttcttggaaactggagggaggagatgaggaggcttcgggaagtattactgatggctcatggttgagagagcgacgtggggacccagctcgccccagcttttgtcccaggttctctttgtctgatgctgagggcagggtggggtgtgggaccaccactcttgttggcctgtcaagtagaccctaggacagaaaatggaaagaaggaaatggctcggtgctctcaactagcagagagaattgaggagaggtaagggttccttctgcaggccagcctgggactccacagcgccagcaggagtgacttggccacaagacattccagccccagggactttgcaggcttcattccctgtctgtgtcttttccttctggtgtgttttacagacttctgatggggaagcttcaaacttgagcaggccagagatgtccttaccaaattggaaaggaaggtgaaactgttcctttctttagccaaagaacccttctcaaagacgcctccagaaatggacaaaatggccttcccttcgttcctttccaggcaataatgacatcattagtgatgcaattctatttgtctttctctttcctctctgtccttttttttaaaaaaaaaaaatgcatttatttcaaaactgtgctattcttttaagaggagtggaggtgaccccttcgatgctgctgctatcgggagacaaggtgccataccaatacgtgggcttgactaatcccaggccaccatgggagagagcaaagcagggctgccaggagttcagttgcatcaagggcgtagagcacgcgggggctgggctcggaatagcagtacttttccactttgatgccttagaactctcacttctcatctccacagaccagactcagtaaaatctcaggccactagagaatggaaggcggtgaaacaggatttaaatgcaaaaaaaacctattggaggcttttggcaccgtggctcactagagggacccagcatagtagaggtttctcttgttgcagcttctgaaaagttcaaaaaagaactccaggccgttcttccctcaaacccagtgagagtttgcagagaagtgccccctgcagggctcccgtcccagaacaccagcaccagagagggtcttcccgatgccccccgctggacttgcccaagcctctgggagcccctcatctcagatccctgtgttgaacatgacactgactgtcccttatttgttaaaatttgcaatatctctcaagtaaataatagccaacatttgttgaatgctttcatgactcccgggctaaggcctttatgagcgttgtctcaaggggccccaacagccatcccacagggagggggataacagcccccatttatagataagggagctgaccggatgctctgagaagtggcaggtgttgaaggaaggataaagcagtgatgggccagaatccccaaggttcccttttttgttcatcaggcccttcctgagatgtgatttttaatcttttaactttttttaattaatagcaatgcgtggcctcatatttctatgaaccatttagtgatactcccgcttcctgcatgccacacactgtgctgggaattgctcatgggttgtcctgtttcatcttctccgtagccctgtgagatcggcaatattagtccccctacagccaaggaaactgcccagagccacacaactcttgaggggcgaggagggcttgaacctgagtctgcccagctccagaactgagcttgcagccattagccacagctgtctcctgcatgtctgagcaaagaaaggcctttacacagcatcaccctgtgccatcccatgcaccgtgggactcagctaaaggactgtgcaaagagggggctcctgagttggatttaggcaaaaggggcagaattcgtttgatttttagagaaaatctctggagagtttcttttgattcatagaattccttttagatttctttccagcataccaactagctttagtagtgctgctacaaccagctcttataagtaagagtgaaaaagtattcttttcttctttaaaaaataagtttttcttgcttatagttaattctagaaaggcaatactaaaggtatatatttttttcaaaatgctattttttactgcacttgataattatcctgacagctctgatctctgtaatagattcactcttcagctctgggcagaaccagaggcagggttcacaccaaatttgtaaataccatatgtgggtctggtgtccaggaacttttttctttctgttaaaaaaaagaaaaaaaaaagaaaaaaaaaaagaagtagaggtggaagaaagacaagacttagaggaacaaaagaatgttttcttttgagatactcttctcaaagaaatagcaacaattgtataaacaggaaaaccagccagctttcatgataaaaggaaggcgtgtctcttgccctggtatgagattaacagaaatacagatgcatttttattttgattgaaagatggtgagaatgtagaaatgcttaggactagatttttaattttttaaaataactattatcatttattatgaaatatttgttcagttgttttgagtgggtttcttgttccttttttcatttaaaaccttctttgttgactggctccaggcttgtttgcctaaattcttaggtagtttacacaagttctagaatcttttagaactttaactccattggaagcaaacctaactaatcggagtttgagatcctggttggtttcaataggtattctggaattctggcagaacacctaaagattttttttttttttagaaggttttagatacattatcttacacaaactgtgacctaatggcaataattacctcaaatgtgggcattcatcctggttttagccttttttgaaatcatgtagccagcttgatcttggaatttaaagactatgaattctctgtgggctgaaaataatgattacttcatacccccggtcatcgttgcttaagtgaattctgaaaatagctcatctttacaacaaaaattaaaccaaggaagagattattctttgtgtgttgtactcaaatgcgatgttcaaatgcacatgttaagtatatatgtttttagctactgtaaaatgctgttagccttctaagctatcaaaacagtcacattttaaatgagtaaactaaacaattgactgtggatacttaagcatatttctggctacgttttatagttaaagtgttttatagtttacatttagactggtactttttaaagaaaagttctgtttataactgacatccgcaaaccccagtgaatgcctcttagttggaggttgtgtctcccccaaggcaagtgtgttgtcccagactcttctgtagtccagcatgcgcacttccctctggattattactttccacgtgaactcaagagaacatgaaaggcaatccagatggagggaaaaggtgtgagtccgcagcccgggccagatgcgaaggtctcatgcgtgtcgtctaaacacttgtcttcaaggccttctctctgacatcttggaagagtcattgagaacagataacctggttcattgatttttgtcttgatttgaatatttaacttattaatagatccactgatttccaggcaccaggcagtagaagagactgggattcaggtgaccatgaaggcacagctgctacttctgggccgggggtgatattttgatcagcgttttgtaggggaggaccatatacccctattcccatggtcgctggctgggttttccatatatctgctgtcatttattcgttttccccttaaaagcaaaatcaatgtaaaaggctatgtttacgttttactcattgtccagcttagactcaaagtctagttcggtgggagggggaccttagcatcctctcagagatggtcagggctgagcaggaggaggcagagacagaggggcagctcagcctggtccattgagacccactctaaacagacatcatatttggaacaagaagatgcttcgagacaggaatgggccccactgtcatgcagaaacagactgggggaatggcagtttccctgagtcttggtttcttttatgttttctcttgtgccaccaccaaactgcagaggacctgctgtgacctaaagggcattcctttagcagataagaccttgaaaactgcaaaacacctgggaccagggagcttttaaaaaatacaaaaaaataccacatttgctttttccctgtgaactgtattgacagcgtgttcttaggacagtcttttggtggaaatgttactgtaaaatagttttcatctcacccctcctaatcatactcccactttcctgtttgtgtggtggtgttgctgttttttcctttacatgaattaaccaaatgaattttgtgtcattgtttttggggcttatatttttaaaacatagaaattgccttttgttcatttgaaaagtaagtatgttgtatctgaaaaagggctctgcctctgctctccctcgcttccttgtaaccaatctccaaacgaatctctcctggcaccgcccccttccttatatagggtcactgtccccggggccacctctgcctccaccctgctgtcaccactgccctgggccaaggcacccaggactcccagaaagcgcgagagccagcaagaaggccccactcagccttgagactggtggtcacacctccctgtcagagtcgcctgctgggctgaaggggcaatggattgtcattgttgaaattgtttggctcaggttataaggaggaacttgggaagtagaaagtgacttgaccatgtgcatccttggtagcttcctgtaactaacaaatggaacagagagcacacccccgccccgccccaccccaagcagatgttcccgtcagcgctgccctgagtcagtcggtcccccgtttctgctctcctcccttttgtgttcctgctcacttcaagcttcttccatggactttccagggcacagtcatctctagcccccaaatcatctcttcatcctctgtgtgtgcatttttttaaccaaatgaaatagacaagaaagtcatactttggggcagcagaatttctaatttagtagaatcactgtatagagatagatgttgatatatatgtttgtgtatatatatcaaaccaaattggataggagaagtatagctttacagatgaggagaaggagctctttagaggtcggagtcaagactggtgtcttggacgtgcatgggctgtgtcccaggccactccgcacacatggggctgaggcgtggcgccgggcccttgtcatccacctcaccacggcagagccagcaggccctgtagggtgctgctgctgtctcactgggtcccagcttcaagcgcatcagtgggtgacgggggcaacaaatcagagtgactggaagtttccatcccgttttgctttgaccacgtgtactgagctgcagcctctgatactctgtcacgtttccaaaaatggtatccattaggatagaaagagaatggatctgcagaaatgtttacctttcaactgctcatgaattcaggacactggatagaaagactcactccccaaaatgagaacagggaagaggagacccggcgacactaagtcaccaggtccaaggaacgtggctccctccccagggtcatctcacctagatctttctctcccaggtcatctcagctcaatctcaataaccctatgaaagccctggtctgttgtgttccttcaccgtacggtttctgtaataaaaagtgttaatccatgttaatctgtgtgaaaattattgcgtgcaacagtattttctcgtgtacctctttttcctatgtgaattgtccctcttttttatttataaatgtctacttttgtttttttaaagacaaaccaatgtgttgtagacctatatgtaacctattccttagtctcatattataggtatgttataagaatggatattttacttggctttagaatgttttacaagaaaactaattcttaactgatcaagtccttgctactaaaatgcttgtgtttttcatcatgacgtcgtgtgcttctaaattaatcattttcgttgtagaaaaatggagtgaatttatattagtcttggaaactaataatagcattgtaaatttatgagatgattttaacagaaaaaatatagaagaatatagttattttaattgtaatattactaactgtagggtgagaaaaaggggggggggtcccattgtggtgaactatgttatagcttgttactcatagtttctttttgatcattttttcggtctccgaggtgaaatgacttattaattaaaatttgtaaactcacatatgcatattgtatatgtgtagaaatgtaatcacactttgtcttggaattacattaaactgtttgaaatcactgta

SEQ ID NO: 13894 - DNA, 3969 bp, Homo sapiens
  source 1..3969: mol_type = unassigned DNA
cacgggaggcggtgatgcgggcgcgggcggcctcggctgcgccgagagcggagacacaggctcaagatggcagattccgactgaggctgggggggccgagctcgcgcgccgctttcccgtccccgttgccatgaaccgcggacaccccggccccgatggcccccgtgtacgaaggtatggcctcacatgtgcaagttttctcccctcacacccttcaatcaagtgccttctgtagtgtgaagaaactgaaaatagagccgagttccaactgggacatgactgggtacggctcccacagcaaagtgtatagccagagcaagaacatccccctgtcgcagccagccaccacaaccgtcagcacctccttgccggtcccaaacccaagcctaccttacgagcagaccatcgtcttcccaggaagcaccgggcacatcgtggtcacctcagcaagcagcacttctgtcaccgggcaagtcctcggcggaccacacaacctaatgcgtcgaagcactgtgagcctccttgatacctaccaaaaatgtggactcaagcgtaagagcgaggagatcgagaacacaagcagcgtgcagatcatcgaggagcatccacccatgattcagaataatgcaagcggggccactgtcgccactgccaccacgtctactgccacctccaaaaacagcggctccaacagcgagggcgactatcagctggtgcagcatgaggtgctgtgctccatgaccaacacctacgaggtcttagagttcttgggccgagggacgtttgggcaagtggtcaagtgctggaaacggggcaccaatgagatcgtagccatcaagatcctgaagaaccacccatcctatgcccgacaaggtcagattgaagtgagcatcctggcccggttgagcacggagagtgccgatgactataacttcgtccgggcctacgaatgcttccagcacaagaaccacacgtgcttggtcttcgagatgttggagcagaacctctatgactttctgaagcaaaacaagtttagccccttgcccctcaaatacattcgcccagttctccagcaggtagccacagccctgatgaaactcaaaagcctaggtcttatccacgctgacctcaaaccagaaaacatcatgctggtggatccatctagacaaccatacagagtcaaggtcatcgactttggttcagccagccacgtctccaaggctgtgtgctccacctacttgcagtccagatattacagggcccctgagatcatccttggtttaccattttgtgaggcaattgacatgtggtccctgggctgtgttattgcagaattgttcctgggttggccgttatatccaggagcttcggagtatgatcagattcggtatatttcacaaacacagggtttgcctgctgaatatttattaagcgccgggacaaagacaactaggtttttcaaccgtgacacggactcaccatatcctttgtggagactgaagacaccagatgaccatgaagcagagacagggattaagtcaaaagaagcaagaaagtacattttcaactgtttagatgatatggcccaggtgaacatgacgacagatttggaagggagcgacatgttggtagaaaaggctgaccggcgggagttcattgacctgttgaagaagatgctgaccattgatgctgacaagagaatcactccaatcgaaaccctgaaccatccctttgtcaccatgacacacttactcgattttccccacagcacacacgtcaaatcatgtttccagaacatggagatctgcaagcgtcgggtgaatatgtatgacacggtgaaccagagcaaaacccctttcatcacgcacgtggcccccagcacgtccaccaacctgaccatgacctttaacaaccagctgaccactgtccacaaccagccctcagcggcatccatggctgcagtggcccagcggagcatgcccctgcagacaggaacagcccagatttgtgcccggcctgacccgttccagcaagctctcatcgtgtgtccccccggcttccaaggcttgcaggcctctccctctaagcacgctggctactcggtgcgaatggaaaatgcagttcccatcgtcactcaagccccaggagctcagcctcttcagatccaaccaggtctgcttgcccagcaggcttggccaagtgggacccagcagatcctgcttcccccagcatggcagcaactgactggagtggccacccacacatcagtgcagcatgccaccgtgattcccgagaccatggcaggcacccagcagctggcggactggagaaatacgcatgctcacggaagccattataatcccatcatgcagcagcctgcactattgaccggtcatgtgacccttccagcagcacagcccttaaatgtgggtgtggcccacgtgatgcggcagcagccaaccagcaccacctcctcccggaagagtaagcagcaccagtcatctgtgagaaatgtctccacctgtgaggtgtcctcctctcaggccatcagctccccacagcgatccaagcgtgtcaaggagaacacacctccccgctgtgccatggtgcacagtagcccggcctgcagcacctcggtcacctgtgggtggggcgacgtggcctccagcaccacccgggaacggcagcggcagacaattgtcattcccgacactcccagccccacggtcagcgtcatcaccatcagcagtgacacggacgaggaggaggaacagaaacacgcccccaccagcactgtctccaagcaaagaaaaaacgtcatcagctgtgtcacagtccacgactccccctactccgactcctccagcaacaccagcccctactccgtgcagcagcgtgctgggcacaacaatgccaatgcctttgacaccaaggggagcctggagaatcactgcacggggaacccccgaaccatcatcgtgccacccctgaaaacccaggccagcgaagtattggtggagtgtgatagcctggtgccagtcaacaccagtcaccactcgtcctcctacaagtccaagtcctccagcaacgtgacctccaccagcggtcactcttcagggagctcatctggagccatcacctaccggcagcagcggccgggcccccacttccagcagcagcagccactcaatctcagccaggctcagcagcacatcaccacggaccgcactgggagccaccgaaggcagcaggcctacatcactcccaccatggcccaggctccgtactccttcccgcacaacagccccagccacggcactgtgcacccgcatctggctgcagccgctgccgctgcccacctccccacccagccccacctctacacctacactgcgccggcggccctgggctccaccggcaccgtggcccacctggtggcctcgcaaggctctgcgcgccacaccgtgcagcacactgcctacccagccagcatcgtccaccaggtccccgtgagcatgggcccccgggtcctgccctcgcccaccatccacccgagtcagtatccagcccaatttgcccaccagacctacatcagcgcctcgccagcctccaccgtctacactggatacccactgagccccgccaaggtcaaccagtacccttacatataaacactggaggggagggagggagggagggagggagagaatggcccgagggaggagggagagaaggagggaggcgctcctgggaccgtgggcgctggccttttatactgaagatgccgcacacaaacaatgcaaacggggcaggggcgggggggggggggggggcagagggcagggggacgggtcgggacaccagtgaaacttgaaccgggaagtgggaggacgtagagcagagaagagaacatttttaaaaggaagggattaaagagggtgggaaatctatggtttttattttaaaaaa

SEQ ID NO: 13895 - DNA, 7408 bp, Homo sapiens
  source 1..7408: mol_type = unassigned DNA
cctcgccctagccaagccgtccccaccccaaatccccgggaaggaagatgagggagacgggcccggcgcttagcagccagagcagcagcagcagcagcagcggtcgggggagggtgtttcgccgtttcctctcagccgccaggacaagatggcagcggccgcggagaggggctgagcccgggctgggtggtgccgcctgctgaagcgcctggctcccggtccccggcacggccctgcgccccaccccggacatgctcagggctgcggccgcccgaagaggagagagcgcgggcctctaggaaggtatggcctcacaagtcttggtctacccaccatatgtttatcaaactcagtcaagtgccttttgtagtgtgaagaaactcaaagtagagccaagcagttgtgtattccaggaaagaaactatccacggacctatgtgaatggtagaaactttggaaattctcatcctcccactaagggtagtgcttttcagacaaagataccatttaatagacctcgaggacacaacttttcattgcagacaagtgctgttgttttgaaaaacactgcaggtgctacaaaggtcatagcagctcaggcacagcaagctcacgtgcaggcacctcagattggggcgtggcgaaacagattgcatttcctagaaggcccccagcgatgtggattgaagcgcaagagtgaggagttggataatcatagcagcgcaatgcagattgtcgatgaattgtccatacttcctgcaatgttgcaaaccaacatgggaaatccagtgacagttgtgacagctaccacaggatcaaaacagaattgtaccactggagaaggtgactatcagttagtacagcatgaagtcttatgctccatgaaaaatacttacgaagtccttgattttcttggtcgaggcacgtttggccaggtagttaaatgctggaaaagagggacaaatgaaattgtagcaatcaaaattttgaagaatcatccttcttatgcccgtcaaggtcaaatagaagtgagcatattagcaaggctcagtactgaaaatgctgatgaatataactttgtacgagcttatgaatgctttcagcaccgtaaccatacttgtttagtctttgagatgctggaacaaaacttgtatgactttctgaaacaaaataaatttagtcccctgccactaaaagtgattcggcccattcttcaacaagtggccactgcactgaaaaaattgaaaagtcttggtttaattcatgctgatctcaagccagagaatattatgttggtggatcctgttcggcagccttacagggttaaagtaatagactttgggtcggccagtcatgtatcaaagactgtttgttcaacatatctacaatctcggtactacagagctccagagattatattggggttgccattttgtgaagccatagacatgtggtcattgggatgtgtgattgcagaattatttcttggatggccgctctacccaggagccttggagtatgatcagattcgatacatttctcagactcaaggtttgccaggagaacagttgttaaatgtgggtactaaatccacaagatttttttgcaaagaaacagatatgtctcattctggttggagattaaagacattggaagagcatgaggcagagacaggaatgaagtctaaagaagccagaaaatacattttcaacagtctggatgatgtagcgcatgtgaacacagtgatggatttggaaggaagtgatcttttggctgagaaagctgatagaagagaatttgttagtctgttgaagaaaatgttgctgattgatgcagatttaagaattactccagctgagaccctgaaccatccttttgttaatatgaaacatcttctagatttccctcatagcaaccatgtaaagtcctgttttcatattatggatatttgtaagtcccacctaaattcatgtgacacaaataatcacaacaaaacttcacttttaagaccagttgcttcaagcagtactgctacactgactgcaaattttactaaaatcggaacattaagaagtcaggcattgaccacatctgctcattcagttgtgcaccatggaatacctctgcaggcaggaactgctcagtttggttgtggtgatgcttttcagcagacattgattatctgtcccccagctattcaaggtattcctgcaacacatggtaaacccaccagttattcaataagggtagataatacagttccacttgtaactcaggccccagctgtgcagccactacagatccgaccaggagttctttctcagacgtggtctggtagaacacagcagatgctggtgcctgcctggcaacaggtgacacccctggctcctgctactactacactaacttctgagagtgtggctggttcacacaggcttggagactgggggaagatgatttcatgcagcaatcattataactcagtgatgccgcagcctcttctgaccaatcagataactttatctgcccctcagccagttagtgtggggattgcacatgttgtctggcctcagcctgccactaccaagaaaaataaacagtgccagaacagaggtattttggtaaaactaatggaatgggagccaggaagagaggaaataaatgctttcagttggagtaattcattacagaataccaatatcccacattcagcatttatttctccaaagataattaatgggaaagatgtcgaggaagtaagttgtatagaaacacaggacaatcagaactcagaaggagaggcaagaaattgctgtgaaacatctatcagacaggactctgattcatcagtttcagacaaacagcggcaaaccatcattattgccgactccccgagtcctgcagtgagtgtcatcactatcagcagtgacactgatgaggaagagacttcccagagacattcactcagagaatgtaaaggtagtctagattgtgaagcttgccagagcactttgaatattgatcggatgtgttcattaagtagtcctgatagtactctgagtaccagctcctcagggcagtccagcccatccccctgcaagagaccgaatagtatgtcagatgaagagcaagaaagtagttgtgatacggtggatggctctccgacatctgactcttccgggcatgacagtccatttgcagagagcacttttgtggaggacactcatgaaaacacagaattggtatcctctgctgacacagaaaccaagccagctgtctgttctgttgtggtgccaccagtggaactagaaaatggcttaaatgccgatgagcatatggcaaacacagattctatatgccagccattaataaaaggacgatctgcccctggaagattaaaccagccttctgcagtgggtactcgtcagcaaaaattgacatcagcattccagcagcagcatttgaacttcagtcaggttcagcactttggatctgggcatcaagagtggaatggaaactttgggcacagaagacagcaagcttatattcctactagtgttaccagtaatccattcactctttctcatggaagtcccaatcacacagcagtgcatgcccacctggctggaaatacacacctcggaggacagcctactctacttccatacccatcatcagccaccctcagtagtgctgcaccagtggcccacctgttagcctctccgtgtacctcaagacctatgttacagcatccaacttataatatctcccatcccagtggcatagttcaccaagtcccagtgggcttaaatccccgtctgttaccatccccaaccattcatcagactcagtacaaaccaatcttcccaccacattcttacattgcagcatcacctgcatatactggatttccactgagtccaacaaaactcagccagtatccatatatgtgaaaaacagtatattggggaagctcaatgatacaaacatttgattaaaaataaaaacatggtatttaatattagccatggcacaagaaaattatttttgaatcatgtagacttgggtgcaatttaaacaactttgagctttaaaaactcacttttgatgtgttttgcacatttggtataacttgtctttggtcatgttatcttcttatgtagtaactctagacaggtgacttatgggagcagaagtccagttttgctcctgctattttttataaattgccttctaactagtgcaagacacgtctacatttgggaagccattctgtgtacagacttagagcaacagatgcacatatgtcagaattacagcatacaagtgaattgtattatccgtgtcttagtgtataaatgttgggtcacttacctaagaaattgagctattgttctttacatttgcatgtgtcttttgcatgggcaaaatgttgcctagactttgctcttaaatgttgttctaataatctcagctgcattgtaaaccgttcctacacatagtgccttaaatatttgaggttgttaatgttattacctatatataaatgttgaggactgcagcacttaaaattcagacctactatttagtttccttttgatagcgtaatgttcatttttgtttttgtgtggtatgatttcaggtagtagctgtttttttccttattaagagggcagcatgtttgctatagctgaattctgctgtctgatttttcagaatgatctagcttcaagaaaagcaagcagttagtagtgcttaagaaaaattgattcagtatctaatggatagttgataactgtcacagcacagcattttatatactgttaagtgaaactgcaatacaatctaagtttattttgagagtgtttgctgtataattggacttaataaaatgtttagaggtacagtaggcatgactttgggtagataataaaatgcaaaatgctcattgattcatgatgtggttttatcttagcttgggcaaaccatgcagtatttaataaatagtagcagaacttttactattgaagcttgaaaagatgtgagttctttgtgtgcaatttttgatttatgcatgtgagagggttttttttttttttaagtatttttacattgcagtacttgttttgcttgttggtgatgtttgcttatttaatacattccgtcagggacagaaattacatgcttttttttctttctaggaagtgtgttgagttccccccttccccgacatttttttcttttttgggtggtggtgatggtagtggttatgtctgtttaaatgaagttgcttttacagcaccaaagacttaatcatccatttcctatataaaggtagctactttttgcatagacctcaagtatattgtagtgtaaaggtggaatttaaggaaaggtattaaattgaggctgtgttttagcttacaggcaagtaataaattgtatcatttatcttgaatgtatcatagataagctgctatataacgattgccacttcagatagctgtgaaattaggtgattaactagttgttatttagccttctaatttctgtataagtctaattacatgaatagaaattggggttttgattttttactttgcttttctgtttggagtgtcattgtaactactgtattgtaaatggtggaaaataattgcatttgttactttggggtgtgttatttgcatcagtattttatctctattaatgtttgtgctcatcactgcatattaaaaaaacttggatgtatcagtgtaacttaattttttattttcatactggcattgtagacacttgagaaagctgtatcttgcaggcttgacttaacttttttccttaaaaatctggaatataatcttacagcatttactggaataaacagtacaaagcattggagtgtaaaactctagatgttttggatttacagcgtttctttgataaatgaattgtataccactagtacagctctagtacagcgttcacaataagctaataatggataagttttcttcactccattaacacaagcagtgttttatttaataatcatcaatgaaataaatgtgcctgaaattgattttaaaaattacagtattagatcataaagtaaaaaccagcagtacatttttagtcacactgaaaatgaaggacttaattttccccacaagtttcagtgtttttagtaattaattctatgcattttatacaaatagaaatatatatatataaaaaattaaatgtttaaaaaggagtagcctaagattaatttaaaagattatttacagatgacacatttatggggtcactatttaagtaaatttgctgccctccacagccttctaattttatttatatgttccagcagattattaggatctgcttacttcttaggaaagaatcaatgctggcaacacattgtttcagaaacaccaagtgcaaaggattgattgtatcacaacaggtacaaaactgacagagttttctttttgtttagggccatgtttactaccctgaaatgttgtattttttgtctttaatttccaagacttaaagcagtcttgttaaattgacataaatggtaaacttcaacattttcataatacagtattaatgtttgataaaggtatatcccagttaactacactgctctttaattgcaatcatgggcattttaatgtattttaaaataaatttcaaaattctgctaaattcttaatttagcatattgacaaagtaatctggatttataccttttaaaaaccattttgaccagttttcttcggttttaatgctttcttaaataaaacactgcatgatttccaagttgcatatttgcatactattttaatttgcaaaatgttttttaaatcaaatatcctgatatttagttgttttttttttcctccagcgtgtttaattaaatatgttactgtattagcaaaacattttcatttttaaaatctgctaattttaaacttggactgtgttaagtaaaagttaaatcatacactgcaaggtgtaggaagatttgttttaatgaatccaatgatacagatttgattactaagtttgaactgttaattgtttaacaattttagacttgtggctttctttctttggtttatttgtttttgcttttactcctatgctacactagtttgccatgtagcaattgcactgtgcaatattacaataaggactgggaaaattttatggatgtaatgtctattacggtttgcgatagtatttctctctagttctcagtgatttaaatgtgaccaagccttctgtactttgtcacaaaaagcgggttttccaggtgactattttggtgagtgtcaaaataagaatttatggtgtattactgtcgattcactttgaattaaaatatatatattgcagcaaa

SEQ ID NO: 13896 - DNA, 7345 bp, Homo sapiens
  source 1..7345: mol_type = unassigned DNA
cctcgccctagccaagccgtccccaccccaaatccccgggaaggaagatgagggagacgggcccggcgcttagcagccagagcagcagcagcagcagcagcggtcgggggagggtgtttcgccgtttcctctcagccgccaggacaagatggcagcggccgcggagaggggctgagcccgggctgggtggtgccgcctgctgaagcgcctggctcccggtccccggcacggccctgcgccccaccccggacatgctcagggctgcggccgcccgaagaggagagagcgcgggcctctaggaaggtatggcctcacaagtcttggtctacccaccatatgtttatcaaactcagtcaagtgccttttgtagtgtgaagaaactcaaagtagagccaagcagttgtgtattccaggaaagaaactatccacggacctatgtgaatggtagaaactttggaaattctcatcctcccactaagggtagtgcttttcagacaaagataccatttaatagacctcgaggacacaacttttcattgcagacaagtgctgttgttttgaaaaacactgcaggtgctacaaaggtcatagcagctcaggcacagcaagctcacgtgcaggcacctcagattggggcgtggcgaaacagattgcatttcctagaaggcccccagcgatgtggattgaagcgcaagagtgaggagttggataatcatagcagcgcaatgcagattgtcgatgaattgtccatacttcctgcaatgttgcaaaccaacatgggaaatccagtgacagttgtgacagctaccacaggatcaaaacagaattgtaccactggagaaggtgactatcagttagtacagcatgaagtcttatgctccatgaaaaatacttacgaagtccttgattttcttggtcgaggcacgtttggccaggtagttaaatgctggaaaagagggacaaatgaaattgtagcaatcaaaattttgaagaatcatccttcttatgcccgtcaaggtcaaatagaagtgagcatattagcaaggctcagtactgaaaatgctgatgaatataactttgtacgagcttatgaatgctttcagcaccgtaaccatacttgtttagtctttgagatgctggaacaaaacttgtatgactttctgaaacaaaataaatttagtcccctgccactaaaagtgattcggcccattcttcaacaagtggccactgcactgaaaaaattgaaaagtcttggtttaattcatgctgatctcaagccagagaatattatgttggtggatcctgttcggcagccttacagggttaaagtaatagactttgggtcggccagtcatgtatcaaagactgtttgttcaacatatctacaatctcggtactacagagctccagagattatattggggttgccattttgtgaagccatagacatgtggtcattgggatgtgtgattgcagaattatttcttggatggccgctctacccaggagccttggagtatgatcagattcgatacatttctcagactcaaggtttgccaggagaacagttgttaaatgtgggtactaaatccacaagatttttttgcaaagaaacagatatgtctcattctggttggagattaaagacattggaagagcatgaggcagagacaggaatgaagtctaaagaagccagaaaatacattttcaacagtctggatgatgtagcgcatgtgaacacagtgatggatttggaaggaagtgatcttttggctgagaaagctgatagaagagaatttgttagtctgttgaagaaaatgttgctgattgatgcagatttaagaattactccagctgagaccctgaaccatccttttgttaatatgaaacatcttctagatttccctcatagcaaccatgtaaagtcctgttttcatattatggatatttgtaagtcccacctaaattcatgtgacacaaataatcacaacaaaacttcacttttaagaccagttgcttcaagcagtactgctacactgactgcaaattttactaaaatcggaacattaagaagtcaggcattgaccacatctgctcattcagttgtgcaccatggaatacctctgcaggcaggaactgctcagtttggttgtggtgatgcttttcagcagacattgattatctgtcccccagctattcaaggtattcctgcaacacatggtaaacccaccagttattcaataagggtagataatacagttccacttgtaactcaggccccagctgtgcagccactacagatccgaccaggagttctttctcagacgtggtctggtagaacacagcagatgctggtgcctgcctggcaacaggtgacacccctggctcctgctactactacactaacttctgagagtgtggctggttcacacaggcttggagactgggggaagatgatttcatgcagcaatcattataactcagtgatgccgcagcctcttctgaccaatcagataactttatctgcccctcagccagttagtgtggggattgcacatgttgtctggcctcagcctgccactaccaagaaaaataaacagtgccagaacaggagtaattcattacagaataccaatatcccacattcagcatttatttctccaaagataattaatgggaaagatgtcgaggaagtaagttgtatagaaacacaggacaatcagaactcagaaggagaggcaagaaattgctgtgaaacatctatcagacaggactctgattcatcagtttcagacaaacagcggcaaaccatcattattgccgactccccgagtcctgcagtgagtgtcatcactatcagcagtgacactgatgaggaagagacttcccagagacattcactcagagaatgtaaaggtagtctagattgtgaagcttgccagagcactttgaatattgatcggatgtgttcattaagtagtcctgatagtactctgagtaccagctcctcagggcagtccagcccatccccctgcaagagaccgaatagtatgtcagatgaagagcaagaaagtagttgtgatacggtggatggctctccgacatctgactcttccgggcatgacagtccatttgcagagagcacttttgtggaggacactcatgaaaacacagaattggtatcctctgctgacacagaaaccaagccagctgtctgttctgttgtggtgccaccagtggaactagaaaatggcttaaatgccgatgagcatatggcaaacacagattctatatgccagccattaataaaaggacgatctgcccctggaagattaaaccagccttctgcagtgggtactcgtcagcaaaaattgacatcagcattccagcagcagcatttgaacttcagtcaggttcagcactttggatctgggcatcaagagtggaatggaaactttgggcacagaagacagcaagcttatattcctactagtgttaccagtaatccattcactctttctcatggaagtcccaatcacacagcagtgcatgcccacctggctggaaatacacacctcggaggacagcctactctacttccatacccatcatcagccaccctcagtagtgctgcaccagtggcccacctgttagcctctccgtgtacctcaagacctatgttacagcatccaacttataatatctcccatcccagtggcatagttcaccaagtcccagtgggcttaaatccccgtctgttaccatccccaaccattcatcagactcagtacaaaccaatcttcccaccacattcttacattgcagcatcacctgcatatactggatttccactgagtccaacaaaactcagccagtatccatatatgtgaaaaacagtatattggggaagctcaatgatacaaacatttgattaaaaataaaaacatggtatttaatattagccatggcacaagaaaattatttttgaatcatgtagacttgggtgcaatttaaacaactttgagctttaaaaactcacttttgatgtgttttgcacatttggtataacttgtctttggtcatgttatcttcttatgtagtaactctagacaggtgacttatgggagcagaagtccagttttgctcctgctattttttataaattgccttctaactagtgcaagacacgtctacatttgggaagccattctgtgtacagacttagagcaacagatgcacatatgtcagaattacagcatacaagtgaattgtattatccgtgtcttagtgtataaatgttgggtcacttacctaagaaattgagctattgttctttacatttgcatgtgtcttttgcatgggcaaaatgttgcctagactttgctcttaaatgttgttctaataatctcagctgcattgtaaaccgttcctacacatagtgccttaaatatttgaggttgttaatgttattacctatatataaatgttgaggactgcagcacttaaaattcagacctactatttagtttccttttgatagcgtaatgttcatttttgtttttgtgtggtatgatttcaggtagtagctgtttttttccttattaagagggcagcatgtttgctatagctgaattctgctgtctgatttttcagaatgatctagcttcaagaaaagcaagcagttagtagtgcttaagaaaaattgattcagtatctaatggatagttgataactgtcacagcacagcattttatatactgttaagtgaaactgcaatacaatctaagtttattttgagagtgtttgctgtataattggacttaataaaatgtttagaggtacagtaggcatgactttgggtagataataaaatgcaaaatgctcattgattcatgatgtggttttatcttagcttgggcaaaccatgcagtatttaataaatagtagcagaacttttactattgaagcttgaaaagatgtgagttctttgtgtgcaatttttgatttatgcatgtgagagggttttttttttttttaagtatttttacattgcagtacttgttttgcttgttggtgatgtttgcttatttaatacattccgtcagggacagaaattacatgcttttttttctttctaggaagtgtgttgagttccccccttccccgacatttttttcttttttgggtggtggtgatggtagtggttatgtctgtttaaatgaagttgcttttacagcaccaaagacttaatcatccatttcctatataaaggtagctactttttgcatagacctcaagtatattgtagtgtaaaggtggaatttaaggaaaggtattaaattgaggctgtgttttagcttacaggcaagtaataaattgtatcatttatcttgaatgtatcatagataagctgctatataacgattgccacttcagatagctgtgaaattaggtgattaactagttgttatttagccttctaatttctgtataagtctaattacatgaatagaaattggggttttgattttttactttgcttttctgtttggagtgtcattgtaactactgtattgtaaatggtggaaaataattgcatttgttactttggggtgtgttatttgcatcagtattttatctctattaatgtttgtgctcatcactgcatattaaaaaaacttggatgtatcagtgtaacttaattttttattttcatactggcattgtagacacttgagaaagctgtatcttgcaggcttgacttaacttttttccttaaaaatctggaatataatcttacagcatttactggaataaacagtacaaagcattggagtgtaaaactctagatgttttggatttacagcgtttctttgataaatgaattgtataccactagtacagctctagtacagcgttcacaataagctaataatggataagttttcttcactccattaacacaagcagtgttttatttaataatcatcaatgaaataaatgtgcctgaaattgattttaaaaattacagtattagatcataaagtaaaaaccagcagtacatttttagtcacactgaaaatgaaggacttaattttccccacaagtttcagtgtttttagtaattaattctatgcattttatacaaatagaaatatatatatataaaaaattaaatgtttaaaaaggagtagcctaagattaatttaaaagattatttacagatgacacatttatggggtcactatttaagtaaatttgctgccctccacagccttctaattttatttatatgttccagcagattattaggatctgcttacttcttaggaaagaatcaatgctggcaacacattgtttcagaaacaccaagtgcaaaggattgattgtatcacaacaggtacaaaactgacagagttttctttttgtttagggccatgtttactaccctgaaatgttgtattttttgtctttaatttccaagacttaaagcagtcttgttaaattgacataaatggtaaacttcaacattttcataatacagtattaatgtttgataaaggtatatcccagttaactacactgctctttaattgcaatcatgggcattttaatgtattttaaaataaatttcaaaattctgctaaattcttaatttagcatattgacaaagtaatctggatttataccttttaaaaaccattttgaccagttttcttcggttttaatgctttcttaaataaaacactgcatgatttccaagttgcatatttgcatactattttaatttgcaaaatgttttttaaatcaaatatcctgatatttagttgttttttttttcctccagcgtgtttaattaaatatgttactgtattagcaaaacattttcatttttaaaatctgctaattttaaacttggactgtgttaagtaaaagttaaatcatacactgcaaggtgtaggaagatttgttttaatgaatccaatgatacagatttgattactaagtttgaactgttaattgtttaacaattttagacttgtggctttctttctttggtttatttgtttttgcttttactcctatgctacactagtttgccatgtagcaattgcactgtgcaatattacaataaggactgggaaaattttatggatgtaatgtctattacggtttgcgatagtatttctctctagttctcagtgatttaaatgtgaccaagccttctgtactttgtcacaaaaagcgggttttccaggtgactattttggtgagtgtcaaaataagaatttatggtgtattactgtcgattcactttgaattaaaatatatatattgcagcaaa

SEQ ID NO: 13897 - DNA, 4478 bp, Homo sapiens
  source 1..4478: mol_type = unassigned DNA
ttcattaaggggaacaaacaaacgcgcaggcacgcagcttgagcaccccagccgatggccgcgtcccgggctttgtggccccgtccccagcgtcgcggagcagcgggtttgcagggtgtcaactctggggacgtgcgtgcgtgtgtgtgattgttggggaggagaaatgtgatccgcggctccgcgtccccagcggcggcgggaggaaggcgtggcggccgcgcggcggggctgttgccggcttctctcgttacggtggctgccgcccgcttcccttcgccgcactgggagaactggcggaaagactttggatgaaaatgtctgtttctctgtcgggagggagacggctgttgtaaaatggtatggcctcacaagtcttggtctacccaccatatgtttatcaaactcagtcaagtgccttttgtagtgtgaagaaactcaaagtagagccaagcagttgtgtattccaggaaagaaactatccacggacctatgtgaatggtagaaactttggaaattctcatcctcccactaagggtagtgcttttcagacaaagataccatttaatagacctcgaggacacaacttttcattgcagacaagtgctgttgttttgaaaaacactgcaggtgctacaaaggtcatagcagctcaggcacagcaagctcacgtgcaggcacctcagattggggcgtggcgaaacagattgcatttcctagaaggcccccagcgatgtggattgaagcgcaagagtgaggagttggataatcatagcagcgcaatgcagattgtcgatgaattgtccatacttcctgcaatgttgcaaaccaacatgggaaatccagtgacagttgtgacagctaccacaggatcaaaacagaattgtaccactggagaaggtgactatcagttagtacagcatgaagtcttatgctccatgaaaaatacttacgaagtccttgattttcttggtcgaggcacgtttggccaggtagttaaatgctggaaaagagggacaaatgaaattgtagcaatcaaaattttgaagaatcatccttcttatgcccgtcaaggtcaaatagaagtgagcatattagcaaggctcagtactgaaaatgctgatgaatataactttgtacgagcttatgaatgctttcagcaccgtaaccatacttgtttagtctttgagatgctggaacaaaacttgtatgactttctgaaacaaaataaatttagtcccctgccactaaaagtgattcggcccattcttcaacaagtggccactgcactgaaaaaattgaaaagtcttggtttaattcatgctgatctcaagccagagaatattatgttggtggatcctgttcggcagccttacagggttaaagtaatagactttgggtcggccagtcatgtatcaaagactgtttgttcaacatatctacaatctcggtactacagagctccagagattatattggggttgccattttgtgaagccatagacatgtggtcattgggatgtgtgattgcagaattatttcttggatggccgctctacccaggagccttggagtatgatcagattcgatacatttctcagactcaaggtttgccaggagaacagttgttaaatgtgggtactaaatccacaagatttttttgcaaagaaacagatatgtctcattctggttggagattaaagacattggaagagcatgaggcagagacaggaatgaagtctaaagaagccagaaaatacattttcaacagtctggatgatgtagcgcatgtgaacacagtgatggatttggaaggaagtgatcttttggctgagaaagctgatagaagagaatttgttagtctgttgaagaaaatgttgctgattgatgcagatttaagaattactccagctgagaccctgaaccatccttttgttaatatgaaacatcttctagatttccctcatagcaaccatgtaaagtcctgttttcatattatggatatttgtaagtcccacctaaattcatgtgacacaaataatcacaacaaaacttcacttttaagaccagttgcttcaagcagtactgctacactgactgcaaattttactaaaatcggaacattaagaagtcaggcattgaccacatctgctcattcagttgtgcaccatggaatacctctgcaggcaggaactgctcagtttggttgtggtgatgcttttcagcagacattgattatctgtcccccagctattcaaggtattcctgcaacacatggtaaacccaccagttattcaataagggtagataatacagttccacttgtaactcaggccccagctgtgcagccactacagatccgaccaggagttctttctcagacgtggtctggtagaacacagcagatgctggtgcctgcctggcaacaggtgacacccctggctcctgctactactacactaacttctgagagtgtggctggttcacacaggcttggagactgggggaagatgatttcatgcagcaatcattataactcagtgatgccgcagcctcttctgaccaatcagataactttatctgcccctcagccagttagtgtggggattgcacatgttgtctggcctcagcctgccactaccaagaaaaataaacagtgccagaacaggagtaattcattacagaataccaatatcccacattcagcatttatttctccaaagataattaatgggaaagatgtcgaggaagtaagttgtatagaaacacaggacaatcagaactcagaaggagaggcaagaaattgctgtgaaacatctatcagacaggactctgattcatcagtttcagacaaacagcggcaaaccatcattattgccgactccccgagtcctgcagtgagtgtcatcactatcagcagtgacactgatgaggaagagacttcccagagacattcactcagagaatgtaaaggtagtctagattgtgaagcttgccagagcactttgaatattgatcggatgtgttcattaagtagtcctgatagtactctgagtaccagctcctcagggcagtccagcccatccccctgcaagagaccgaatagtatgtcagatgaagagcaagaaagtagttgtgatacggtggatggctctccgacatctgactcttccgggcatgacagtccatttgcagagagcacttttgtggaggacactcatgaaaacacagaattggtatcctctgctgacacagaaaccaagccagctgtctgttctgttgtggtgccaccagtggaactagaaaatggcttaaatgccgatgagcatatggcaaacacagattctatatgccagccattaataaaaggacgatctgcccctggaagattaaaccagccttctgcagtgggtactcgtcagcaaaaattgacatcagcattccagcagcagcatttgaacttcagtcaggttcagcactttggatctgggcatcaagagtggaatggaaactttgggcacagaagacagcaagcttatattcctactagtgttaccagtaatccattcactctttctcatggaagtcccaatcacacagcagtgcatgcccacctggctggaaatacacacctcggaggacagcctactctacttccatacccatcatcagccaccctcagtagtgctgcaccagtggcccacctgttagcctctccgtgtacctcaagacctatgttacagcatccaacttataatatctcccatcccagtggcatagttcaccaagtcccagtgggcttaaatccccgtctgttaccatccccaaccattcatcagactcagtacaaaccaatcttcccaccacattcttacattgcagcatcacctgcatatactggatttccactgagtccaacaaaactcagccagtatccatatatgtgaaaaacagtatattggggaagctcaatgatacaaacatttgattaaaaataaaaacatggtatttaatattagccatggcacaagaaaattatttttgaatcatgtagacttgggtgcaatttaaacaactttgagctttaaaaactcacttttgatgtgttttgcacatttggtataacttgtctttggtcatgttatcttcttatgtagtaactctagacaggtgacttatgggagcagaagtccagttttgctcctgctattttttataaattgccttctaactagtgcaagacacgtctacatttgggaagccattctgtgtacagacttagagcaacagatgcacatatgtcagaattacagcatacaagtgaattgtattatccgtgtcttagtgtataaatgttgggtcacttacctaagaaattgagctattgttctttacatttgcatgtgtcttttgcatgggcaaaatgttgcctagactttgctcttaaatgttgttctaataatctcagctgcattgta

SEQ ID NO: 13898 - DNA, 3668 bp, Homo sapiens
  source 1..3668: mol_type = unassigned DNA
gatttcctaatctccaggaggaaagaaactagtctttgggagttaaaccgactaatttaacggagaattaccaatgtggaggtatggcctcacaagtcttggtctacccaccatatgtttatcaaactcagtcaagtgccttttgtagtgtgaagaaactcaaagtagagccaagcagttgtgtattccaggaaagaaactatccacggacctatgtgaatggtagaaactttggaaattctcatcctcccactaagggtagtgcttttcagacaaagataccatttaatagacctcgaggacacaacttttcattgcagacaagtgctgttgttttgaaaaacactgcaggtgctacaaaggtcatagcagctcaggcacagcaagctcacgtgcaggcacctcagattggggcgtggcgaaacagattgcatttcctagaaggcccccagcgatgtggattgaagcgcaagagtgaggagttggataatcatagcagcgcaatgcagattgtcgatgaattgtccatacttcctgcaatgttgcaaaccaacatgggaaatccagtgacagttgtgacagctaccacaggatcaaaacagaattgtaccactggagaaggtgactatcagttagtacagcatgaagtcttatgctccatgaaaaatacttacgaagtccttgattttcttggtcgaggcacgtttggccaggtagttaaatgctggaaaagagggacaaatgaaattgtagcaatcaaaattttgaagaatcatccttcttatgcccgtcaaggtcaaatagaagtgagcatattagcaaggctcagtactgaaaatgctgatgaatataactttgtacgagcttatgaatgctttcagcaccgtaaccatacttgtttagtctttgagatgctggaacaaaacttgtatgactttctgaaacaaaataaatttagtcccctgccactaaaagtgattcggcccattcttcaacaagtggccactgcactgaaaaaattgaaaagtcttggtttaattcatgctgatctcaagccagagaatattatgttggtggatcctgttcggcagccttacagggttaaagtaatagactttgggtcggccagtcatgtatcaaagactgtttgttcaacatatctacaatctcggtactacagagctccagagattatattggggttgccattttgtgaagccatagacatgtggtcattgggatgtgtgattgcagaattatttcttggatggccgctctacccaggagccttggagtatgatcagattcgatacatttctcagactcaaggtttgccaggagaacagttgttaaatgtgggtactaaatccacaagatttttttgcaaagaaacagatatgtctcattctggttggagattaaagacattggaagagcatgaggcagagacaggaatgaagtctaaagaagccagaaaatacattttcaacagtctggatgatgtagcgcatgtgaacacagtgatggatttggaaggaagtgatcttttggctgagaaagctgatagaagagaatttgttagtctgttgaagaaaatgttgctgattgatgcagatttaagaattactccagctgagaccctgaaccatccttttgttaatatgaaacatcttctagatttccctcatagcaaccatgtaaagtcctgttttcatattatggatatttgtaagtcccacctaaattcatgtgacacaaataatcacaacaaaacttcacttttaagaccagttgcttcaagcagtactgctacactgactgcaaattttactaaaatcggaacattaagaagtcaggcattgaccacatctgctcattcagttgtgcaccatggaatacctctgcaggcaggaactgctcagtttggttgtggtgatgcttttcagcagacattgattatctgtcccccagctattcaaggtattcctgcaacacatggtaaacccaccagttattcaataagggtagataatacagttccacttgtaactcaggccccagctgtgcagccactacagatccgaccaggagttctttctcagacgtggtctggtagaacacagcagatgctggtgcctgcctggcaacaggtgacacccctggctcctgctactactacactaacttctgagagtgtggctggttcacacaggcttggagactgggggaagatgatttcatgcagcaatcattataactcagtgatgccgcagcctcttctgaccaatcagataactttatctgcccctcagccagttagtgtggggattgcacatgttgtctggcctcagcctgccactaccaagaaaaataaacagtgccagaacaggagtaattcattacagaataccaatatcccacattcagcatttatttctccaaagataattaatgggaaagatgtcgaggaagtaagttgtatagaaacacaggacaatcagaactcagaaggagaggcaagaaattgctgtgaaacatctatcagacaggactctgattcatcagtttcagacaaacagcggcaaaccatcattattgccgactccccgagtcctgcagtgagtgtcatcactatcagcagtgacactgatgaggaagagacttcccagagacattcactcagagaatgtaaaggtagtctagattgtgaagcttgccagagcactttgaatattgatcggatgtgttcattaagtagtcctgatagtactctgagtaccagctcctcagggcagtccagcccatccccctgcaagagaccgaatagtatgtcagatgaagagcaagaaagtagttgtgatacggtggatggctctccgacatctgactcttccgggcatgacagtccatttgcagagagcacttttgtggaggacactcatgaaaacacagaattggtatcctctgctgacacagaaaccaagccagctgtctgttctgttgtggtgccaccagtggaactagaaaatggcttaaatgccgatgagcatatggcaaacacagattctatatgccagccattaataaaaggacgatctgcccctggaagattaaaccagccttctgcagtgggtactcgtcagcaaaaattgacatcagcattccagcagcagcatttgaacttcagtcaggttcagcactttggatctgggcatcaagagtggaatggaaactttgggcacagaagacagcaagcttatattcctactagtgttaccagtaatccattcactctttctcatggaagtcccaatcacacagcagtgcatgcccacctggctggaaatacacacctcggaggacagcctactctacttccatacccatcatcagccaccctcagtagtgctgcaccagtggcccacctgttagcctctccgtgtacctcaagacctatgttacagcatccaacttataatatctcccatcccagtggcatagttcaccaagtcccagtgggcttaaatccccgtctgttaccatccccaaccattcatcagactcagtacaaaccaatcttcccaccacattcttacattgcagcatcacctgcatatactggatttccactgagtccaacaaaactcagccagtatccatatatgtga

SEQ ID NO: 13899 - DNA, 591 bp, Homo sapiens
  source 1..591: mol_type = unassigned DNA
ttcattaaggggaacaaacaaacgcgcaggcacgcagcttgagcaccccagccgatggccgcgtcccgggctttgtggccccgtccccagcgtcgcggagcagcgggtttgcagggtgtcaactctggggacgtgcgtgcgtgtgtgtgattgttggggaggagaaatgtgatccgcggctccgcgtccccagcggcggcgggaggaaggcgtggcggccgcgcggcggggctgttgccggcttctctcgttacggtggctgccgcccgcttcccttcgccgcactgggagaactggcggaaagactttggatgaaaatgtctgtttctctgtcgggagggagacggctgttgtaaaatggtatggcctcacaagtcttggtctacccaccatatgtttatcaaactcagtcaagtgccttttgtagtgtgaagaaactcaaagtagagccaagcagttgtgtattccaggaaagaaactatccacggacctatgtgaatggtagaaactttggaaattctcatcctcccactaagggtagtgcttttcagacaaagataccatttaatagacctcgaggacacaactttt

SEQ ID NO: 13900 - DNA, 2451 bp, Homo sapiens
  source 1..2451: mol_type = unassigned DNA
agagccactcaacagcgctggaacccattcggtggggcctggggcccctcatcccaagccaggagggtttctggggaggggtgcagcccctggcagactgacagtgtggcctgggggtttgggggtgccagggaagcaggggccaacctcataggaggagacacgagtgcggttctctttcccccactggggggcctgctgtgtcagcagccaggcgggaggcctgggcggcagagccagtggtacaggggcctgggcagggcggtgtctggcagcagcggcaccatgtccaccatccagtcggagactgactgctacgacatcatcgaggtcttgggcaaggggaccttcggggaggtagccaagggctggcggcggagcacgggcgagatggtggccatcaagatcctcaagaatgacgcctaccgcaaccgcatcatcaagaacgagctgaagctgctgcactgcatgcgaggcctagaccctgaagaggcccacgtcatccgcttccttgagttcttccatgacgccctcaagttctacctggtctttgagctgctggagcaaaaccttttcgagttccagaaggagaacaacttcgcgcccctccccgcccgccacatccgtacagtcaccctgcaggtgctcacagccctggcccggctcaaggagctggctatcatccacgctgatctcaagcctgagaacatcatgctggtggaccagacccgctgccccttcagggtcaaggtgattgacttcggatccgccagcattttcagcgaggtgcgctacgtgaaggagccatacatccagtcgcgcttctaccgggcccctgagatcctgctggggctgcccttctgcgagaaggtggacgtgtggtccctgggctgcgtcatggctgagctgcacctgggctggcctctctaccccggcaacaacgagtacgaccaggtgcgctacatctgcgaaacccagggcctgcccaagccacacctgttgcacgccgcctgcaaggcccaccacttcttcaagcgcaacccccaccctgacgctgccaacccctggcagctcaagtcctcggctgactacctggccgagacgaaggtgcgcccattggagcgccgcaagtatatgctcaagtcgttggaccagattgagacagtgaatggtggcagtgtggccagtcggctaaccttccctgaccgggaggcgctggcggagcacgccgacctcaagagcatggtggagctgatcaagcgcatgctgacctgggagtcacacgaacgcatcagccccagtgctgccctgcgccaccccttcgtgtccatgcagcagctgcgcagtgcccacgagaccacccactactaccagctctcgctgcgcagctaccgcctctcgctgcaagtggaggggaagccccccacgcccgtcgtggccgcagaagatgggaccccctactactgtctggctgaggagaaggaggctgcgggtatgggcagtgtggccggcagcagccccttcttccgagaggagaaggcaccaggtatgcaaagagccatcgaccagctggatgacctgagtctgcaggaggctgggcatgggctgtggggtgagacctgcaccaatgcggtctccgacatgatggtccccctcaaggcagccatcactggccaccatgtgcccgactcgggccctgagcccatcctggccttctacagcagccgcctggcaggccgccacaaggcccgcaagccacctgcgggttccaagtccgactccaacttcagcaacctcattcggctgagccaggtctcgcctgaggatgacaggccctgccggggcagcagctgggaggaaggagagcatctcggggcctctgctgagccactggccatcctgcagcgagatgaggatgggcccaacattgacaacatgaccatggaagctgagaggccagaccctgagctcttcgaccccagcagctgtcctggagaatggctgagtgagccagactgcaccctggagagcgtcaggggcccacgggctcaggggctcccaccccgccgctcccaccagcatggtccaccccggggggccaccagcttcctccagcatgtcaccgggcaccactgatggtgattccacccctgcccatcactgggggctgcgctagctgggctggcattccctcccaacctgaactgctcctcagagccatctcctgaacccacaaattattcttacagaaagatagttatccagaaattctcattccccgtctgcggtgcggtgcgtgcctgcacacctctcctaaacacagcagggctttggagtctggcccatgctccttggccagaaggacagcaggaaagggggctgcaccccgctggccctgcgctcgcccttggccctgctgcctctgtctatttcaatatagaactgttcagc

SEQ ID NO: 13901 - DNA, 2027 bp, Homo sapiens
  source 1..2027: mol_type = unassigned DNA
aacagcgctggaacccattcggtggggcctggggcccctcatcccaagccaggagggtttctggggaggggtgcagcccctggcagactgacagtgtggcctgggggtttgggggtgccagggaagcaggggaccttcggggaggtagccaagggctggcggcggagcacgggcgagatggtggccatcaagatcctcaagaatgacgcctaccgcaaccgcatcatcaagaacgagctgaagctgctgcactgcatgcgaggcctagaccctgaagaggcccacgtcatccgcttccttgagttcttccatgacgccctcaagttctacctggtctttgagctgctggagcaaaaccttttcgagttccagaaggagaacaacttcgcgcccctccccgcccgccacatccgtacagtcaccctgcaggtgctcacagccctggcccggctcaaggagctggctatcatccacgctgatctcaagcctgagaacatcatgctggtggaccagacccgctgccccttcagggtcaaggtgattgacttcggatccgccagcattttcagcgaggtgcgctacgtgaaggagccatacatccagtcgcgcttctaccgggcccctgagatcctgctggggctgcccttctgcgagaaggtggacgtgtggtccctgggctgcgtcatggctgagctgcacctgggctggcctctctaccccggcaacaacgagtacgaccaggtgcgctacatctgcgaaacccagggcctgcccaagccacacctgttgcacgccgcctgcaaggcccaccacttcttcaagcgcaacccccaccctgacgctgccaacccctggcagctcaagtcctcggctgactacctggccgagacgaaggtgcgcccattggagcgccgcaagtatatgctcaagtcgttggaccagattgagacagtgaatggtggcagtgtggccagtcggctaaccttccctgaccgggaggcgctggcggagcacgccgacctcaagagcatggtggagctgatcaagcgcatgctgacctgggagtcacacgaacgcatcagccccagtgctgccctgcgccaccccttcgtgtccatgcagcagctgcgcagtgcccacgagaccacccactactaccagctctcgctgcgcagctaccgcctctcgctgcaagtggaggggaagccccccacgcccgtcgtggccgcagaagatgggaccccctactactgtctggctgaggagaaggaggctgcgggtatgggcagtgtggccggcagcagccccttcttccgagaggagaaggcaccaggtatgcaaagagccatcgaccagctggatgacctgagtctgcaggaggctgggcatgggctgtggggtgagacctgcaccaatgcggtctccgacatgatggtccccctcaaggcagccatcactggccaccatgtgcccgactcgggccctgagcccatcctggccttctacagcagccgcctggcaggccgccacaaggcccgcaagccacctgcgggttccaagtccgactccaacttcagcaacctcattcggctgagccaggtctcgcctgaggatgacaggccctgccggggcagcagctgggaggaaggagagcatctcggggcctctgctgagccactggccatcctgcagcgagatgaggatgggcccaacattgacaacatgaccatggaagctgagaggccagaccctgagctcttcgaccccagcagctgtcctggagaatggctgagtgagccagactgcaccctggagagcgtcaggggcccacgggctcaggggctcccaccccgccgctcccaccagcatggtccaccccggggggccaccagcttcctccagcatgtcaccgggcaccactgatggtgattccacccctgcccatcactgggggctgcgctagctgggctggcattccctcccaacctgaactgctcctcagagccatctcctgaacccacaaatta

SEQ ID NO: 13902 - DNA, 774 bp, Homo sapiens
  source 1..774: mol_type = unassigned DNA
gcaagttttcattgggcaaaatgggggaacaacctatcttcagcactcgagctcatgtcttccaaattgacccaaacacaaagaagaactgggtacccaccagcaagcatgcagttactgtgtcttatttctatgacagcacaagaaatgtgtataggataatcagtttagatggctcaaaggcaataataaatagtaccatcaccccaaacatgacatttactaaaacatctcagaagtttggccagtgggctgatagccgggcaaacaccgtttatggattgggattctcctctgagcatcatctttcgaaagtgactgaacttgaatgtgttagtagccaagcaaatgcagtacatactcataagacagaattaaatcagacaatacaagaactggaagagacactgaaactgaaggaagaggaaatagaaaggttaaaacaagaaattgataatgccagagaactacaagaacagagggattctttgactcagaaactacaggaagtagaaattcggaacaaagacctggagggacaactgtctgacttagagcaacgtctggagaaaagtcagaatgaacaagaagcttttcgcaataacctgaagacactcttagaaattctggatggaaagatatttgaactaacagaattacgagataacttggccaagctactagaatgcagctaaggaaagtgaaatttcagtgccaattaattaaaagatacactgtctctcttcataggactgtttaggctctgcatcaaga

SEQ ID NO: 13903 - DNA, 5881 bp, Homo sapiens
  source 1..5881: mol_type = unassigned DNA
gcctcccgtcccttcccgcgagcagagggagggaccgccctcgctccccgttctctccgcccccttcccgccccccgcagcccactctgccgccgcgctagcttcacgccggcggcgctgaccgggaaagcagcaccctcttctctgccagccggccggccggcggaggcggaggcagcggcaggcttcaggccgccggggctggcgctgctctgcccggcggtagccggaggcgggcgctgatggaagtgtgaagaggcggcggcggggcccggggaatgtgaggcggcgcgtggcggcggcgcggagcgtgagagacgaggagtaggggtgggggcgctggagcggcggctgcgcttcggcttcgagcccagctctcctggccccaacgcgggcttagcctcccgccttggctcgggcaggcgcccgtcgacccttcggcccctttcgcccgccctggagctgggggcagggtgccagtggaagcgtggggcttggctctgtgattcattcattctccgccgacgggagcctcagacccgctgtgctctgaagagaggagggaagagggggcagccgcgaatgaagggccgggcaccagccgggctccattgtgctcggcggcggggggcgggaaggggctgagggaggtgggatcgggtcccctcctccagctctccggcgtgcgctgcgcccccagcctgctgccagcctggaaatggctccgtttattctcttcgggagaatgaatcgatcctgcctagccttctcttcgtcctccccacctcttctctgctccgagtcttaggaggagaaacatttaaaaagacagattccaatgtggagtgccgtgcaggttgcgagctgccgggtttgcacttcgaggagattttcctgtgtagtttttttcctaatgtgagcgcagggaagccgtggcattactgcttttgggatttttattcacgtgcacgtcgcgtttggttgctcgctccacccccggagacctggtgtggtggagaaatttgaacccgcagccttagctccgaaaaggccgagttacctggctctccctgagtgtcgaggaggacatgagtgaaatgaccagcgaactcattttttataggactcggtgaagccggattctgcatttccctacttgtagactcattttgtggaatagagttgatcgctgtctcctccgcaaagcattttaactcgaataagcaaatgccgcctctgtttgaacgttttggtatttacaagagagaaatcattttacctaagagaactaattgaattggcagcatccttgaaatacctccggacaaggatctgggggtgggggtggaaaagcaactgcgaaatagcagacggagaaattcctttggaagttattccgtagcataagagctgaaacttcagagcaagttttcattgggcaaaatgggggaacaacctatcttcagcactcgagctcatgtcttccaaattgacccaaacacaaagaagaactgggtacccaccagcaagcatgcagttactgtgtcttatttctatgacagcacaagaaatgtgtataggataatcagtttagatggctcaaaggcaataataaatagtaccatcaccccaaacatgacatttactaaaacatctcagaagtttggccagtgggctgatagccgggcaaacaccgtttatggattgggattctcctctgagcatcatctttcgaaatttgcagaaaagtttcaggaatttaaagaagctgctcgactagcaaaggaaaaatcacaagagaagatggaacttaccagtacaccttcacaggaatccgcaggcggggatcttcagtctcctttaacaccggaaagtatcaacgggacagatgatgaaagaacacctgatgtgacacagaactcagagccaagggctgaaccaactcagaatgcattgccattttcacatagttcagcaatcagcaaacattgggaggctgaactggctaccctcaaaggaaataatgccaaactcactgcagccctgctggagtccactgccaatgtgaaacaatggaaacagcaacttgctgcctatcaagaggaagcagaacgtctgcacaagcgggtgactgaacttgaatgtgttagtagccaagcaaatgcagtacatactcataagacagaattaaatcagacaatacaagaactggaagagacactgaaactgaaggaagaggaaatagaaaggttaaaacaagaaattgataatgccagagaactacaagaacagagggattctttgactcagaaactacaggaagtagaaattcggaacaaagacctggagggacaactgtctgacttagagcaacgtctggagaaaagtcagaatgaacaagaagcttttcgcaataacctgaagacactcttagaaattctggatggaaagatatttgaactaacagaattacgagataacttggccaagctactagaatgcagctaaggaaagtgaaatttcagtgccaattaattaaaagatacactgtctctcttcataggactgtttaggctctgcatcaagattgcacaaaaaaaaaaaaaaaaaaattgaatatcactcctccaggaggaggatcttttgaaattggaattgtatatttcactgtaaattttagaatccagcttgtagctagttggggaaaaaagatgaaaaacttgaactacaaattacctccatgtatattattggccatagttaactagaaagttataaatagacacttaatgcaatcttttttcctgatattagccaatgggagaattaacaatgtctaggtcacatcccctttttgtgttcaacacagtgaagattatctgctttttaaattaatttatttacgatatctagagctgtgttttgtgcaaaaacttagtgatgaaagcctgtcttttgttgtaatctgaataatttctcaggatatttttgcactgctgagaagcagtgccattaccaattaattcttgccaggagtgagagagagctgtatctttaattgaaatatactataactgggtgtatagagttcttcccttttttgtgctggaagatatttcactctggtgactactctggtacactctggtgttctctaatcttgtctgttgtatagtttacttttccatattgattccatgtatttatgagaagatattgtctcccattttattacacattttaaagccaactaacgaaggcagctgagtccctcagaaatttttctttttaagtttctaataaatttgacacacagtactgaaatacagcagcccgtcattgacaggctggtctagcaatgttaagtatatttacagaatatgcagttacatttatttatatattttgcaagaaatcttttctgaatgatcaatgcatttcaatttacgaataataatggttattggggaactgtttattatagataattttaaggtgtatagctattttaaagggggtccatttacatcaaacagctgatcagaggactctatctaaattgtgatcgtggcagatagagatggagtcatgtactctatctggctctacacatcaatcacatcttgattcaaacctcacaaggcaatattctgaattgttaactaggtatttcaaaacaggaattaaattcaataggctcttctcagtgaacaggttttaatgttgttttgatgtaattttaaaagacttttagcaaacatgcatttctttatatgatatatttcttttacgaagctattttaaaagtaagccaagtgctgtctagtctgcttataaagtaggaattgcatcagagtacatatattcttgctgtacaatgcctgtgatgttgaggagggttcttttttaaagtgtatgcttgagtaactgactctatggagtctataaatgcactgacttcttgtttgtaccccaaaatgatcgaattgttaagtacaaaattaagctaattaaccaatttgtaaccattttttcactcataaacagctactcaatactagacaattttgttttttatgtatgtgtatgtacgtaaatacatacatattaatttacattagagtgaaaaataaatggtttgtttctgaagttagtttcttaagtgagttttcaggtgtctctgaaaaatttataacaatcatgtattatatgtgctgtaacatcatgtacgttacctccatctattttaggatattttcctcacctatatattatagggagaataatttagatacacatgctcagagctgagatatttctctgataaatcaggtaacaaaatgtatttgattgatggaattttgaagtaaatgtgtttttatccatcagtttctgagtaacaaagagcaccaagttttaatttaaataggagatttaacactagggatcagggagtttagtatgaagagttaaaaaaatttaaaaaacagtgtaagctgttgaaatggcaagtgaattattttaatgatgtaataaaatatttttaaattttgacatagtgatcatttaatgaaaaaactcaccaaaatgtctccatttgaattgtattgataatgtgggacatatgtgtgattcaatatatacatatacccatatgtatatacagaaaattatttttaatactttcctactgataatgaaatttaaaattggaaattttgtgagtgtttttcttgtccaatagagcctaattgtttccttttttagtgatttaacaatctcttgagggctgcacctttaaattcccagattgtcaatagacatgtacagtatatgggataaggtggacacaagtgcacatataaataaaatcttcttaagacttttaactattcatttacagtaggagagtatgtagaaatcatcatccacaagtcataattaggttgtgtgcctactgtagttttttccatttctgtattatataaacatttgcatattaaaatttgatttttcccagagacaagtattatatactgtatctatatttaaatcaaactgtggtaatatatttctcagaaaataatgttggggactatagcctgaacatgtggacttgaagcgacatggaggaggaggttgatcccattgtgtataagttaatatgtgataactattgaatcttgtacaaaaacaaaaattgaaaaaaaaaaagaaaagcaaaaatacagtttttattttgaaatacatttgttctctggagaatgtactttatctttttttcctccagtcttttacagatatttaaaagcatttaaatgatgacagcatttacttaaatctttcaggtgctactggattttgcattagtgtgttatgttgtgaaatcctaactttgacataaaaggttttataagtattcccctgcctggaaaattagtttttgttctcctctctctctctttctcttttccactttctttctgcagactaaaacatgctcacgaagttgcatctctccttgtctctatagaagatctccagcaccatcatagatttgatgttctgctgtcattgaactgttgggaagcagttagaggaaaagctcactttttttttcaggtggaaataaaaggaacactcaaaattaagccaacaccaccactacctttaaaaactagtttatttgccctgttaaaattaaatgtattctttaacatgtgggctacagtctcccatgtttttatttaactgaagcatatacacttcggtcatttatctccttgtggtcctgattttgtcagtactggaatgggaggcaggtcggggaaagtttgtttgatggcagtggattcttattgttgttttaaccattgcattt

SEQ ID NO: 13904 - DNA, 815 bp, Homo sapiens
  source 1..815: mol_type = unassigned DNA
gcaagttttcattgggcaaaatgggggaacaacctatcttcagcactcgagctcatgtcttccaaattgacccaaacacaaagaagaactgggtacccaccagcaagcatgcagttactgtgtcttatttctatgacagcacaagaaatgtgtataggataatcagtttagatggctcaaaggcaataataaatagtaccatcaccccaaacatgacatttactaaaacatctcagaagtttggccagtgggctgatagccgggcaaacaccgtttatggattgggattctcctctgagcatcatctttcgaaatttgcagaaaagtttcaggaatttaaagaagctgctcgactagcaaaggaaaaatcacaagagaagatggaacttaccagtacaccttcacaggaatccgcaggcggggatcttcagtctcctttaacaccggaaagtatcaacgggacagatgatgaaagaacacctgatgtgacacagaactcagagccaagggctgaaccaactcagaatgcattgccattttcacataggaagtagaaattcggaacaaagacctggagggacaactgtctgacttagagcaacgtctggagaaaagtcagaatgaacaagaagcttttcgcaataacctgaagacactcttagaaattctggatggaaagatatttgaactaacagaattacgagataacttggccaagctactagaatgcagctaaggaaagtgaaatttcagtgccaattaattaaaagatacactgtctctcttcataggactgtttaggctctgcatcaaga

SEQ ID NO: 13905 - DNA, 642 bp, Homo sapiens
  source 1..642: mol_type = unassigned DNA
gcaagttttcattgggcaaaatgggttcagcaatcagcaaacattgggaggctgaactggctaccctcaaaggaaataatgccaaactcactgcagccctgctggagtccactgccaatgtgaaacaatggaaacagcaacttgctgcctatcaagaggaagcagaacgtctgcacaagcgggtgactgaacttgaatgtgttagtagccaagcaaatgcagtacatactcataagacagaattaaatcagacaatacaagaactggaagagacactgaaactgaaggaagaggaaatagaaaggttaaaacaagaaattgataatgccagagaactacaagaacagagggattctttgactcagaaactacaggaagtagaaattcggaacaaagacctggagggacaactgtctgacttagagcaacgtctggagaaaagtcagaatgaacaagaagcttttcgcaataacctgaagacactcttagaaattctggatggaaagatatttgaactaacagaattacgagataacttggccaagctactagaatgcagctaaggaaagtgaaatttcagtgccaattaattaaaagatacactgtctctcttcataggactgtttaggctctgcatcaaga

SEQ ID NO: 13906 - DNA, 1990 bp, Homo sapiens
  source 1..1990: mol_type = unassigned DNA
gcccgcccgcgcctggcggcggtggcggcagtggcagcagtggcagccgcgcagccccgcggaatggagcggcgccggggctgagccgggcgcgcacgggccgccgcatgtgccgcgcggggagcggctgccgagcgggcggagagcgagcgcgagaggccccgtcggagcggccgccggagcagcgccggagatgggagaacagcccatcttcaccacccgagcgcatgtcttccagattgaccccaacaccaagaagaactggatgcctgcgagcaagcaggcggtcaccgtttcctacttctatgatgtcacaaggaacagctatcggatcatcagtgtggacggagccaaggtgatcataaacagcacaatcacaccgaatatgaccttcaccaaaacgtcacagaagtttgggcagtgggccgacagcagagccaacacagtgtttggtttggggttttcctctgagcagcagctgacaaagtttgcagagaaattccaggaggtgaaagaagctgccaagatagccaaagacaagacgcaggagaaaatcgagacctcaagtaatcattcccaagaatctgggcgtgaaaccccatcttctactcaggcatccagtgtcaacgggacggacgatgaaaaggcctctcacgccggtccagccaacacacacctgaagtctgagaatgacaagctgaagattgccttgacgcagagcgcagccaacgtgaagaagtgggagatcgagctgcagacccttcgggagagcaatgcacggctgaccacagcactgcaggagtcggcagccagtgtggagcagtggaagaggcagttctccatctgccgtgatgagaatgaccggctccgcaacaagattgatgagctggaagaacaatgcagtgagatcaacagagagaaggagaagaacacgcagctgaagaggaggatcgaggagctggaggcagagctccgagaaaaggagacagagctgaaagatctccgaaaacaaagtgaaatcatacctcagctcatgtcagagtgcgaatatgtctctgagaagctagaggcggcagagagagacaatcaaaacctggaagacaaagtgcgttccttaaagacagacattgaggagagcaaataccgacagcgccacctgaaggtggagttgaagagcttcctggaggtgctggacgggaagattgacgacctgcatgacttccgccgagggctctccaagctgggcaccgataactagggctggccgaggcccaggccccgcccgtgagtcccaagcgtgtgtgcgagaccagatagctctaggacgttcttctgtgtgcattgcttctgtaaatgcaggcgcagtttgtcgtgtttccaaaccagttgtgccgtccactcactccttttcagaatagaaatctcctctcgcttctctggccttgtgaggttgtggacaactggaagattctgactcaggaatccagaactaggtctaccttcaacatttatgcagtcagggcagggatgtttatatctttcataagggctgttgcaaccatatgaactgaaaaaacacgcattttgtaatccaaatattgatattctttacaccaagccatcaggctccttttatcaaatagcattcagagtatttgaatgtccaccagacaccagccccggggggcacagagagaacaacattcctctctgtcaacatcgagaggctttaaaacaactgtttagtggaaactttctgagagatggaaaacaagcttctggtgggtgcattttctggcccggagttgcctgcatccacgctactgccccctgccccccgcccccccagtttgtacggttgcaacagtgttccttttcttggttttaatttctgagcagatgattgtgctgtgggaacagcacacagtgagggtgcctagcacaatgtctggcacaaagtaggtgcttaataaatatttgttcaattaaa

SEQ ID NO: 13907 - DNA, 1782 bp, Homo sapiens
  source 1..1782: mol_type = unassigned DNA
cgcgcctggcggcggtggcggcagtggcagcagtggcagccgcgcagccccgcggaatggagcggcgccggggctgagccgggcgcgcacgggccgccgcatgtgccgcgcggggagcggctgccgagcgggcggagagcgagcgcgagaggccccgtcggagcggccgccggagcagcgccggagatgggagaacagcccatcttcaccacccgagcgcatgtcttccagattgaccccaacaccaagaagaactggatgcctgcgagcaagcaggcggtcaccgtttcctacttctatgatgtcacaaggaacagctatcggatcatcagtgtggacggagccaaggtgatcataaacagcacaatcacaccgaatatgaccttcaccaaaacgtcacagaagtttgggcagtgggccgacagcagagccaacacagtgtttggtttggggttttcctctgagcagcagctgacaaagtttgcagagaaattccaggaggtgaaagaagctgccaagatagccaaagacaagacgcaggagaaaatcgagacctcaagtaatcattcccaagcatccagtgtcaacgggacggacgatgaaaaggcctctcacgccggtccagccaacacacacctgaagtctgagaatgacaagctgaagattgccttgacgcagagcgcagccaacgtgaagaatgagatcaacagagagaaggagaagaacacgcagctgaagaggaggatcgaggagctggaggcagagctccgagaaaaggagacagagctgaaagatctccgaaaacaaagtgaaatcatacctcagctcatgtcagagtgcgaatatgtctctgagaagctagaggcggcagagagagacaatcaaaacctggaagacaaagtgcgttccttaaagacagacattgaggagagcaaataccgacagcgccacctgaaggtggagttgaagagcttcctggaggtgctggacgggaagattgacgacctgcatgacttccgccgagggctctccaagctgggcaccgataactagggctggccgaggcccaggccccgcccgtgagtcccaagcgtgtgtgcgagaccagatagctctaggacgttcttctgtgtgcattgcttctgtaaatgcaggcgcagtttgtcgtgtttccaaaccagttgtgccgtccactcactccttttcagaatagaaatctcctctcgcttctctggccttgtgaggttgtggacaactggaagattctgactcaggaatccagaactaggtctaccttcaacatttatgcagtcagggcagggatgtttatatctttcataagggctgttgcaaccatatgaactgaaaaaacacgcattttgtaatccaaatattgatattctttacaccaagccatcaggctccttttatcaaatagcattcagagtatttgaatgtccaccagacaccagccccggggggcacagagagaacaacattcctctctgtcaacatcgagaggctttaaaacaactgtttagtggaaactttctgagagatggaaaacaagcttctggtgggtgcattttctggcccggagttgcctgcatccacgctactgccccctgccccccgcccccccagtttgtacggttgcaacagtgttccttttcttggttttaatttctgagcagatgattgtgctgtgggaacagcacacagtgagggtgcctagcacaatgtctggcacaaagtaggtgcttaataaatatttgttcaatt

SEQ ID NO: 13908 - DNA, 1815 bp, Homo sapiens
  source 1..1815: mol_type = unassigned DNA
cgcgcctggcggcggtggcggcagtggcagcagtggcagccgcgcagccccgcggaatggagcggcgccggggctgagccgggcgcgcacgggccgccgcatgtgccgcgcggggagcggctgccgagcgggcggagagcgagcgcgagaggccccgtcggagcggccgccggagcagcgccggagatgggagaacagcccatcttcaccacccgagcgcatgtcttccagattgaccccaacaccaagaagaactggatgcctgcgagcaagcaggcggtcaccgtttcctacttctatgatgtcacaaggaacagctatcggatcatcagtgtggacggagccaaggtgatcataaacagcacaatcacaccgaatatgaccttcaccaaaacgtcacagaagtttgggcagtgggccgacagcagagccaacacagtgtttggtttggggttttcctctgagcagcagctgacaaagtttgcagagaaattccaggaggtgaaagaagctgccaagatagccaaagacaagacgcaggagaaaatcgagacctcaagtaatcattcccaagaatctgggcgtgaaaccccatcttctactcaggcatccagtgtcaacgggacggacgatgaaaaggcctctcacgccggtccagccaacacacacctgaagtctgagaatgacaagctgaagattgccttgacgcagagcgcagccaacgtgaagaatgagatcaacagagagaaggagaagaacacgcagctgaagaggaggatcgaggagctggaggcagagctccgagaaaaggagacagagctgaaagatctccgaaaacaaagtgaaatcatacctcagctcatgtcagagtgcgaatatgtctctgagaagctagaggcggcagagagagacaatcaaaacctggaagacaaagtgcgttccttaaagacagacattgaggagagcaaataccgacagcgccacctgaaggtggagttgaagagcttcctggaggtgctggacgggaagattgacgacctgcatgacttccgccgagggctctccaagctgggcaccgataactagggctggccgaggcccaggccccgcccgtgagtcccaagcgtgtgtgcgagaccagatagctctaggacgttcttctgtgtgcattgcttctgtaaatgcaggcgcagtttgtcgtgtttccaaaccagttgtgccgtccactcactccttttcagaatagaaatctcctctcgcttctctggccttgtgaggttgtggacaactggaagattctgactcaggaatccagaactaggtctaccttcaacatttatgcagtcagggcagggatgtttatatctttcataagggctgttgcaaccatatgaactgaaaaaacacgcattttgtaatccaaatattgatattctttacaccaagccatcaggctccttttatcaaatagcattcagagtatttgaatgtccaccagacaccagccccggggggcacagagagaacaacattcctctctgtcaacatcgagaggctttaaaacaactgtttagtggaaactttctgagagatggaaaacaagcttctggtgggtgcattttctggcccggagttgcctgcatccacgctactgccccctgccccccgcccccccagtttgtacggttgcaacagtgttccttttcttggttttaatttctgagcagatgattgtgctgtgggaacagcacacagtgagggtgcctagcacaatgtctggcacaaagtaggtgcttaataaatatttgttcaatt

SEQ ID NO: 13909 - DNA, 1950 bp, Homo sapiens
  source 1..1950: mol_type = unassigned DNA
cgcgcctggcggcggtggcggcagtggcagcagtggcagccgcgcagccccgcggaatggagcggcgccggggctgagccgggcgcgcacgggccgccgcatgtgccgcgcggggagcggctgccgagcgggcggagagcgagcgcgagaggccccgtcggagcggccgccggagcagcgccggagatgggagaacagcccatcttcaccacccgagcgcatgtcttccagattgaccccaacaccaagaagaactggatgcctgcgagcaagcaggcggtcaccgtttcctacttctatgatgtcacaaggaacagctatcggatcatcagtgtggacggagccaaggtgatcataaacagcacaatcacaccgaatatgaccttcaccaaaacgtcacagaagtttgggcagtgggccgacagcagagccaacacagtgtttggtttggggttttcctctgagcagcagctgacaaagtttgcagagaaattccaggaggtgaaagaagctgccaagatagccaaagacaagacgcaggagaaaatcgagacctcaagtaatcattcccaagcatccagtgtcaacgggacggacgatgaaaaggcctctcacgccggtccagccaacacacacctgaagtctgagaatgacaagctgaagattgccttgacgcagagcgcagccaacgtgaagaagtgggagatcgagctgcagacccttcgggagagcaatgcacggctgaccacagcactgcaggagtcggcagccagtgtggagcagtggaagaggcagttctccatctgccgtgatgagaatgaccggctccgcaacaagattgatgagctggaagaacaatgcagtgagatcaacagagagaaggagaagaacacgcagctgaagaggaggatcgaggagctggaggcagagctccgagaaaaggagacagagctgaaagatctccgaaaacaaagtgaaatcatacctcagctcatgtcagagtgcgaatatgtctctgagaagctagaggcggcagagagagacaatcaaaacctggaagacaaagtgcgttccttaaagacagacattgaggagagcaaataccgacagcgccacctgaaggtggagttgaagagcttcctggaggtgctggacgggaagattgacgacctgcatgacttccgccgagggctctccaagctgggcaccgataactagggctggccgaggcccaggccccgcccgtgagtcccaagcgtgtgtgcgagaccagatagctctaggacgttcttctgtgtgcattgcttctgtaaatgcaggcgcagtttgtcgtgtttccaaaccagttgtgccgtccactcactccttttcagaatagaaatctcctctcgcttctctggccttgtgaggttgtggacaactggaagattctgactcaggaatccagaactaggtctaccttcaacatttatgcagtcagggcagggatgtttatatctttcataagggctgttgcaaccatatgaactgaaaaaacacgcattttgtaatccaaatattgatattctttacaccaagccatcaggctccttttatcaaatagcattcagagtatttgaatgtccaccagacaccagccccggggggcacagagagaacaacattcctctctgtcaacatcgagaggctttaaaacaactgtttagtggaaactttctgagagatggaaaacaagcttctggtgggtgcattttctggcccggagttgcctgcatccacgctactgccccctgccccccgcccccccagtttgtacggttgcaacagtgttccttttcttggttttaatttctgagcagatgattgtgctgtgggaacagcacacagtgagggtgcctagcacaatgtctggcacaaagtaggtgcttaataaatatttgttcaattaaa

SEQ ID NO: 13910 - DNA, 6201 bp, Homo sapiens
  source 1..6201: mol_type = unassigned DNA
caccgataactagggctggccgaggcccaggccccgccctggccctggagcaacctggacggtgttcccttgagctggtgtgacgtgccctcgtttattctgacatccagcccagtctcagtactgttgtcataaccttacgccagactcaggcagaatgtaagccattcactcgtgagcatcgcagccgcttgtgctgcctggaagctgcagggccaggactgcattttcagtttgcaattgaggtctcctgattttggtgtttccaagactggctgctataccttgataagctttccttctgcctccatgaaacctggtgtctaaaaaagatcaactaaaacttggaaccctttaaccaagaggacctttaaaaataacctttcattccagtcaagacccagctggatgcattttaaagttgggagtggcgaggaagccttcctagtgccgcccggggaatgtaaaaccaccagagcaacaggttgggacagtatggtcaggccttggagggaaagagaaccagtatccacacaagacctcgaacttgtgtggcccctcagtttcatctctcctgcctgccatcacattagactttaattgggtgagagaacagggcagagactgtcacctgcattttgcagatgggaagtagagacagagaaagtgacacgcccagggtcacccagcggtgaccagcagcgtggactctgcatccaggtctcctggaccttgatgcagtatcttttgagacatgccactctagtccctttggtgacccgtgggtgccaagagaaaataattcttatatcctgataagagcatattacaattatattatttcaatatgtgtccacagcaaaggacagtttacaaaaatgtgaatccgaatgacatttaggaatgtttgttataaatgataagttccactttggaatgattctggttttgcaggaatctttccaagaaagttggttaaaatgatgtctctgcctgtgaggccagttctatggaaaacaaacacaccctgagttctttattgatggctttagtggaggcagagcagtatgttcaaaacaagtgggaggccctgagatcgcaggaatggaaacagagttctggctgggggtggcctgtccactgcccgccccttcctggagatgcactcctttctggctttctggggagggagcagccttgctcagtggtgggagcagcttgaacgggacctgatcaacacccaggaagactgtgcacagagggcagttggtctccagcctgcaggctccatgagcacagccttgatggtggtgggcaggcgcctgcctgctgtggactacatttgatgcaaaacatcaagtaaagggtggagcgtaatacagtgaatatgcctcccagaaacatcatgctctgcctattttaacagggctctttttctttagaaaagtctccttctctatagaaaccagggacaattttggatgagagccaaccacaggacgcgctggggacgttatggtgggacctcacatgtggccaggtgcacctttgggaagaaggcagacgtgatgtgacttagcacaggcactcaaaagaggcagccactggtctttgctaatatccagaagtggattgtttgttccattcatccttctagaagctaaattctttcattgccttgagacatcactagattttgaagcacttgcaaactagaagcttgcaagatcaatgtccatgtatatttttaaagatatgcatgctttaaaaggaccctaatttctgagtacatggcttccccaaagaaacagtatatattctggagatgatgggggttttggcatggagagggactcctgtctagtctagaaaatgttacttacatgcctcttccatgtaccgatctcaagaatatgggttttctagttggctttaaacactacccaggcaggaaggtggctttggtaagaattttgagctggatgaaatgttctagtgaacttacgactgtgtatgtgcgcacgcgtgtgtgtgtgtgtgtgtgtgtgtgtgtgtgtgtgtgtgtgtgaagaaacagcaaaaggggaagtgggagaaacagtaaggaagcgtttttaattaaaaatatgtatacctaagaggagactttattttctatttctggtggtggtgatctatgttctggaatccatttaccagaagtttgtggatcttttgtttgaagtggaattgttcagtgccctactctctttgacggtgcagagccttgcggcaaagtgttctcctgggccctagagacccccagggcacctggcaggagcccgtaaaccacggcagagtcccaagtggtgcatgttttggcgagtgatgggcaggactgatgattcacagctgtgaggctgtgctattgtttttaccctcttgtactgcttttaataggaagtcccgactttacgtcagttgtgagagcagcgtcttatgatgtgacaggcaagaagacattccttgcatcaaatataagagtttaatgagaagagtggagtggataagtgaactctcccaagagtactgttttttgtttccctttttaaatgctttcttggtacataaataatataatactttttttaaagaaattccagatgagtgggaaaaaaaccaatcacctgttattacactatctgattataaccactgttaacatttcagtttttatcttttcagacttttttctatgcatctgtgtgtgttttattactttttccatgaaatataatcatattatacatactgttttataacttttatcccttttaatgctatattgtgaatagatttctatatcagtaaatatgtaattacattatttttaacctctatgtaggttgtaccttggatacttaggttgtttccaatttttttactgttgtagtcaaggacataatgaagttcttctaacatccttgcgaacttttcagaatattgacttagggtaattttctgaagttatcactggctcaaaagtacgcgcctccctatctgcggctcctttccttctgaggcatacaggacttcaccctccatcccccttgtactcattcagggtcctatgactaattctggccaatgaaatgtgagcacaggtgacacatgaagctccagacagacactgaaatgcccatgagcagttccgcagtgtctgccttcccttccctcagcaaatgctgatgtcccagggacagagcctctgtcaagcctggatccctgagtgactacgtggagcagcccccttctcccttcatgttaccctcacctgccaccctgcatggacgggtagcatgaataaaaaaaataaaccttaggtgttaaacactggggtttcagggttaattggttaactgcagcataacatatcctgttgcaacaataaaaaagaatgcacatttttaggacttgtaatatgtattgcctcaaattgccttccagaaagacagacccaattatactcccacccacagtgtgtgagtgtgtactgcttcctctttaacactggagttaccctggggacagagagctaaaaaaaatatttttttggttaaaatgtaaccctttaaggtgttcagcagtatcattgatttctaagaggtttatttcataaacattgtaaaacaaaattttaagttgcacgtatggctttttaaaaacgtttagacatttaaaaaaacaccttttagtcaagtttatctgttacttttttttttttttttaatggttgctacctatgccgtcatgcttatgcaggtctttccaattcttttttttttttttttttttttttttttttgagacggggtccaccctggcccccaggctggagtgcagtggcgtgatctcagctcactgcaacctgcgcctcccgggttcaagcgattctcatgtgtcaacctccctcctgagtagctgggactacaagtgtatgccaccacgcccaggtaactttttgtttttagtagagatgggtttcgccatgttgcctaggctggtctcgaactcctgaactcaggcaatccacacgccttggcctcccaaagtgctggaattacaggtgtgagccaccaagcccggcgaggtcttcccaattctgatggcaaggttgtataaatattcaccactatcttattcttgtacttttattatttctttctaaacagttaaatctgtgatctggctgggcgtgttggctcttgcctgtaatcccaacactttgggtcgccaaggtggaaggatcacttgagtccaggcatttgaggttacagtgagctttgatggcaccggtgcactccagcctggggaacagagcaagaccctgtctctaaaaaaaattttaaaaacctctgatctatctggaatgtattttctaaattaccccaacactgtttattgggaagtctgtcctttattctatatgaaatcccatttttgccatacacctagtagcccttctgttgggtgccaggataagcaccctggccttgagtgtgctgtgaactctttattatgggttgtgatcttcctgcacattctagcactggtaccacattgtttggatcgccatagctttggactaaacttccccattaaactttttcaaaacttgcctagtatattgtgcaggccgggcatggtggctcacgcctgtaatcccagcactttgggaggccaaggtggatggatcacctgagatcaggagttcgagaccagcctggataacatggcgaaaccccatctctactaaaaatacaaaaaaaaaaaaaaaaaaaaaaaattagctggctgtggtgataggaacctgtaatctcagctacttgggaggctgaggcagtgaacccaggaggcagaggttgcagtgagctgagatagcaccagcctgggcaacggagcgagactctgtctcaaaaaaacaaaaaacaaaacaaaaaaaaaaccttccaaaagaagtttgagataattttatgtttagaaaaattagaaattggattgagtaaaatttacatattttacacaagaggactaacatctttataatatttaacctttcagtaaatttatgttttatgtttctcagcctatcttttctagtataggtgatttttttagtgtggttactattgtaaatgagatcctactactttaaaaaatgaaaattaaatctatcgcttttatgactttaaaacattagacttatgtaagtgtaaacattatttaaaaacataatgtagaaaattaaagtcccccataattaaaatccctttcccccagaaaaagtcaacagcatattcatcagttttttcctaaagtatgttttagcactttgaccatatgagacaacccttctgctgttagcatttttctctttgcaatagatcttcctatgtcagtacacatcaatctacctcattcttacctctgcataagagagtagtgtgtagttgtataatagtttaacttggcgattggttattgattttgtaactagccagttactgaattattctaaaggttttgctgttgttaatttctttcgcctttttcagttgggtaatagttctgggtaggttgataattttattcccatatttgtaatcttatttcactttctcaactcatcacattgactggtacttttagaacaatgttaaaaaacatttacataattgtgctgatattgtacattatttgatatatatatatcaaattttttttacttagaagagtgtttctccaaaactataaatttgactcttagtgtaaaataatcttaatatttgaattatacattcaggttatgccctctatttctagtttgatgaaaatattattagtaatggatgttggggttttattaaatggcttttttccacatctgtcaagatgatcaactggcttttctctattatgactttagatgaatcgttttaatagatttgctaatgttaagacatctctgcatttctacaagaatctgatgtagtcatagtatactattcttttaatatacatctcctttcaatgttaacagtggttatttatgattggttggtccatagtagatttttattttgtgtttcttatctgtactttctgatttttctacaaagattgtgtattacttgtataataaaaataagagctttaaattgt

SEQ ID NO: 13911 - DNA, 1287 bp, Homo sapiens
  source 1..1287: mol_type = unassigned DNA
gggccaaaccagtgctcctgccacctctctggctgccccctagagcctgcccatcccagcctgaccaatgtccacagccagggagcagccaatcttcagcacacgggcgcacgtgttccaaattgacccagccaccaagcgaaactggatcccagcgggcaagcacgcactcactgtctcctatttctacgatgccacccgcaatgtgtaccgcatcatcagcatcggaggcgccaaggccatcatcaacagcactgtcactcccaacatgaccttcaccaaaacttcccagaagttcgggcagtgggccgacagtcgcgccaacacagtctacggcctgggctttgcctctgaacagcatctgacacaggtgcccccgagccctctcgtcagtgccaacggccccggcgaggaaaaactgttccgcagccagagcgctgatgcccccggccccacagagcgcgagcggctaaagaagatgttgtctgagggctccgtgggcgaggtacagtgggaggccgagtttttcgcactgcaggacagcaacaacaagctggcaggcgccctgcgagaggccaacgccgccgcagcccagtggaggcagcagctggaggctcagcgtgcagaggccgagcggctgcggcagcgggtggctgagctggaggctcaggcagcttcagaggtgacccccaccggtgagaaggaggggctgggccagggccagtcgctggaacagctggaagctctggtgcaaaccaaggaccaggagattcagaccctgaagagtcagactggggggccccgcgaggccctggaggctgccgagcgtgaggagactcagcagaaggtgcaggacctggagacccgcaatgcggagttggagcaccagctgcgggcgatggagcgcagcctggaggaggcacgggcagagcgggagcgggcgcgggctgaggtgggccgggcagcgcagctgctggacgtcagcctgtttgagctgagtgagctgcgtgagggcctggcccgcctggctgaggctgcgccctgagccggggctggttttctatgaacgattccggcctgggatgcgggccaggctgcaggcggcatagttgggcccattcgtcctggaaagggactggggggtcccaacttagccctgggtgggccgggccgggctgggctggggtgggccccagtcggctctggttgttggcagctttggggctgtttttgagcttctcattgtgtagaatttctagatcccccgattacatttctaagcgtggc

SEQ ID NO: 13912 - DNA, 1284 bp, Homo sapiens
  source 1..1284: mol_type = unassigned DNA
acgggcggcgtggagggcggcgcggagggcgcgggcccgggagccagggagcgagcggggcgcccggcagcgcggagtcagcgccgcgggggccgcacccgactcgcgcctggacactcgcggggcgccgacctggcagggggccaaaccagtgctcctgccacctctctggctgccccctagagcctgcccatcccagcctgaccaatgtccacagccagggagcagccaatcttcagcacacgggcgcacgtgttccaaattgacccagccaccaagcgaaactggatcccagcgggcaagcacgcactcactgtctcctatttctacgatgccacccgcaatgtgtaccgcatcatcagcatcggaggcgccaaggccatcatcaacagcactgtcactcccaacatgaccttcaccaaaacttcccagaagttcgggcagtgggccgacagtcgcgccaacacagtctacggcctgggctttgcctctgaacagcatctgacacagtttgccgagaagttccaggaagtgaaggaagcagccaggctggccagggagaaatctcaggatggcggggagctcaccagtccagccctggggctcgcctcccaccaggtgcccccgagccctctcgtcagtgccaacggccccggcgaggaaaaactgttccgcagccagagcgctgatgcccccggccccacagagcgcgagcggctaaagaagatgttgtctgagggctccgtgggcgaggtacagtgggaggccgagtttttcgcactgcaggacagcaacaacaagctggcaggcgccctgcgagaggccaacgccgccgcagcccagtggaggcagcagctggaggctcagcgtgcagaggccgagcggctgcggcagcgggtggctgagctggaggctcaggcagcttcagaggtgacccccaccggtgagaaggaggggctgggccagggccagtcgctggaacagctggaagctctggtgcaaaccaaggaccaggagattcagaccctgaagagtcagactggggggccccgcgaggccctggaggctgccgagcgtgaggagactcagcagaaggtgcagacccgcaatgcggagttggagcaccagctgcgggcgatggagcgcagcctggaggaggcacgggcagagcgggagcgggcgcgggctgaggtgggccgggcagcgcagctgctggacgtcagcctgtttgagctgagtgagctgcgtgagggcctggcccgcctggctgaggctgcgccctga

SEQ ID NO: 13913 - DNA, 645 bp, Homo sapiens
  source 1..645: mol_type = unassigned DNA
acgggcggcgtggagggcggcgcggagggcgcgggcccgggagccagggagcgagcggggcgcccggcagcgcggagtcagcgccgcgggggccgcacccgactcgcgcctggacactcgcggggcgccgacctggcagggggccaaaccagtgctcctgccacctctctggctgccccctagagcctgcccatcccagcctgaccaatgtccacagccagggagcagccaatcttcagcacacgggcgcacgtgttccaaattgacccagccaccaagcgaaactggatcccagcgggcaagcacgcactcactgtctcctatttctacgatgccacccgcaatgtgtaccgcatcatcagcatcggaggcgccaaggccatcatcaacagcactgtcactcccaacatgaccttcaccaaaacttcccagaagttcgggcagtgggccgacagtcgcgccaacacagtctacggcctgggctttgcctctgaacagcatctgacacagtttgccgagaagttccaggaagtgaaggaagcagccaggctggccagggagaaatctcaggatggctggggtgggccccagtcggctctggttgttggcagctttggggctgtttttgagcttctcattgtgtag

SEQ ID NO: 13914 - DNA, 1577 bp, Homo sapiens
  source 1..1577: mol_type = unassigned DNA
gggaccggaggcggcgcgggcggcggcggcgcagacaaaggcacgggcggcgtggagggcggcgcggagggcgcgggcccgggagccagggagcgagcggggcgcccggcagcgcggagtcagcgccgcgggggccgcacccgactcgcgcctggacactcgcggggcgccgacctggcagggggccaaaccagtgctcctgccacctctctggctgccccctagagcctgcccatcccagcctgaccaatgtccacagccagggagcagccaatcttcagcacacgggcgcacgtgttccaaattgacccagccaccaagcgaaactggatcccagcgggcaagcacgcactcactgtctcctatttctacgatgccacccgcaatgtgtaccgcatcatcagcatcggaggcgccaaggccatcatcaacagcactgtcactcccaacatgaccttcaccaaaacttcccagaagttcgggcagtgggccgacagtcgcgccaacacagtctacggcctgggctttgcctctgaacagcatctgacacagtttgccgagaagttccaggaagtgaaggaagcagccaggctggccagggagaaatctcaggatggcggggagctcaccagtccagccctggggctcgcctcccaccaggtgcccccgagccctctcgtcagtgccaacggccccggcgaggaaaaactgttccgcagccagagcgctgatgcccccggccccacagagcgcgagcggctaaagaagatgttgtctgagggctccgtgggcgaggtacagtgggaggccgagtttttcgcactgcaggacagcaacaacaagctggcaggcgccctgcgagaggccaacgccgccgcagcccagtggaggcagcagctggaggctcagcgtgcagaggccgagcggctgcggcagcgggtggctgagctggaggctcaggcagcttcagaggtgacccccaccggtgagaaggaggggctgggccagggccagtcgctggaacagctggaagctctggtgcaaaccaaggaccaggagattcagaccctgaagagtcagactggggggccccgcgaggccctggaggctgccgagcgtgaggagactcagcagaaggtgcaggacctggagacccgcaatgcggagttggagcaccagctgcgggcgatggagcgcagcctggaggaggcacgggcagagcgggagcgggcgcgggctgaggtgggccgggcagcgcagctgctggacgtcagcctgtttgagctgagtgagctgcgtgagggcctggcccgcctggctgaggctgcgccctgagccggggctggttttctatgaacgattccggcctgggatgcgggccaggctgcaggcggcatagttgggcccattcgtcctggaaagggactggggggtcccaacttagccctgggtgggccgggccgggctgggctggggtgggccccagtcggctctggttgttggcagctttggggctgtttttgagcttctcattgtgtagaatttctagatcccccgattacatttctaagcgtggc

SEQ ID NO: 13915 - DNA, 1418 bp, Homo sapiens
  source 1..1418: mol_type = unassigned DNA
ggccggcggcatccgaggcgcatgactagttggggccaaaccagtgctcctgccacctctctggctgccccctagagcctgcccatcccagcctgaccaatgtccacagccagggagcagccaatcttcagcacacgggcgcacgtgttccaaattgacccagccaccaagcgaaactggatcccagcgggcaagcacgcactcactgtctcctatttctacgatgccacccgcaatgtgtaccgcatcatcagcatcggaggcgccaaggccatcatcaacagcactgtcactcccaacatgaccttcaccaaaacttcccagaagttcgggcagtgggccgacagtcgcgccaacacagtctacggcctgggctttgcctctgaacagcatctgacacagtttgccgagaagttccaggaagtgaaggaagcagccaggctggccagggagaaatctcaggatggcggggagctcaccagtccagccctggggctcgcctcccaccaggtgcccccgagccctctcgtcagtgccaacggccccggcgaggaaaaactgttccgcagccagagcgctgatgcccccggccccacagagcgcgagcggctaaagaagatgttgtctgagggctccgtgggcgaggtacagtgggaggccgagtttttcgcactgcaggacagcaacaacaagctggcaggcgccctgcgagaggccaacgccgccgcagcccagtggaggcagcagctggaggctcagcgtgcagaggccgagcggctgcggcagcgggtggctgagctggaggctcaggcagcttcagaggtgacccccaccggtgagaaggaggggctgggccagggccagtcgctggaacagctggaagctctggtgcaaaccaaggaccaggagattcagaccctgaagagtcagactggggggccccgcgaggccctggaggctgccgagcgtgaggagactcagcagaaggtgcagacccgcaatgcggagttggagcaccagctgcgggcgatggagcgcagcctggaggaggcacgggcagagcgggagcgggcgcgggctgaggtgggccgggcagcgcagctgctggacgtcagcctgtttgagctgagtgagctgcgtgagggcctggcccgcctggctgaggctgcgccctgagccggggctggttttctatgaacgattccggcctgggatgcgggccaggctgcaggcggcatagttgggcccattcgtcctggaaagggactggggggtcccaacttagccctgggtgggccgggccgggctgggctggggtgggccccagtcggctctggttgttggcagctttggggctgtttttgagcttctcattgtgtagaatttctagatcccccgattacatttctaagcgtggc

SEQ ID NO: 13916 - DNA, 1979 bp, Homo sapiens
  source 1..1979: mol_type = unassigned DNA
caataaccaggacaatgagaaatttacatctggatgtcagcggccaccaggctcctctcagagggccatctcctgtacagggtgttgtgggggcttcccctagacaaagaaagatggggtctgcttgctctgagttatctataataattatcttacctttttgtttctttttataatttctttcttttttgagacagggtctcactctcttgtccaggctggagtgcagtggcctgaccatagctcactgcactgcagccttgacctcctgggctcaagtgatcctcccacctcagcctccccagtagctgggacggcaggcacatgccaccacacccagctaattgtttaaatttttggtagagatggggtctcgccatgttgctcaggatggtctcgaactcctgggctcaaaggatcctcctgactcagcctcccaaagcaccaggtgtactttgggcctctcctgcctttttgattgaaagttccatgacgggcacacctggtgatgggtcctgagatggaacctgcttggcctccctcagcctggcctgagggacactcatagtccctcctctctccctaggggccaaaccagtgctcctgccacctctctggctgccccctagagcctgcccatcccagcctgaccaatgtccacagccagggagcagccaatcttcagcacacgggcgcacgtgttccaaattgacccagccaccaagcgaaactggatcccagcgggcaagcacgcactcactgtctcctatttctacgatgccacccgcaatgtgtaccgcatcatcagcatcggaggcgccaaggccatcatcaacagcactgtcactcccaacatgaccttcaccaaaacttcccagaagttcgggcagtgggccgacagtcgcgccaacacagtctacggcctgggctttgcctctgaacagcatctgacacagtttgccgagaagttccaggaagtgaaggaagcagccaggctggccagggagaaatctcaggatggcggggagctcaccagtccagccctggggctcgcctcccaccaggtgcccccgagccctctcgtcagtgccaacggccccggcgaggaaaaactgttccgcagccagagcgctgatgcccccggccccacagagcgcgagcggctaaagaagatgttgtctgagggctccgtgggcgaggtacagtgggaggccgagtttttcgcactgcaggacagcaacaacaagctggcaggcgccctgcgagaggccaacgccgccgcagcccagtggaggcagcagctggaggctcagcgtgcagaggccgagcggctgcggcagcgggtggctgagctggaggctcaggcagcttcagaggtgacccccaccggtgagaaggaggggctgggccagggccagtcgctggaacagctggaagctctggtgcaaaccaaggaccaggagattcagaccctgaagagtcagactggggggccccgcgaggccctggaggctgccgagcgtgaggagactcagcagaaggtgcaggacctggagacccgcaatgcggagttggagcaccagctgcgggcgatggagcgcagcctggaggaggcacgggcagagcgggagcgggcgcgggctgaggtgggccgggcagcgcagctgctggacgtcagcctgtttgagctgagtgagctgcgtgagggcctggcccgcctggctgaggctgcgccctgagccggggctggttttctatgaacgattccggcctgggatgcgggccaggctgcaggcggcatagttgggcccattcgtcctggaaagggactggggggtcccaacttagccctgggtgggccgggccgggctgggctggggtgggccccagtcggctctggttgttggcagctttggggctgtttttgagcttctcattgtgtagaatttctagatcccccgattacatttctaagcgtg

SEQ ID NO: 13917 - DNA, 1849 bp, Homo sapiens
  source 1..1849: mol_type = unassigned DNA
aaacgctgcaagtcgcagcaggagctgccggaccggaagggcctgggttccggggacccctgtgttccccaactcccacccggcgcaggacccgcccccagtccaggccagagctgccgccccacccccactcaggggctccggtttcagaccctgtgaccaggacagcagctgcccaggacaggatagggggggcatcccccctttgaccacagaggccgctgggccagggcctcccctcccccacctgtcttccccctcctccaaactcctccttggtcccctgcagattcggggttgctgaatggcccaatggggaggttggggagccctggtctcccagtgtggattctgctctgccctcatggtgggcattgggattggctgtttgtctacatcttgtctttttaacttggctgggggctccctggggatttggactctggacttcaaggggccaaaccagtgctcctgccacctctctggctgccccctagagcctgcccatcccagcctgaccaatgtccacagccagggagcagccaatcttcagcacacgggcgcacgtgttccaaattgacccagccaccaagcgaaactggatcccagcgggcaagcacgcactcactgtctcctatttctacgatgccacccgcaatgtgtaccgcatcatcagcatcggaggcgccaaggccatcatcaacagcactgtcactcccaacatgaccttcaccaaaacttcccagaagttcgggcagtgggccgacagtcgcgccaacacagtctacggcctgggctttgcctctgaacagcatctgacacagtttgccgagaagttccaggaagtgaaggaagcagccaggctggccagggagaaatctcaggatggcggggagctcaccagtccagccctggggctcgcctcccaccaggtgcccccgagccctctcgtcagtgccaacggccccggcgaggaaaaactgttccgcagccagagcgctgatgcccccggccccacagagcgcgagcggctaaagaagatgttgtctgagggctccgtgggcgaggtacagtgggaggccgagtttttcgcactgcaggacagcaacaacaagctggcaggcgccctgcgagaggccaacgccgccgcagcccagtggaggcagcagctggaggctcagcgtgcagaggccgagcggctgcggcagcgggtggctgagctggaggctcaggcagcttcagaggtgacccccaccggtgagaaggaggggctgggccagggccagtcgctggaacagctggaagctctggtgcaaaccaaggaccaggagattcagaccctgaagagtcagactggggggccccgcgaggccctggaggctgccgagcgtgaggagactcagcagaaggtgcaggacctggagacccgcaatgcggagttggagcaccagctgcgggcgatggagcgcagcctggaggaggcacgggcagagcgggagcgggcgcgggctgaggtgggccgggcagcgcagctgctggacgtcagcctgtttgagctgagtgagctgcgtgagggcctggcccgcctggctgaggctgcgccctgagccggggctggttttctatgaacgattccggcctgggatgcgggccaggctgcaggcggcatagttgggcccattcgtcctggaaagggactggggggtcccaacttagccctgggtgggccgggccgggctgggctggggtgggccccagtcggctctggttgttggcagctttggggctgtttttgagcttctcattgtgtagaatttctagatcccccgattacatttctaagcgtggc

SEQ ID NO: 13918 - DNA, 982 bp, Homo sapiens
  source 1..982: mol_type = unassigned DNA
atgtccacagccagggagcagccaatcttcagcacacgggcgcacgtgttccaaattgacccagccaccaagcgaaactggatcccagcgggcaagcacgcactcactgtctcctatttctacgatgccacccgcaatgtgtaccgcatcatcagcatcggaggcgccaaggccatcatcaacagcactgtcactcccaacatgaccttcaccaaaacttcccagaagttcgggcagtgggccgacagtcgcgccaacacagtctacggcctgggctttgcctctgaacagcatctgacacaggtgcccccgagccctctcgtcagtgccaacggccccggcgaggaaaaactgttccgcagccagagcgctgatgcccccggccccacagagcgcgagcggctaaagaagatgttgtctgagggctccgtgggcgaggtacagtgggaggccgagtttttcgcactgcaggacagcaacaacaagctggcaggcgccctgcgagaggccaacgccgccgcagcccagtggaggcagcagctggaggctcagcgtgcagaggccgagcggctgcggcagcgggtggctgagctggaggctcaggcagcttcagaggtgacccccaccggtgagaaggaggggctgggccagggccagtcgctggaacagctggaagctctggtgcaaaccaaggaccaggagattcagaccctgaagagtcagactggggggccccgcgaggccctggaggctgccgagcgtgaggagactcagcagaaggtgcaggacctggagacccgcaatgcggagttggagcaccagctgcgggcgatggagcgcagcctggaggaggcacgggcagagcgggagcgggcgcgggctgaggtgggccgggcagcgcagctgctggacgtcagcctgtttgagctgagtgagctgcgtgagggcctggcccgcctggctgaggctgcgccctgagccg

SEQ ID NO: 13919 - DNA, 1887 bp, Homo sapiens
  source 1..1887: mol_type = unassigned DNA
ccgaagcgggggcgcgcgccccagagacgtgaactgtcgttgcagagattgcgggcggctgagacgccgcctgcctggcacctaggagcgcagcggagccccgacaccgccgccgccgccatggagtccgagaccgaacccgagcccgtcacgctcctggtgaagagccccaaccagcgccaccgcgacttggagctgagtggcgaccgcggctggagtgtgggccacctcaaggcccacctgagccgcgtctaccccgagcgtccgcgtccagaggaccagaggttaatttattctgggaagctgttgttggatcaccaatgtctcagggacttgcttccaaagcaggaaaaacggcatgttttgcatctggtgtgcaatgtgaagagtccttcaaaaatgccagaaatcaacgccaaggtggctgaatccacagaggagcctgctggttctaatcggggacagtatcctgaggattcctcaagtgatggtttaaggcaaagggaagttcttcggaacctttcttcccctggatgggaaaacatctcaaggcctgaagctgcccagcaggcattccaaggcctgggtcctggtttctccggttacacaccctatgggtggcttcagctttcctggttccagcagatatatgcacgacagtactacatgcaatatttagcagccactgctgcatcaggggcttttgttccaccaccaagtgcacaagagatacctgtggtctctgcacctgctccagcccctattcacaaccagtttccagctgaaaaccagcctgccaatcagaatgctgctcctcaagtggttgttaatcctggagccaatcaaaatttgcggatgaatgcacaaggtggccctattgtggaagaagatgatgaaataaatcgagattggttggattggacctattcagcagctacattttctgtttttctcagtatcctctacttctactcctccctgagcagattcctcatggtcatgggggccaccgttgttatgtacctgcatcacgttgggtggtttccatttagaccgaggccggttcagaacttcccaaatgatggtcctcctcctgacgttgtaaatcaggaccccaacaataacttacaggaaggcactgatcctgaaactgaagaccccaaccacctccctccagacagggatgtactagatggcgagcagaccagcccctcctttatgagcacagcatggcttgtcttcaagactttctttgcctctcttcttccagaaggccccccagccatcgcaaactgatggtgtttgtgctgtagctgttggaggctttgacaggaatggactggatcacctgactccagctagattgcctctcctggacatggcaatgatgagtttttaaaaaacagtgtggatgatgatatgcttttgtgagcaagcaaaagcagaaacgtgaagccgtgatacaaattggtgaacaaaaaatgcccaaggcttctcatgtctttattctgaagagctttaatatatactctatgtagtttaataagcactgtacgtagaaggccttaggtgttgcatgtctatgcttgaggaacttttccaaatgtgtgtgtctgcatgtgtgtttgtacatagaagtcatagatgcagaagtggttctgctggtacgatttgattcctgttggaatgtttaaattacactaagtgtactactttatataatcaatgaaattgctagacatgttttagcaggacttttctaggaaagacttatgtataattgctttttaaaatgcagtgctttactttaaactaaggggaactttgcggaggtgaaaacctttgctgggttttctgttcaataaagttttactatgaatgaccctg

SEQ ID NO: 13920 - DNA, 1388 bp, Homo sapiens
  source 1..1388: mol_type = unassigned DNA
agagacgtgaactgtcgttgcagagattgcgggcggctgagacgccgcctgcctggcacctaggagcgcagcggagccccgacaccgccgccgccgccatggagtccgagaccgaacccgagcccgtcacgctcctggtgaagagccccaaccagcgccaccgcgacttggagctgagtggcgaccgcggctggagtgtgggccacctcaaggcccacctgagccgcgtctaccccgagcgtccgcgtccagaggaccagaggttaatttattctgggaagctgttgttggatcaccaatgtctcagggacttgcttccaaaggaaaaacggcatgttttgcatctggtgtgcaatgtgaagagtccttcaaaaatgccagaaatcaacgccaaggtggctgaatccacagaggagcctgctggttctaatcggggacagtatcctgaggattcctcaagtgatggtttaaggcaaagggaagttcttcggaacctttcttcccctggatgggaaaacatctcaaggcatcacgttgggtggtttccatttagaccgaggccggttcagaacttcccaaatgatggtcctcctcctgacgttgtaaatcaggaccccaacaataacttacaggaaggcactgatcctgaaactgaagaccccaaccacctccctccagacagggatgtactagatggcgagcagaccagcccctcctttatgagcacagcatggcttgtcttcaagactttctttgcctctcttcttccagaaggccccccagccatcgcaaactgatggtgtttgtgctgtagctgttggaggctttgacaggaatggactggatcacctgactccagctagattgcctctcctggacatggcaatgatgagtttttaaaaaacagtgtggatgatgatatgcttttgtgagcaagcaaaagcagaaacgtgaagccgtgatacaaattggtgaacaaaaaatgcccaaggcttctcatgtctttattctgaagagctttaatatatactctatgtagtttaataagcactgtacgtagaaggccttaggtgttgcatgtctatgcttgaggaacttttccaaatgtgtgtgtctgcatgtgtgtttgtacatagaagtcatagatgcagaagtggttctgctggtacgatttgattcctgttggaatgtttaaattacactaagtgtactactttatataatcaatgaaattgctagacatgttttagcaggacttttctaggaaagacttatgtataattgctttttaaaatgcagtgctttactttaaactaaggggaactttgcggaggtgaaaacctttgctgggttttctgttcaataaagttttactatgaatgaccctg

SEQ ID NO: 13921 - DNA, 2101 bp, Homo sapiens
  source 1..2101: mol_type = unassigned DNA
ccacccgagctgggggcctcgcaggtctcagaccaagctccccgcgcggcctgcagcgcacccaaacatggccaccgaacccgggttcccggggcacagccgcgcctctgggtgacgcagacgcggcgggttgcatcagcccgtgcccacgtgctcggtccgccctctgccacccggatccggacgccgattgggccacgttgggagagtgcctccgcctcagccaatgggcggcagccacagagcgttctgtccgcagagccgggcgcggggcttctataaaaggcgcccgaagcgggggcgcgcgccccagagacgtgaactgtcgttgcagagattgcgggcggctgagacgccgcctgcctggcacctaggagcgcagcggagccccgacaccgccgccgccgccatggagtccgagaccgaacccgagcccgtcacgctcctggtgaagagccccaaccagcgccaccgcgacttggagctgagtggcgaccgcggctggagtgtgggccacctcaaggcccacctgagccgcgtctaccccgagcgtccgcgtccagaggaccagaggttaatttattctgggaagctgttgttggatcaccaatgtctcagggacttgcttccaaaggtggctgaatccacagaggagcctgctggttctaatcggggacagtatcctgaggattcctcaagtgatggtttaaggcaaagggaagttcttcggaacctttcttcccctggatgggaaaacatctcaaggcctgaagctgcccagcaggcattccaaggcctgggtcctggtttctccggttacacaccctatgggtggcttcagctttcctggttccagcagatatatgcacgacagtactacatgcaatatttagcagccactgctgcatcaggggcttttgttccaccaccaagtgcacaagagatacctgtggtctctgcacctgctccagcccctattcacaaccagtttccagctgaaaaccagcctgccaatcagaatgctgctcctcaagtggttgttaatcctggagccaatcaaaatttgcggatgaatgcacaaggtggccctattgtggaagaagatgatgaaataaatcgagattggttggattggacctattcagcagctacattttctgtttttctcagtatcctctacttctactcctccctgagcagattcctcatggtcatgggggccaccgttgttatgtacctgcatcacgttgggtggtttccatttagaccgaggccggttcagaacttcccaaatgatggtcctcctcctgacgttgtaaatcaggaccccaacaataacttacaggaaggcactgatcctgaaactgaagaccccaaccacctccctccagacagggatgtactagatggcgagcagaccagcccctcctttatgagcacagcatggcttgtcttcaagactttctttgcctctcttcttccagaaggccccccagccatcgcaaactgatggtgtttgtgctgtagctgttggaggctttgacaggaatggactggatcacctgactccagctagattgcctctcctggacatggcaatgatgagtttttaaaaaacagtgtggatgatgatatgcttttgtgagcaagcaaaagcagaaacgtgaagccgtgatacaaattggtgaacaaaaaatgcccaaggcttctcatgtctttattctgaagagctttaatatatactctatgtagtttaataagcactgtacgtagaaggccttaggtgttgcatgtctatgcttgaggaacttttccaaatgtgtgtgtctgcatgtgtgtttgtacatagaagtcatagatgcagaagtggttctgctggtacgatttgattcctgttggaatgtttaaattacactaagtgtactactttatataatcaatgaaattgctagacatgttttagcaggacttttctaggaaagacttatgtataattgctttttaaaatgcagtgctttactttaaactaaggggaactttgcggaggtgaaaacctttgctgggttttctgttcaataaagttttactatgaatgaccctg

SEQ ID NO: 13922 - DNA, 2173 bp, Homo sapiens
  source 1..2173: mol_type = unassigned DNA
ccacccgagctgggggcctcgcaggtctcagaccaagctccccgcgcggcctgcagcgcacccaaacatggccaccgaacccgggttcccggggcacagccgcgcctctgggtgacgcagacgcggcgggttgcatcagcccgtgcccacgtgctcggtccgccctctgccacccggatccggacgccgattgggccacgttgggagagtgcctccgcctcagccaatgggcggcagccacagagcgttctgtccgcagagccgggcgcggggcttctataaaaggcgcccgaagcgggggcgcgcgccccagagacgtgaactgtcgttgcagagattgcgggcggctgagacgccgcctgcctggcacctaggagcgcagcggagccccgacaccgccgccgccgccatggagtccgagaccgaacccgagcccgtcacgctcctggtgaagagccccaaccagcgccaccgcgacttggagctgagtggcgaccgcggctggagtgtgggccacctcaaggcccacctgagccgcgtctaccccgagcgtccgcgtccagaggaccagaggttaatttattctgggaagctgttgttggatcaccaatgtctcagggacttgcttccaaaggaaaaacggcatgttttgcatctggtgtgcaatgtgaagagtccttcaaaaatgccagaaatcaacgccaaggtggctgaatccacagaggagcctgctggttctaatcggggacagtatcctgaggattcctcaagtgatggtttaaggcaaagggaagttcttcggaacctttcttcccctggatgggaaaacatctcaaggcctgaagctgcccagcaggcattccaaggcctgggtcctggtttctccggttacacaccctatgggtggcttcagctttcctggttccagcagatatatgcacgacagtactacatgcaatatttagcagccactgctgcatcaggggcttttgttccaccaccaagtgcacaagagatacctgtggtctctgcacctgctccagcccctattcacaaccagtttccagctgaaaaccagcctgccaatcagaatgctgctcctcaagtggttgttaatcctggagccaatcaaaatttgcggatgaatgcacaaggtggccctattgtggaagaagatgatgaaataaatcgagattggttggattggacctattcagcagctacattttctgtttttctcagtatcctctacttctactcctccctgagcagattcctcatggtcatgggggccaccgttgttatgtacctgcatcacgttgggtggtttccatttagaccgaggccggttcagaacttcccaaatgatggtcctcctcctgacgttgtaaatcaggaccccaacaataacttacaggaaggcactgatcctgaaactgaagaccccaaccacctccctccagacagggatgtactagatggcgagcagaccagcccctcctttatgagcacagcatggcttgtcttcaagactttctttgcctctcttcttccagaaggccccccagccatcgcaaactgatggtgtttgtgctgtagctgttggaggctttgacaggaatggactggatcacctgactccagctagattgcctctcctggacatggcaatgatgagtttttaaaaaacagtgtggatgatgatatgcttttgtgagcaagcaaaagcagaaacgtgaagccgtgatacaaattggtgaacaaaaaatgcccaaggcttctcatgtctttattctgaagagctttaatatatactctatgtagtttaataagcactgtacgtagaaggccttaggtgttgcatgtctatgcttgaggaacttttccaaatgtgtgtgtctgcatgtgtgtttgtacatagaagtcatagatgcagaagtggttctgctggtacgatttgattcctgttggaatgtttaaattacactaagtgtactactttatataatcaatgaaattgctagacatgttttagcaggacttttctaggaaagacttatgtataattgctttttaaaatgcagtgctttactttaaactaaggggaactttgcggaggtgaaaacctttgctgggttttctgttcaataaagttttactatgaatgaccctg

SEQ ID NO: 13923 - DNA, 2005 bp, Homo sapiens
  source 1..2005: mol_type = unassigned DNA
ctccaggagactcagcactgccctgttccttcctagcctgagtcaggactgagcagagaatcctccaccacacacagcaggcactatctgccacagttcctttccccgatagcttcaaattctctgccttttgaaataagcctacttttaactggaataaataattggtcaatctctacctcaggtgaagaggaaccaagcctctggaaacacttaggaacaaactgtaaaaaccaaaggcaattgtgtaaccggttaaataagcttgctggactttgtccctgtgtatgagttagacaattctttcagctagtttgagtgacgcactgaccagtgaagcgcagtgaagcagtgggaaccggaatatccaaagagtggtttgaaggagaaagaagcattgtggctttatatcctctgggcctgggtttcctgaagtcaccacacatagaggagagagaaaatggctgagttaaagtacatttctggatttgggaatgagtgttcttcagaggatcctcgctgcccaggttccctgccagaaggacagaataatcctcaggtctgcccctacaatctctatgctgagcagctctcaggatcggctttcacttgtccacggagcaccaataagagaagctggctgtataggattctaccttcagtttctcacaagccctttgaatccattgacgaaggccaagtcactcacaactgggatgaagttgatcctgatcctaaccagcttagatggaaaccatttgagattccaaaagcatctcagaagaaagtagactttgtgagtggcctgcataccttgtgtggagctggagacataaagtctaacaatgggcttgctatccacattttcctctgcaatacctccatggagaacagatgcttttacaattcagatggggacttcttgattgttccgcagaaagggaaccttctcatttacaccgagtttggcaagatgcttgtacagcccaatgagatctgcgtcattcagagaggaatgcggttcagcatagatgtctttgaggagaccaggggctacatcttggaggtctatggtgtccactttgagttacctgaccttggaccaattggggccaatggcttggccaatcctcgtgatttcttgatacccattgcctggtatgaggatcgccaagtaccaggtggttacacggtcattaataaataccagggcaagctgtttgctgccaaacaggatgtctccccgttcaatgttgtggcctggcacgggaattatacaccctacaagtacaacctgaagaatttcatggttatcaactcagtggcctttgaccatgcagacccatccattttcacagtattgactgctaagtctgtccgccctggagtggccattgctgattttgtcatcttcccacctcgatggggggttgctgataagaccttcaggcctccttattaccataggaactgcatgagtgagttcatgggactcatccgaggtcactatgaggcaaagcaaggtgggttcctgccagggggagggagtctacacagcacaatgaccccccatggacctgatgctgactgctttgagaaggccagcaaggtcaagctggcacctgagaggattgccgatggcaccatggcatttatgtttgaatcatctttaagtctggcggtcacaaagtggggactcaaggcctccaggtgtttggatgagaactaccacaagtgctgggagccactcaagagccacttcactcccaactccaggaacccagcagaacctaattgagactggaacattgctaccataattaagagtagatttgtgaagatttcttcagaatctcatgctttctggtagtattggaggagggggttggttaaaatgaaaattcacttttcatagtcaagtaactcagaacttttatggaaacgcatttgcaaagttctatggctgtcaccttaattactcaataaacttgctggtgttctgtgg

SEQ ID NO: 13924 - DNA, 5857 bp, Homo sapiens
  source 1..5857: mol_type = unassigned DNA
gcggggctcaggtgcctggcagcgcggccggggcccaggaaggggagggggcgaacgctggagcgaggcgggggcgggtgaggagggggtgacgccggacgcgtcgacagcgcgagggttcgcgcgtgagctgcgcgggtcgggcctggtaccgagctttcctgggggctagcaggtcgtggacgccggctcctggaggagagccggtaggagggagtgtgaaggtgtccgcggcgtcgtcgacggcggcgccggccatggaggagacgcagccgccgccgcagcctaagctgcccctgtgcgacagcctcatgatctggctgcagacattcaatactgcctcaccttgtcaagatgtcaaacagctgactagtggagttgccatggcacaagttcttcatcaaattgatgcagcttggtttaacgaatcttggttaagccgaattaaagaggatgttggggacaactggagaataaaggccagtaatgtaaagaaggtccttcaaggaattatgagttattatcatgagtttttggggcagcagatttcagaagcacttatccctgatttaaaccaaataaccgaatgttcagatccagtggagcttgggaggttgctccagcttattttaggttgtgcgatcaactgtgaaaagaagcaagaacatattcaaaatataatgacactggaagagtctgttcaacatgtggtcatgactgctattcaagagttgatgagtaaagaaatattgagctctcctccaaatgatgctgttggagaattggagcaacagcttaaaagagccttggaagaacttcaggaagcactagcagaaaaagaagagctgaggcaaagatgtgaagaattggatatgcaggtgactacacttcaagatgaaaagaattcactggtttctgaaaatgagatgatgaatgaaaaacttgaccagttggatggctcttttgatgatccaaacacagtggttgcaaaaaagtattttcatgcacaattacaactagaacaattacaggaagaaaacttcaggcttgaagctgcaaaagatgattaccgtgttcactgtgaagaacttgaaaagcagctaatcgaattccagcataggaatgatgaattgactagtcttgcagaagaaacaagagccctgaaagatgaaatagatgttcttagggctacctctgataaagcaaataaactggagtcaacagttgagatatatcgtcagaagctacaagatctgaatgaccttcgcaagcaggtgaaaactttacaggaaaccaacatgatgtatatgcataatacagtcagcttagaagaagaattaaaaaaagcaaatgcagcacgtacacaattagaaacatacaaaaggcaggttcaagatcttcatgttaaactttcctccgaatccaagagggcagacacactagcgtttgaaatgaagcggcttgaagaaaaacatgaagctttacttaaggaaaaagagagactaattgagcagcgtgatactttgaaagaaacaaatgaagagcttcgatgttcacaagtacaacaggaccacctaaaccaaacagatgcatctgctacaaaaagttatgagaatcttgctgctgagattatgccagtggaatatagggaggtgtttattcgactgcaacatgaaaataagatgcttcgcttacagcaagaaggctctgagaatgaacgtattgaggaacttcaggagcagctagaacagaaacaccgtaaaatgaatgaactggaaactgagcagaggctgagcaaagagcgtattagagaattgcagcagcagattgaggacctccagaaatctttacaggaacaaggttccaagtctgaaggcgaaagttccagcaaattaaagcagaagttggaagctcatatggaaaaactcacagaggtccatgaagaattacagaagaaacaagaactcattgaagatcttcagccagatataaatcaaaatgtacaaaagatcaatgaacttgaagctgctcttcagaagaaagatgaagatatgaaagcaatggaggaaagatataaaatgtacttggagaaagccagaaatgtaataaaaactttggatcccaagttaaatccagcatcagctgaaataatgctactaagaaagcagttggcagagaaagagagaagaattgagattctggagagtgaatgcaaagtagcaaaattccgtgattatgaagaaaaactcattgtttctgcgtggtataataagagtctagcattccagaaactggggatggaatctagacttgtgagcggcggtggtgcctgcagtgacactggtgcgtgcactcctgcgcggtctttcttagcgcagcaacggcacatcaccaacaccagaagaaatctctctgttaaagtccctgctacaacatctgattaaactgcaaaaaaaacaaaacaaaacaaaaaaaccacataaaatagaagtgtccttaaaatattttgtacctttcaactaactaccagattgaaaaagagtttatgatgcgggatatcaggtattttaaaatcaacatgcatcaaattaattttgccagttgactttaaaaacaaattatagaattagccatctctctgagggagcacatttgaataattggagatgcagttatacacacatttcaaacaaacatttgtcttttgagagtattataatttcaaattggccttgtatattttagttaaatgttttcagttgtattagtaacttaattaattttcaatagctattcagtaatacttaatcttagaacattaattggatttgtttaatctttttttgttttttgttgatttatatgaaaacagtcttgaggcagggacatggagaactatgcaagggtgatttctttgacttaatatatacaaggctttacttctgtcccctaattcttccattgaatgtgtacctctaccttgtcatgtcatggaagatacaacatttggaagatctgacaattggaatgactttggaataataaaattgactaattggaaattttgcatattctgaaaatctaatctcatagttctaatttgtacctatggcaaataagggcttctggacatcatgtttaaaatgttaagcataagaaataaactgacatttgtaataggtgactttctgatggaaagcaagctatatatatatatatatatatatatatatatatatatatactttttgtgaaatgtctatatactttttaaggtaattaatgaagatttcagttattgcttttaagcataaagttgtatttagcttctgctgaaaaattgtatcatataataattttgcttcattgaaaagggatgttgcagtgatgaaacaaggtgggatcagtttgattttgtttacttattaaggagtttatcttgggctcagtttgtggtattcagttcgtttctgcccaaagctcttattttcagaggtgttacttttgaacttttggggtcatttttaaaagttagcacttttgaattttagttgtgttaaatatgtgctgtcgtatatcatagccatgagccatatatgacaatttaaatttaattaattataaactcagtctcttggttgcaccagccacatttcagatgctcaatagccacatgtggctagtgggtaccatattggacagggcagctatagaatatttccatcattgcagaaagttctattggatagtaccataatctttttatagtaacttggaaatactatttgatattagatgttagaccacaaaaagaagaaaaatgttaggactatttcagatataaaaaggaactgaattgtgacataattagcatcttacattccatacagttgaataccttatgctgtgacaaccatagttaatcatttcagtgctgttcaacatacatacctatcagcagtgtgtttagaccaggggtctgcaaactttctgtgaatggacaaagagtaaatactttagtaaatgtcttaggctttgtggcctacatgatctttgttgcaagtactcaactctgccattatagagttaaagcagccatacacaatatataaacaaaatgggcatagttgtatttcagtaaaactttatttacaaagacaggcggtaggccagatttggcttgcatgctgtagagctgtggtctaaattttattcatagactttctttgcaaatacagtgtgagtattgttccatttacagtattattattttttagatacctggtttttagattcttgcctggtaactttttactgaaaatacaagaatttcgtactgcatttgcatctccgagattagggagcacctgtcaggatatgttgttctatcagggttacttctgttgactacctcttagattttgatacagttatattgttgagtttcattttcatatattcttgtagtgtctgcttgcctgtgacttctggtaaaataaaataagcctttgaaaatattttagcatggtatttaacattttctaaatattatggcattttgacatattttagtcagcgaagacatctgcccctttggtgtttctacttgcttatgattgagattttacaagcccttcaaactccgttttaaaggaatttattgtaaaacattaactttaataaattagtgttttcacagatcagatcattatacttggaacttctaaatcatgcaatttctgaataaggacataaggctagattcatttttcttaatagagaaaaaggaaatttctgatttatcacttttctagttgataagtaggattcaaaacgtttgatatgtaagtatttatataagactaatgtaatttaaagttctgtattattgtgattaatcatacagaaattcaggaactgatcagaagtgagattcttttccacatctggttaatgtagtgagttgacaccctgtgggtggtaaagcattataaacatttcatcttgaaccatgatttatacacatctgtgttataagggaggcttgagtacatataccaatgaagagatattcagcatttgtctatttgataaggaattaaatgtcctagtgattataaagtaaaaccacagaccaatttgcaaatgatcttcaatgttaagcacttgctctaagattaaaattccttttctttttaaggttaagggtgtgtacgtatggcagtgatgtctatgttgagattaacttatgtattgaggaaaatttgaagtttattttttcgatgaataaggctgtcaaatgatttagtatagattaatgacatcttttttagaaatattaaagtgagtattcctcattatgtcatcatttctgataattagagtgctaatttgaatgttagataatgtttccacatctatacctatttctttctagggcacttctgaccctggggcttggggatggcctttaggccacagtagtgtctgtgttaagttcactaaatgtgtatttaatgagaaacattcctatgtaaaaatgtgtgtatgtgaacgtatgcatacatttttattgtgcacctgtacattgtgaagaagtagtttggaaatttgtaaagcacaaaccataaaagagtgtggagttattaaatgatgtagcacaaatgtaatgtttagcttataaaaggtcctttctattttctatggcaaagactttgacacttgaaaaataaaaccaatatttgatttatttttgtaagtatttaggatattattttaaataaatgattgtccattatcaatataatagttgtgaaatgatttaagtaaataaactttatgcttctgtgtctgttga

SEQ ID NO: 13925 - DNA, 2216 bp, Homo sapiens
  source 1..2216: mol_type = unassigned DNA
aaccagaatttattgacttccaatgttgagctaggcactggggaggactggagtggtagccagagctgtgtgtaattacagtggaagctgcagacattcaatactgcctcaccttgtcaagatgtcaaacagctgactagtggagttgccatggcacaagttcttcatcaaattgatgcagcttggtttaacgaatcttggttaagccgaattaaagaggatgttggggacaactggagaataaaggccagtaatgtaaagaaggtccttcaaggaattatgagttattatcatgagtttttggggcagcagatttcagaagcacttatccctgatttaaaccaaataaccgaatgttcagatccagtggagcttgggaggttgctccagcttattttaggttgtgcgatcaactgtgaaaagaagcaagaacatattcaaaatataatgacactggaagagtctgttcaacatgtggtcatgactgctattcaagagttgatgagtaaagaaatattgagctctcctccaaatgatgctgttggagaattggagcaacagcttaaaagagccttggaagaacttcaggaagcactagcagaaaaagaagagctgaggcaaagatgtgaagaattggatatgcaggtgactacacttcaagatgaaaagaattcactggtttctgaaaatgagatgatgaatgaaaaacttgaccagttggatggctcttttgatgatccaaacacagtggttgcaaaaaagtattttcatgcacaattacaactagaacaattacaggaagaaaacttcaggcttgaagctgcaaaagatgattaccgtgttcactgtgaagaacttgaaaagcagctaatcgaattccagcataggaatgatgaattgactagtcttgcagaagaaacaagagccctgaaagatgaaatagatgttcttagggctacctctgataaagcaaataaactggagtcaacagttgagatatatcgtcagaagctacaagatctgaatgaccttcgcaagcaggtgaaaactttacaggaaaccaacatgatgtatatgcataatacagtcagcttagaagaagaattaaaaaaagcaaatgcagcacgtacacaattagaaacatacaaaaggcaggttcaagatcttcatgttaaactttcctccgaatccaagagggcagacacactagcgtttgaaatgaagcggcttgaagaaaaacatgaagctttacttaaggaaaaagagagactaattgagcagcgtgatactttgaaagaaacaaatgaagagcttcgatgttcacaagtacaacaggaccacctaaaccaaacagatgcatctgctacaaaaagttatgagaatcttgctgctgagattatgccagtggaatatagggaggtgtttattcgactgcaacatgaaaataagatgcttcgcttacagcaagaaggctctgagaatgaacgtattgaggaacttcaggagcagctagaacagaaacaccgtaaaatgaatgaactggaaactgagcagaggctgagcaaagagcgtattagagaattgcagcagcagattgaggacctccagaaatctttacaggaacaaggttccaagtctgaaggcgaaagttccagcaaattaaagcagaagttggaagctcatatggaaaaactcacagaggtccatgaagaattacagaagaaacaagaactcattgaagatcttcagccagatataaatcaaaatgtacaaaagatcaatgaacttgaagctgctcttcagaagaaagatgaagatatgaaagcaatggaggaaagatataaaatgtacttggagaaagccagaaatgtaataaaaactttggatcccaagttaaatccagcatcagctgaaataatgctactaagaaagcagttggcagagaaagagagaagaattgagattctggagagtgaatgcaaagtagcaaaattccgtgattatgaagaaaaactcattgtttctgcgtggtataataagagtctagcattccagaaactggggatggaatctagacttgtgagcggcggtggtgcctgcagtgacactggtgcgtgcactcctgcgcggtctttcttagcgcagcaacggcacatcaccaacaccagaagaaatctctctgttaaagtccctgctacaacatctgattaaactgc

SEQ ID NO: 13926 - DNA, 519 bp, Homo sapiens
  source 1..519: mol_type = unassigned DNA
aggtcactcagggcggcggggcgaggtcgtggacgccggctcctggaggagagccggtaggagggagtgtgaaggtgtccgcggcgtcgtcgacggcggcgccggccatggaggagacgcagccgccgccgcagcctaagctgcccctgtgcgacagcctcatgatctggctgcagacattcaatactgcctcaccttgtcaagatgtcaaacagctgactagtggagttgccatggcacaagttcttcatcaaattgatgcagcttggtttaacgaatcttggttaagccgaattaaagaggatgttggggacaactggagaataaaggccagtaatgtaaagaaggtccttcaaggaattatgagttattatcatgagtttttggggcagcagatttcagaagcacttatccctgatttaaaccaaataaccgaatgttcagatccagtggagcttgggaggttgctccagcttattttaggttgtgcgatcaactgtgaaaagaagcaagaacata

SEQ ID NO: 13927 - DNA, 2604 bp, Homo sapiens
  source 1..2604: mol_type = unassigned DNA
gaggcggagcctgggcttgggggcggggcggggcctgcgcctaggggggcggggcggggcggcgctctaggccgagcgggaggtcggggctgcgggcgctcgctggtggcggacccggaggctgctgcggcgccggggctccgtggcctggattgaatccgatcgggagccatgagcgtggacaaagctgagctatgcgggtctctgctcacctggttacagacgttccacgttccgtctccctgtgccagccctcaggacctgagcagcggccttgccgtagcctatgtgctgaaccagatagacccctcctggttcaacgaggcatggctccagggcatctcggaagatccaggtcccaactggaagctgaaggtcagcaatctgaagatggtcttacggagcctagtagagtactcccaggatgtcctggcgcatcctgtgtcagaagagcatctcccagatgtgagcctcattggagagttctcagacccggcagagctcggcaagctgcttcagctggtgctgggctgtgccatcagttgcgagaaaaagcaggaccacatccagagaatcatgacgctggaagaatcggttcagcatgtggtgatggaagccatccaagagctcatgaccaaagacactcctgactccctgtcaccagagacgtatggcaactttgacagccagtcccgcaggtactatttcctaagtgaggaggctgaggagggggacgaattacagcagcgctgtctggatctggagcggcagctgatgctcctgtcagaggagaagcagagcctggcgcaagagaatgcagggctgcgggagcggatgggccggcctgaaggcgagggtaccccaggtctcactgccaagaagctgctgctgctgcaatcccagctggagcagttgcaggaggagaacttcaggctggagagtggcagggaggatgagcgcctgcgctgtgccgagctggagagggaggttgcggagctgcagcaccggaaccaggcgctgactagcctggcccaggaggcacaggccctgaaggatgagatggatgaactacggcagtcttcggagcgtgctgggcagctggaggccacgctgaccagttgccggcgccgcttgggcgagctgagggagctgcggcggcaggtgcggcagctggaggaacgcaacgccggccacgccgagcgcacgcgacaactggaggatgagctacgccgagcgggctccctgcgcgcccagctggaggcgcagcggcggcaggtgcaggaactgcagggccagcggcaggaggaggccatgaaggccgagaaatggctatttgaatgccgcaacctggaggaaaagtatgagtcggtgacaaaggagaaggagcggctgttggcggagcgggactccttgcgggaggccaatgaggagctgcgctgcgcccagctgcagccgcgggggttgacccaggccgatccctcactggatcccacctccacacccgtggataacttagccgcagagatcctgcctgcggagctcagggagacgctcctgcggcttcagctggagaacaagcggctgtgcaggcaggaggcggccgaccgggagcggcaggaggagctgcagcgccacctggaggatgccaaccgcgcgcgccacgggttggagacgcagcaccggctgaaccagcagcagctatccgagctgcgggcccaggtggaggacctgcagaaagccctgcaggagcaggggggcaagactgaagattccattttgctgaaaaggaagctggaggaacatttgcagaagcttcatgaggcagatctggagttgcagaggaagcgggagtacattgaggagctggagccacccactgacagcagcacagcccggcggatcgaggagctgcagcataacttgcagaagaaggacgcggacttgcgggccatggaggagcgataccgccgctacgtggacaaggcccgcatggtcatgcagaccatggaacccaagcagcggccagctgcgggggcacctccagaactccattccctgaggacacagctccgagaacgggatgtccgcatccgacacctggagatggactttgagaaaagccgaagtcagcgggagcaggaagaaaagctgctcatcagtgcctggtataatatgggcatggccttgcagcagcgagctggggaggagcgggcgcctgcccatgcccagtcattcctggcacagcagcggctggcaaccaattctcgccgtggacccttgggacgcctggcatctctgaaccttcgccccactgacaagcactgacagacctcacaatcaagccagcctgggctccacccaccctggcttcctccagctcacatggcgcccagcactgggcttcagccaggtgctcgagagctttgaggccatgatctctgctcttccctctcccagattggtggggagggagggcgggaggtagatataggcctgttctttttagcaatgtgattcttgttgttgattctctctctggagttcatgtgctgcctcaggagactctgattttatatttgagaaaaataaaggcgttcaatctgc

SEQ ID NO: 13928 - DNA, 2610 bp, Homo sapiens
  source 1..2610: mol_type = unassigned DNA
gaggcggagcctgggcttgggggcggggcggggcctgcgcctaggggggcggggcggggcggcgctctaggccgagcgggaggtcggggctgcgggcgctcgctggtggcggacccggaggctgctgcggcgccggggctccgtggcctggattgaatccgatcgggagccatgagcgtggacaaagctgagctatgcgggtctctgctcacctggttacagacgttccacgttccgtctccctgtgccagccctcaggacctgagcagcggccttgccgtagcctatgtgctgaaccagatagacccctcctggttcaacgaggcatggctccagggcatctcggaagatccaggtcccaactggaagctgaaggtcagcaatctgaagatggtcttacggagcctagtagagtactcccaggatgtcctggcgcatcctgtgtcagaagagcatctcccagatgtgagcctcattggagagttctcagacccggcagagctcggcaagctgcttcagctggtgctgggctgtgccatcagttgcgagaaaaagcaggaccacatccagagaatcatgacgctggaagaatcggttcagcatgtggtgatggaagccatccaagagctcatgaccaaagacactcctgactccctgtcaccagagacgtatggcaactttgacagccagtcccgcaggtactatttcctaagtgaggaggctgaggagggggacgaattacagcagcgctgtctggatctggagcggcagctgatgctcctgtcagaggagaagcagagcctggcgcaagagaatgcagggctgcgggagcggatgggccggcctgaaggcgagggtaccccaggtctcactgccaagaagctgctgctgctgcaatcccagctggagcagttgcaggaggagaacttcaggctggagagtggcagggaggatgagcgcctgcgctgtgccgagctggagagggaggttgcggagctgcagcaccggaaccaggcgctgactagcctggcccaggaggcacaggccctgaaggatgagatggatgaactacggcagtcttcggagcgtgctgggcagctggaggccacgctgaccagttgccggcgccgcttgggcgagctgagggagctgcggcggcaggtgcggcagctggaggaacgcaacgccggccacgccgagcgcacgcgacaactggaggatgagctacgccgagcgggctccctgcgcgcccagctggaggcgcagcggcggcaggtgcaggaactgcagggccagcggcaggaggaggccatgaaggccgagaaatggctatttgaatgccgcaacctggaggaaaagtatgagtcggtgacaaaggagaaggagcggctgttggcggagcgggactccttgcgggaggccaatgaggagctgcgctgcgcccagctgcagccgcgggggttgacccaggccgatccctcactggatcccacctccacacccgtggataacttagccgcagagatcctgcctgcggagctcagggagacgctcctgcggcttcagctggagaacaagcggctgtgcaggcaggaggcggccgaccgggagcggcaggaggagctgcagcgccacctggaggatgccaaccgcgcgcgccacgggttggagacgcagcaccggctgaaccagcagcagctatccgagctgcgggcccaggtggaggacctgcagaaagccctgcaggagcaggggggcaagactgaagatgccatttccattttgctgaaaaggaagctggaggaacatttgcagaagcttcatgaggcagatctggagttgcagaggaagcgggagtacattgaggagctggagccacccactgacagcagcacagcccggcggatcgaggagctgcagcataacttgcagaagaaggacgcggacttgcgggccatggaggagcgataccgccgctacgtggacaaggcccgcatggtcatgcagaccatggaacccaagcagcggccagctgcgggggcacctccagaactccattccctgaggacacagctccgagaacgggatgtccgcatccgacacctggagatggactttgagaaaagccgaagtcagcgggagcaggaagaaaagctgctcatcagtgcctggtataatatgggcatggccttgcagcagcgagctggggaggagcgggcgcctgcccatgcccagtcattcctggcacagcagcggctggcaaccaattctcgccgtggacccttgggacgcctggcatctctgaaccttcgccccactgacaagcactgacagacctcacaatcaagccagcctgggctccacccaccctggcttcctccagctcacatggcgcccagcactgggcttcagccaggtgctcgagagctttgaggccatgatctctgctcttccctctcccagattggtggggagggagggcgggaggtagatataggcctgttctttttagcaatgtgattcttgttgttgattctctctctggagttcatgtgctgcctcaggagactctgattttatatttgagaaaaataaaggcgttcaatctgc

SEQ ID NO: 13929 - DNA, 3030 bp, Homo sapiens
  source 1..3030: mol_type = unassigned DNA
cggtcccgagtgaaaggagaaggaggggcgctgggggtgacggtgcggagccgctgccagcgctgggcgagagtcggcggccggatccgaggagcaggcgggcctgaggccgagtcagctgcgcgggcccccggatcccccgacagagcggcggcggtgtctggccaggcggtaggcgctgcctggccgcggcggggaagatgttcagcgtagagtcgctggagcgggcggagctgtgcgagagcctcctcacttggatccagacatttaatgtggatgcaccatgccagaccgtggaagatttaacgaatggggttgtgatggcccaggttcttcaaaagatagatcctgcatattttgatgaaaattggctaaacagaatcaaaactgaagtaggagataattggaggctaaagataagcaatttaaagaaaattttaaaaggaatcttggattataatcatgagattttaggacagcaaattaatgactttacccttcctgatgtgaaccttattggggagcattctgatgcagcagagcttggaaggatgcttcagctcatcttaggctgtgctgtgaactgtgaacagaagcaagagtacatccaagccattatgatgatggaggaatctgttcaacatgttgtcatgacagccattcaagagctgatgagtaaagaatctcctgtctctgctggaaatgatgcctatgttgaccttgatcgtcagctgaagaaaactacagaggaactaaatgaagctttgtcagcaaaggaagaaattgctcaaagatgccatgaactggatatgcaggttgcagcattgcaggaagagaaaagtagtttgttggcagagaatcaggtattaatggaaagactcaatcaatctgattctatagaagaccctaacagtccagcaggaagaaggcatttgcagctccagactcaattagaacagctccaagaagaaacattcagactagaagcagccaaagatgattatcgaatacgttgtgaagagttagaaaaggagatctctgaacttcggcaacagaatgatgaactgaccactttggcagatgaagctcagtctctgaaagatgagatcgacgtgctgagacattcttctgataaagtatctaaactagaaggtcaagtagaatcttataaaaagaagctagaagaccttggtgatttaaggcggcaggttaaactcttagaagagaagaataccatgtatatgcagaatactgtcagtctagaggaagagttaagaaaggccaacgcagcgcgaagtcaacttgaaacctacaagagacaggtagtagaactacaaaacagattatccgaagaatcaaagaaagcagataaactagattttgaatataagcggctaaaagaaaaagttgacagtcttcaaaaagaaaaggacaggctgagaacagaaagggattctctgaaggaaaccattgaagagcttcgttgtgtacaagctcaagaagggcagctcacaacacaagggttaatgcctcttggaagtcaggagtcttcagacagtctagctgcagagattgttacacctgaaatcagggagaaacttattcgtcttcagcatgagaataagatgttaaagcttaaccaagaaggttcggacaatgaaaaaatagccttattgcagagccttctagatgatgcaaatctacgcaagaatgaactggagacagagaataggctggtgaatcaaagacttctggaagtacagtcacaagttgaagaattacaaaaatctttacaggatcaaggctcaaaagcagaagattcagtccttctaaaaaagaagcttgaagaacatctagagaagctgcatgaggccaataatgaactacagaagaagagagccattattgaagatctcgagccaagatttaacaacagctccttaaaaattgaagaattacaagaagctttacgaaagaaagaggaagaaatgaagcaaatggaagaacgatacaaaaaatacttagagaaagccaaaagtgtcatccgtactttagatcctaaacagaatcaaggagcagcaccagaaatacaagctcttaaaaatcagctccaggaacgagaccgactgttccactcattagagaaagaatatgagaaaacaaagagtcagagagagatggaagagaaatatattgttagtgcctggtacaatatgggaatgaccctgcataaaaaggcagctgaagatagactggcaagcacaggctcagggcagtcatttctggcgaggcagaggcaagcgaccagcagcagaagatcatacccaggccacgtgcagccggccacagcaaggtagagaagttgtgccgctcaatcacagacacctgcacccacaacatacttctgttacacacaagaacatttcaggaaactcagccagcttattttttgtttctcttctatgtcaatacttagtgtttctcattttgaggactttttctctctcctgtatctttgttttagtttctttggtttttattttgtagtcctttcagttatttttaatgtgccaaaaatttgtacatgttcaattaaaaatgttgtataatagtgtaatacttttctttgtatgaaaatgtcctcttcttcaaaggtataggctttgtaatgaattagattttctgccaataattgatatacaatttatattctttattgtgcctgtgtgttaccatgctaagaatgtctttgtttaaagggaattaatctttttatgatgtattaatctgtgttttcaattgttttccaagtacagttcaaataacttgcatatttactatacaaaatggttgacaagtgttctttttgcaaagacttgaatacattggcagaggtgctaatcacatcttccctaaggcacctggaagaattatttgaggaaaaaatgagttttcacattgttttataggaaattaaatttgtccaaagatttggagactatttttaaaacataaatacataaaatttca

SEQ ID NO: 13930 - DNA, 1129 bp, Homo sapiens
  source 1..1129: mol_type = unassigned DNA
gaaggccgcctaccggggaggccggaggccggctagtcgcggactcgggcgaacccaccctcgcgatctgtcaagtctgtccccaggggaggtccccctttcgggaggaagtttttaaggggatttctcaaaatcacccccgcgcttccttcactccttccttagagccggagcgcgcagggaccatgtcggcggagaccgcgagcggccccacagaggaccaggtggaaatcctggagtacaacttcaacaaggtcgacaagcacccggattccaccacgctgtgcctcatcgcggccgaggcaggcctttccgaggaggagacccagaaatggtttaagcagcgcctggcaaagtggcggcgctcagaaggcctgccctcagagtgcagatccgtcacagactaaggagatggcaggcattgacagcttcactccatgaaggccatctctgtttctctcctccgcttaaccaagctgttgtggtttttcagcatagtgttgtatgttccattgctagctgtcctgctgtttaacacagtgttgtattttttttctaaatgtacataattagaaaagaaaataacaataggaagctatgtgtatcttctgtgtaaagcagtggcttcactggaaaaatggtgtggctagcatttccctttgagtcatgatgacagatggtgtgaaaaccatctaagtttgcttttgaccatcacctcccagtagcaatttgctttcataatccatttagcaatccaggcctctgttgaaaagataatatgagggagaagggaacacatttccttctgaacttacttccctaagtcactttccttatgtatcatctaatacaatgatggttgagtgaaaatacagaaggggtgtttgagtattcagatttcataaaacacttccttggaatatagctgcattaacttggaaagaagcctgttgggccagaagacagaaactccaactggcaaaaaagcaagcatctaagaaaaaaaaccaccaaagttcttgaatttactatatttaaatgcattggttaagtttattttgctaaataaagtgaactgctttttgtctctaaaatgatattctaaataaaaccttaactttttgttgaa

SEQ ID NO: 13931 - DNA, 1601 bp, Homo sapiens
  source 1..1601: mol_type = unassigned DNA
acagatgcaggggaaataaatgagaatcgtttttgagggagacctaaaactgtatcatcctagcccgaatctctcccttttaactgttctttatgtgtacattctgtgcccaaaagaaaacaacctttcattaattgggcaattgtccaggctcttagcttggcatccagctctcagagctgtgaaatcaaccgcaccagatctacgctttgaaatgaggcaacatctaactggaaactcgctcaaagtaaggaagtggatgagaagactcagggtcccttttctcttccccgtcttctctcagccacatctctcttatcctatcttggtgaagaagcttgcttggctaggagagaggtcagggacgagaagatagtgacgagaaagttccatgagactctcagaagtcccagcctgaacatcaaacctgaataaccaggagagacgtaacctcggcatactttcagtggtttacctcctgcccacgctgcaggtttttcaggtccttgctcgagtgtgtgctcataggcgtaaataaacgtgctatcagcagcctgcgtcagccagcccagctatttaagcaggctggcatcagcaaacacagcttccaaacccagggcttgcgcttgcctttgcctcttccaccgcgcagggaccatgtcggcggagaccgcgagcggccccacagaggaccaggtggaaatcctggagtacaacttcaacaaggtcgacaagcacccggattccaccacgctgtgcctcatcgcggccgaggcaggcctttccgaggaggagacccagaaatggtttaagcagcgcctggcaaagtggcggcgctcagaaggcctgccctcagagtgcagatccgtcacagactaaggagatggcaggcattgacagcttcactccatgaaggccatctctgtttctctcctccgcttaaccaagctgttgtggtttttcagcatagtgttgtatgttccattgctagctgtcctgctgtttaacacagtgttgtattttttttctaaatgtacataattagaaaagaaaataacaataggaagctatgtgtatcttctgtgtaaagcagtggcttcactggaaaaatggtgtggctagcatttccctttgagtcatgatgacagatggtgtgaaaaccatctaagtttgcttttgaccatcacctcccagtagcaatttgctttcataatccatttagcaatccaggcctctgttgaaaagataatatgagggagaagggaacacatttccttctgaacttacttccctaagtcactttccttatgtatcatctaatacaatgatggttgagtgaaaatacagaaggggtgtttgagtattcagatttcataaaacacttccttggaatatagctgcattaacttggaaagaagcctgttgggccagaagacagaaactccaactggcaaaaaagcaagcatctaagaaaaaaaaccaccaaagttcttgaatttactatatttaaatgcattggttaagtttattttgctaaataaagtgaactgctttttgtctctaaaatgatattctaaataaaaccttaactttttgttgaa

SEQ ID NO: 13932 - DNA, 1164 bp, Homo sapiens
  source 1..1164: mol_type = unassigned DNA
ctaccggggaggccggaggccggctagtcgcggactcgggcgaacccaccctcgcgatctgtcaagtctgtccccaggggaggtccccctttcgggaggaagtttttaaggggatttctcaaaatcacccccgcgcttccttcactccttccttagagccggaggtcggtgagggcccgcggaatcatctatctcgcccccgtcgcagcgcgcagggaccatgtcggcggagaccgcgagcggccccacagaggaccaggtggaaatcctggagtacaacttcaacaaggtcgacaagcacccggattccaccacgctgtgcctcatcgcggccgaggcaggcctttccgaggaggagacccagaaatggtttaagcagcgcctggcaaagtggcggcgctcagaaggcctgccctcagagtgcagatccgtcacagactaaggagatggcaggcattgacagcttcactccatgaaggccatctctgtttctctcctccgcttaaccaagctgttgtggtttttcagcatagtgttgtatgttccattgctagctgtcctgctgtttaacacagtgttgtattttttttctaaatgtacataattagaaaagaaaataacaataggaagctatgtgtatcttctgtgtaaagcagtggcttcactggaaaaatggtgtggctagcatttccctttgagtcatgatgacagatggtgtgaaaaccatctaagtttgcttttgaccatcacctcccagtagcaatttgctttcataatccatttagcaatccaggcctctgttgaaaagataatatgagggagaagggaacacatttccttctgaacttacttccctaagtcactttccttatgtatcatctaatacaatgatggttgagtgaaaatacagaaggggtgtttgagtattcagatttcataaaacacttccttggaatatagctgcattaacttggaaagaagcctgttgggccagaagacagaaactccaactggcaaaaaagcaagcatctaagaaaaaaaaccaccaaagttcttgaatttactatatttaaatgcattggttaagtttattttgctaaataaagtgaactgctttttgtctctaaaatgatattctaaataaaaccttaactttttgttgaa

SEQ ID NO: 13933 - DNA, 1247 bp, Homo sapiens
  source 1..1247: mol_type = unassigned DNA
acccagggcttgcgcttgcctttgcctcttccacactaatgacagactgccccactgagaagggtctagcggagcacaggtcaccagctgggcaacattcagaaagttagtcttcctatgctcattttcctgggctgttacagaagaagactggaagagcgcgcagggaccatgtcggcggagaccgcgagcggccccacagaggaccaggtggaaatcctggagtacaacttcaacaaggtcgacaagcacccggattccaccacgctgtgcctcatcgcggccgaggcaggcctttccgaggaggagacccagggtagtgatttgatctccaggagcaaaatatggcacccagaaagtagcccccaaagagaaggctacccccatgatagtctgccgtgcttggctttcgattacttttctctactgccgccccagtgtaaagaaatggtttaagcagcgcctggcaaagtggcggcgctcagaaggcctgccctcagagtgcagatccgtcacagactaaggagatggcaggcattgacagcttcactccatgaaggccatctctgtttctctcctccgcttaaccaagctgttgtggtttttcagcatagtgttgtatgttccattgctagctgtcctgctgtttaacacagtgttgtattttttttctaaatgtacataattagaaaagaaaataacaataggaagctatgtgtatcttctgtgtaaagcagtggcttcactggaaaaatggtgtggctagcatttccctttgagtcatgatgacagatggtgtgaaaaccatctaagtttgcttttgaccatcacctcccagtagcaatttgctttcataatccatttagcaatccaggcctctgttgaaaagataatatgagggagaagggaacacatttccttctgaacttacttccctaagtcactttccttatgtatcatctaatacaatgatggttgagtgaaaatacagaaggggtgtttgagtattcagatttcataaaacacttccttggaatatagctgcattaacttggaaagaagcctgttgggccagaagacagaaactccaactggcaaaaaagcaagcatctaagaaaaaaaaccaccaaagttcttgaatttactatatttaaatgcattggttaagtttattttgctaaataaagtgaactgctttttgtctctaaaatgatattctaaataaaaccttaactttttgttgaaga

SEQ ID NO: 13934 - DNA, 1542 bp, Homo sapiens
  source 1..1542: mol_type = unassigned DNA
gcaccagatctacgctttgaaatgaggcaacatctaactggaaactcgctcaaagtaaggaagtggatgagaagactcagggtcccttttctcttccccgtcttctctcagccacatctctcttatcctatcttggtgaagaagcttgcttggctaggagagaggtcagggacgagaagatagtgacgagaaagttccatgagactctcagaagtcccagcctgaacatcaaacctgaataaccaggagagacgtaacctcggcatactttcagtggtttacctcctgcccacgctgcaggtttttcaggtccttgctcgagtgtgtgctcataggcgtaaataaacgtgctatcagcagcctgcgtcagccagcccagctatttaagcaggctggcatcagcaaacacagcttccaaacccagggcttgcgcttgcctttgcctcttccacactaatgacagactgccccactgagaagggtctagcggagcacaggtcaccagctgggcaacattcagaaagttagtcttcctatgctcattttcctgggctgttacagaagaagactggaagagcgcgcagggaccatgtcggcggagaccgcgagcggccccacagaggaccaggtggaaatcctggagtacaacttcaacaaggtcgacaagcacccggattccaccacgctgtgcctcatcgcggccgaggcaggcctttccgaggaggagacccagaaatggtttaagcagcgcctggcaaagtggcggcgctcagaaggcctgccctcagagtgcagatccgtcacagactaaggagatggcaggcattgacagcttcactccatgaaggccatctctgtttctctcctccgcttaaccaagctgttgtggtttttcagcatagtgttgtatgttccattgctagctgtcctgctgtttaacacagtgttgtattttttttctaaatgtacataattagaaaagaaaataacaataggaagctatgtgtatcttctgtgtaaagcagtggcttcactggaaaaatggtgtggctagcatttccctttgagtcatgatgacagatggtgtgaaaaccatctaagtttgcttttgaccatcacctcccagtagcaatttgctttcataatccatttagcaatccaggcctctgttgaaaagataatatgagggagaagggaacacatttccttctgaacttacttccctaagtcactttccttatgtatcatctaatacaatgatggttgagtgaaaatacagaaggggtgtttgagtattcagatttcataaaacacttccttggaatatagctgcattaacttggaaagaagcctgttgggccagaagacagaaactccaactggcaaaaaagcaagcatctaagaaaaaaaaccaccaaagttcttgaatttactatatttaaatgcattggttaagtttattttgctaaataaagtgaactgctttttgtctctaaaatgatattctaaataaaaccttaactttttgttgaagatgcactg

SEQ ID NO: 13935 - DNA, 1485 bp, Homo sapiens
  source 1..1485: mol_type = unassigned DNA
aaagcgccaacccactgcggagacagaaggccgcctaccggggaggccggaggccggctagtcgcggactcgggcgaacccaccctcgcgatctgtcaagtctgtccccaggggaggtccccctttcgggaggaagtttttaaggggatttctcaaaatcacccccgcgcttccttcactccttccttagagccggaggtcggtgagggcccgcggaatcatctatctcgcccccgtcgcaggcagggatacagttcctgcaaggggtcccggggggcgcgggaggcgcaggacgctaggctctgccgtcagcccgcaacagcgctcagtccagggagggaggcccgggtggggggcagccgtaagcccccgctcagcgtgcagccaccggggacttgcgcggccgtggcaccgctggagggggcggcctggggctggggctgcccggcggcgccgcgaccgccttccttcgctgcgtcccgcccgctccacgcctcgctcaccgccgccgcttctccctgccccgcagcgcgcagggaccatgtcggcggagaccgcgagcggccccacagaggaccaggtggaaatcctggagtacaacttcaacaaggtcgacaagcacccggattccaccacgctgtgcctcatcgcggccgaggcaggcctttccgaggaggagacccagaaatggtttaagcagcgcctggcaaagtggcggcgctcagaaggcctgccctcagagtgcagatccgtcacagactaaggagatggcaggcattgacagcttcactccatgaaggccatctctgtttctctcctccgcttaaccaagctgttgtggtttttcagcatagtgttgtatgttccattgctagctgtcctgctgtttaacacagtgttgtattttttttctaaatgtacataattagaaaagaaaataacaataggaagctatgtgtatcttctgtgtaaagcagtggcttcactggaaaaatggtgtggctagcatttccctttgagtcatgatgacagatggtgtgaaaaccatctaagtttgcttttgaccatcacctcccagtagcaatttgctttcataatccatttagcaatccaggcctctgttgaaaagataatatgagggagaagggaacacatttccttctgaacttacttccctaagtcactttccttatgtatcatctaatacaatgatggttgagtgaaaatacagaaggggtgtttgagtattcagatttcataaaacacttccttggaatatagctgcattaacttggaaagaagcctgttgggccagaagacagaaactccaactggcaaaaaagcaagcatctaagaaaaaaaaccaccaaagttcttgaatttactatatttaaatgcattggttaagtttattttgctaaataaagtgaactgctttttgtctctaaaatgatattctaaataaaaccttaactttttgttgaa

SEQ ID NO: 13936 - DNA, 1289 bp, Homo sapiens
  source 1..1289: mol_type = unassigned DNA
acccagggcttgcgcttgcctttgcctcttccacactaatgacagactgccccactgagaagggtctagcggagcacaggtcaccagctgggcaacattcagaaagttagtcttcctatgctcattttcctgggctgttacagaagaagactggaagaggtaatttccaaggttcttcccagctctgaagttgtgtgtcaaagcgcgcagggaccatgtcggcggagaccgcgagcggccccacagaggaccaggtggaaatcctggagtacaacttcaacaaggtcgacaagcacccggattccaccacgctgtgcctcatcgcggccgaggcaggcctttccgaggaggagacccagggtagtgatttgatctccaggagcaaaatatggcacccagaaagtagcccccaaagagaaggctacccccatgatagtctgccgtgcttggctttcgattacttttctctactgccgccccagtgtaaagaaatggtttaagcagcgcctggcaaagtggcggcgctcagaaggcctgccctcagagtgcagatccgtcacagactaaggagatggcaggcattgacagcttcactccatgaaggccatctctgtttctctcctccgcttaaccaagctgttgtggtttttcagcatagtgttgtatgttccattgctagctgtcctgctgtttaacacagtgttgtattttttttctaaatgtacataattagaaaagaaaataacaataggaagctatgtgtatcttctgtgtaaagcagtggcttcactggaaaaatggtgtggctagcatttccctttgagtcatgatgacagatggtgtgaaaaccatctaagtttgcttttgaccatcacctcccagtagcaatttgctttcataatccatttagcaatccaggcctctgttgaaaagataatatgagggagaagggaacacatttccttctgaacttacttccctaagtcactttccttatgtatcatctaatacaatgatggttgagtgaaaatacagaaggggtgtttgagtattcagatttcataaaacacttccttggaatatagctgcattaacttggaaagaagcctgttgggccagaagacagaaactccaactggcaaaaaagcaagcatctaagaaaaaaaaccaccaaagttcttgaatttactatatttaaatgcattggttaagtttattttgctaaataaagtgaactgctttttgtctctaaaatgatattctaaataaaaccttaactttttgttgaa

SEQ ID NO: 13937 - DNA, 472 bp, Homo sapiens
  source 1..472: mol_type = unassigned DNA
ttccaaacccagggcttgcgcttgcctttgcctcttccacagtttctccaaaataaaaaaaaaaagaaaagaaaaacaaatgacaagtttgcaagactgataaaacagcgcgcagggaccatgtcggcggagaccgcgagcggccccacagaggaccaggtggaaatcctggagtacaacttcaacaaggtcgacaagcacccggattccaccacgctgtgcctcatcgcggccgaggcaggcctttccgaggaggagacccagaaatggtttaagcagcgcctggcaaagtggcggcgctcagaaggcctgccctcagagtgcagatccgtcacagactaaggagatggcaggcattgacagcttcactccatgaaggccatctctgtttctctcctccgcttaaccaagctgttgtggtttttcagcatagtgttgtatgttccattgctagctgtcctgctgtttaaca

SEQ ID NO: 13938 - DNA, 1090 bp, Homo sapiens
  source 1..1090: mol_type = unassigned DNA
ctaccagactaatgacagactgccccactgagaagggtctagcggagcacaggtcaccagctgggcaacattcagaaagttagtcttcctatgctcattttcctgggctgttacagaagaagactggaagagcgcgcagggaccatgtcggcggagaccgcgagcggccccacagaggaccaggtggaaatcctggagtacaacttcaacaaggtcgacaagcacccggattccaccacgctgtgcctcatcgcggccgaggcaggcctttccgaggaggagacccagaaatggtttaagcagcgcctggcaaagtggcggcgctcagaaggcctgccctcagagtgcagatccgtcacagactaaggagatggcaggcattgacagcttcactccatgaaggccatctctgtttctctcctccgcttaaccaagctgttgtggtttttcagcatagtgttgtatgttccattgctagctgtcctgctgtttaacacagtgttgtattttttttctaaatgtacataattagaaaagaaaataacaataggaagctatgtgtatcttctgtgtaaagcagtggcttcactggaaaaatggtgtggctagcatttccctttgagtcatgatgacagatggtgtgaaaaccatctaagtttgcttttgaccatcacctcccagtagcaatttgctttcataatccatttagcaatccaggcctctgttgaaaagataatatgagggagaagggaacacatttccttctgaacttacttccctaagtcactttccttatgtatcatctaatacaatgatggttgagtgaaaatacagaaggggtgtttgagtattcagatttcataaaacacttccttggaatatagctgcattaacttggaaagaagcctgttgggccagaagacagaaactccaactggcaaaaaagcaagcatctaagaaaaaaaaccaccaaagttcttgaatttactatatttaaatgcattggttaagtttattttgctaaataaagtgaactgctttttgtctctaaaatgatattctaaataaaaccttaactttttgttgaaga

SEQ ID NO: 13939 - DNA, 635 bp, Homo sapiens
  source 1..635: mol_type = unassigned DNA
accagatctacgctttgaaatgaggcaacatctaactggaaactcgctcaaacgcgcagggaccatgtcggcggagaccgcgagcggccccacagaggaccaggtggaaatcctggagtacaacttcaacaaggtcgacaagcacccggattccaccacgctgtgcctcatcgcggccgaggcaggcctttccgaggaggagacccagggtagtgatttgatctccaggagcaaaatatggcacccagaaagtagcccccaaagagaaggctacccccatgatagtctgccgtgcttggctttcgattacttttctctactgccgccccagtgtaaagaaatggtttaagcagcgcctggcaaagtggcggcgctcagaaggcctgccctcagagtgcagatccgtcacagactaaggagatggcaggcattgacagcttcactccatgaaggccatctctgtttctctcctccgcttaaccaagctgttgtggtttttcagcatagtgttgtatgttccattgctagctgtcctgctgtttaacacagtgttgtattttttttctaaatgtacataattagaaaagaaaataacaataggaagctatgtgtatcttctgtgtaaagcagtggct

SEQ ID NO: 13940 - DNA, 496 bp, Homo sapiens
  source 1..496: mol_type = unassigned DNA
cggctagtcgcggactcgggcgaacccaccctcgcgatctgtcaacgcgcagggaccatgtcggcggagaccgcgagcggccccacagaggaccaggtggaaatcctggagtacaacttcaacaaggtcgacaagcacccggattccaccacgctgtgcctcatcgcggccgaggcaggcctttccgaggaggagacccagaaatggtttaagcagcgcctggcaaagtggcggcgctcagaaggcctgccctcagagtgcagatccgtcacagactaaggagatggcaggcattgacagcttcactccatgaaggccatctctgtttctctcctccgcttaaccaagctgttgtggtttttcagcatagtgttgtatgttccattgctagctgtcctgctgtttaacacagtgttgtattttttttctaaatgtacataattagaaaagaaaataacaataggaagctatgtgtatcttctgtgtaaagcagtgg

SEQ ID NO: 13941 - DNA, 1161 bp, Homo sapiens
  source 1..1161: mol_type = unassigned DNA
acccagggcttgcgcttgcctttgcctcttccacactaatgacagactgccccactgagaagggtctagcggagcacaggtcaccagctgggcaacattcagaaagttagtcttcctatgctcattttcctgggctgttacagaagaagactggaagaggtaatttccaaggttcttcccagctctgaagttgtgtgtcaaagcgcgcagggaccatgtcggcggagaccgcgagcggccccacagaggaccaggtggaaatcctggagtacaacttcaacaaggtcgacaagcacccggattccaccacgctgtgcctcatcgcggccgaggcaggcctttccgaggaggagacccagaaatggtttaagcagcgcctggcaaagtggcggcgctcagaaggcctgccctcagagtgcagatccgtcacagactaaggagatggcaggcattgacagcttcactccatgaaggccatctctgtttctctcctccgcttaaccaagctgttgtggtttttcagcatagtgttgtatgttccattgctagctgtcctgctgtttaacacagtgttgtattttttttctaaatgtacataattagaaaagaaaataacaataggaagctatgtgtatcttctgtgtaaagcagtggcttcactggaaaaatggtgtggctagcatttccctttgagtcatgatgacagatggtgtgaaaaccatctaagtttgcttttgaccatcacctcccagtagcaatttgctttcataatccatttagcaatccaggcctctgttgaaaagataatatgagggagaagggaacacatttccttctgaacttacttccctaagtcactttccttatgtatcatctaatacaatgatggttgagtgaaaatacagaaggggtgtttgagtattcagatttcataaaacacttccttggaatatagctgcattaacttggaaagaagcctgttgggccagaagacagaaactccaactggcaaaaaagcaagcatctaagaaaaaaaaccaccaaagttcttgaatttactatatttaaatgcattggttaagtttattttgctaaataaagtgaactgctttttgtctctaaaatgatattctaaataaaaccttaactttttgttgaaga

SEQ ID NO: 13942 - DNA, 1672 bp, Homo sapiens
  source 1..1672: mol_type = unassigned DNA
gcaccagatctacgctttgaaatgaggcaacatctaactggaaactcgctcaaagtaaggaagtggatgagaagactcagggtcccttttctcttccccgtcttctctcagccacatctctcttatcctatcttggtgaagaagcttgcttggctaggagagaggtcagggacgagaagatagtgacgagaaagttccatgagactctcagaagtcccagcctgaacatcaaacctgaataaccaggagagacgtaacctcggcatactttcagtggtttacctcctgcccacgctgcaggtttttcaggtccttgctcgagtgtgtgctcataggcgtaaataaacgtgctatcagcagcctgcgtcagccagcccagctatttaagcaggctggcatcagcaaacacagcttccaaacccagggcttgcgcttgcctttgcctcttccacactaatgacagactgccccactgagaagggtctagcggagcacaggtcaccagctgggcaacattcagaaagttagtcttcctatgctcattttcctgggctgttacagaagaagactggaagagcgcgcagggaccatgtcggcggagaccgcgagcggccccacagaggaccaggtggaaatcctggagtacaacttcaacaaggtcgacaagcacccggattccaccacgctgtgcctcatcgcggccgaggcaggcctttccgaggaggagacccagggtagtgatttgatctccaggagcaaaatatggcacccagaaagtagcccccaaagagaaggctacccccatgatagtctgccgtgcttggctttcgattacttttctctactgccgccccagtgtaaagaaatggtttaagcagcgcctggcaaagtggcggcgctcagaaggcctgccctcagagtgcagatccgtcacagactaaggagatggcaggcattgacagcttcactccatgaaggccatctctgtttctctcctccgcttaaccaagctgttgtggtttttcagcatagtgttgtatgttccattgctagctgtcctgctgtttaacacagtgttgtattttttttctaaatgtacataattagaaaagaaaataacaataggaagctatgtgtatcttctgtgtaaagcagtggcttcactggaaaaatggtgtggctagcatttccctttgagtcatgatgacagatggtgtgaaaaccatctaagtttgcttttgaccatcacctcccagtagcaatttgctttcataatccatttagcaatccaggcctctgttgaaaagataatatgagggagaagggaacacatttccttctgaacttacttccctaagtcactttccttatgtatcatctaatacaatgatggttgagtgaaaatacagaaggggtgtttgagtattcagatttcataaaacacttccttggaatatagctgcattaacttggaaagaagcctgttgggccagaagacagaaactccaactggcaaaaaagcaagcatctaagaaaaaaaaccaccaaagttcttgaatttactatatttaaatgcattggttaagtttattttgctaaataaagtgaactgctttttgtctctaaaatgatattctaaataaaaccttaactttttgttgaagatgcactg

SEQ ID NO: 13943 - DNA, 980 bp, Homo sapiens
  source 1..980: mol_type = unassigned DNA
gagacagaaggccgcctaccggggaggccggaggccggctagtcgcggactcgggcgaacccaccctcgcgatctgtcaagtctgtccccaggggaggtccccctttcgggaggaagtttttaaggggatttctcaaaatcacccccgcgcttccttcactccttccttagagccggaggtcgcgcgcagggaccatgtcggcggagaccgcgagcggccccacagaggaccaggtggaaatcctggagtacaacttcaacaaggtcgacaagcacccggattccaccacgctgtgcctcatcgcggccgaggcaggcctttccgaggaggagacccagaaatggtttaagcagcgcctggcaaagtggcggcgctcagaaggcctgccctcagagtgcagatccgtcacagactaaggagatggcaggcattgacagcttcactccatgaaggccatctctgtttctctcctccgcttaaccaagctgttgtggtttttcagcatagtgttgtatgttccattgctagctgtcctgctgtttaacacagtgttgtattttttttctaaatgtacataattagaaaagaaaataacaataggaagctatgtgtatcttctgtgtaaagcagtggcttcactggaaaaatggtgtggctagcatttccctttgagtcatgatgacagatggtgtgaaaaccatctaagtttgcttttgaccatcacctcccagtagcaatttgctttcataatccatttagcaatccaggcctctgttgaaaagataatatgagggagaagggaacacatttccttctgaacttacttccctaagtcactttccttatgtatcatctaatacaatgatggttgagtgaaaatacagaaggggtgtttgagtattcagatttcataaaacacttccttggaatatagctgcattaacttggaaagaagcctgttgggccagaagacagaaac

SEQ ID NO: 13944 - DNA, 1117 bp, Homo sapiens
  source 1..1117: mol_type = unassigned DNA
acccagggcttgcgcttgcctttgcctcttccacactaatgacagactgccccactgagaagggtctagcggagcacaggtcaccagctgggcaacattcagaaagttagtcttcctatgctcattttcctgggctgttacagaagaagactggaagagcgcgcagggaccatgtcggcggagaccgcgagcggccccacagaggaccaggtggaaatcctggagtacaacttcaacaaggtcgacaagcacccggattccaccacgctgtgcctcatcgcggccgaggcaggcctttccgaggaggagacccagaaatggtttaagcagcgcctggcaaagtggcggcgctcagaaggcctgccctcagagtgcagatccgtcacagactaaggagatggcaggcattgacagcttcactccatgaaggccatctctgtttctctcctccgcttaaccaagctgttgtggtttttcagcatagtgttgtatgttccattgctagctgtcctgctgtttaacacagtgttgtattttttttctaaatgtacataattagaaaagaaaataacaataggaagctatgtgtatcttctgtgtaaagcagtggcttcactggaaaaatggtgtggctagcatttccctttgagtcatgatgacagatggtgtgaaaaccatctaagtttgcttttgaccatcacctcccagtagcaatttgctttcataatccatttagcaatccaggcctctgttgaaaagataatatgagggagaagggaacacatttccttctgaacttacttccctaagtcactttccttatgtatcatctaatacaatgatggttgagtgaaaatacagaaggggtgtttgagtattcagatttcataaaacacttccttggaatatagctgcattaacttggaaagaagcctgttgggccagaagacagaaactccaactggcaaaaaagcaagcatctaagaaaaaaaaccaccaaagttcttgaatttactatatttaaatgcattggttaagtttattttgctaaataaagtgaactgctttttgtctctaaaatgatattctaaataaaaccttaactttttgttgaaga

SEQ ID NO: 13945 - DNA, 979 bp, Homo sapiens
  source 1..979: mol_type = unassigned DNA
gcggagacagaaggccgcctaccggggaggccggaggccggctagtcgcggactcgggcgaacccaccctcgcgatctgtcaagtctgtccccaggggaggtccccctttcgggaggaagtttttaaggggatttctcaaaatcacccccgcgcttccttcactccttccttagagccggagcgcgcagggaccatgtcggcggagaccgcgagcggccccacagaggaccaggtggaaatcctggagtacaacttcaacaaggtcgacaagcacccggattccaccacgctgtgcctcatcgcggccgaggcaggcctttccgaggaggagacccagaaatggtttaagcagcgcctggcaaagtggcggcgctcagaaggcctgccctcagagtgcagatccgtcacagactaaggagatggcaggcattgacagcttcactccatgaaggccatctctgtttctctcctccgcttaaccaagctgttgtggtttttcagcatagtgttgtatgttccattgctagctgtcctgctgtttaacacagtgttgtattttttttctaaatgtacataattagaaaagaaaataacaataggaagctatgtgtatcttctgtgtaaagcagtggcttcactggaaaaatggtgtggctagcatttccctttgagtcatgatgacagatggtgtgaaaaccatctaagtttgcttttgaccatcacctcccagtagcaatttgctttcataatccatttagcaatccaggcctctgttgaaaagataatatgagggagaagggaacacatttccttctgaacttacttccctaagtcactttccttatgtatcatctaatacaatgatggttgagtgaaaatacagaaggggtgtttgagtattcagatttcataaaacacttccttggaatatagctgcattaacttggaaagaagcctgttgggccagaagacagaaac

SEQ ID NO: 13946 - DNA, 731 bp, Homo sapiens
  source 1..731: mol_type = unassigned DNA
gcaccagatctacgctttgaaatgaggcaacatctaactggaaactcgctcaaagtaaggaagtggatgagaagactcagggtcccttttctcttccccgtcttctctcagccacatctctcttatcctatcttggtgaagaagcttgcttggctaggagagaggtcagggacgagaagatagtgacgagaaagttccatgagactctcagaagtcccagcctgaacatcaaacctgaataaccaggagagacgtaacctcggcatactttcagtggtttacctcctgcccacgctgcaggtttttcaggtccttgctcgagtgtgtgctcataggcgtaaataaacgtgctatcagcagcctgcgtcagccagcccagctatttaagcaggctggcatcagcaaacacagcttccaaacccagggcttgcgcttgcctttgcctcttccacactaatgacagactgccccactgagaagggtctagcggagcacaggtcaccagctgggcaacattcagaaagttagtcttcctatgctcattttcctgggctgttacagaagaagactggaagagcgcgcagggaccatgtcggcggagaccgcgagcggccccacagaggaccaggtggaaatcctggagtacaacttcaacaaggtcgacaagcacccggattccaccacgctgtgcctcatcgcggccgaggcaggcctttccgaggaggagaccc

SEQ ID NO: 13947 - DNA, 1771 bp, Homo sapiens
  source 1..1771: mol_type = unassigned DNA
ggaaagcgcatgcgcgtcgggcacagcgcgtgcagcctcgtgcagctcttctggtctccggcgcccgcccctcagacgtaatgttgaattaaagaaaatactttatcagaagaagatggccactgcccagttgcagaggactcccatgagtgcactggtatttcccaataagatatcaactgaacaccagtctttggtgttagtgaagaggcttctagcagtttcagtatcctgtatcacgtatttgaggggaatattcccagaatgcgcttatggaacaagatatctagatgatctttgtgtcaaaatactgagagaagataaaaattgcccaggatctacacagttagtgaaatggatgctaggatgttatgatgctttacagaaaaaatatgtatacacaaacccagaagatcctcagacaatttcagaatgttaccaattcaaattcaaatacaccaataatggaccactcatggacttcataagtaaaaaccaaagcaacgaatctagcatgttgtctactgacaccaagaaagcaagcattctcctcattcgcaagatttatatcctaatgcaaaatctggggcctttacctaatgatgtttgtttgaccatgaaacttttttactatgatgaagttacacccccagattaccagcctcccggttttaaggatggtgattgtgaaggagttatatttgaaggggaacctatgtatttaaatgtgggagaagtctcaacaccttttcacatcttcaaagtaaaagtgaccactgagagagaacgaatggaaaatattgactcaactatactatcaccaaaacaaataaaaacaccatttcaaaaaatcctgagggacaaagatgtagaagatgaacaggagcattatacaagtgatgatttggacattgaaactaaaatggaagaacaggaaaaaaaccctgcatcttctgaacttgaagaaccaagtttagtttgtgaggaagatgaaattatgaggtctaaagaaagtccagatctttctatttctcattctcaggttgagcagttagtcaataaaacatctgaacttgatatgtctgaaagcaaaacaagaagtggaaaagtctttcagaataaaatggcaaatggaaatcaaccagtaaaatcttccaaagaaaatcggaagagaagtcaacatgaatctgggagaatagtcctccatcactttgattcttctagtcaagagtcagtgccaaaaaggagaaagtttagtgaaccaaaggaacatatataaaaattatttttgttctgcaggcttgcagagttcttctcaccatttaaactgaaggaccctatattatatttccctaactctgaagatgtatatgtagtttaaagcagtttgtacactaaaactaagtttttggctgactgtcatattgtggtccttaatcttgagataaatccaatagaacttttgaataaaagcaaaagtacaaatgtcataattgattcggtaataagtaaaatttcaaaattgattttgttcattacctacttaatatttcctttaaatatatactaactgttaaggccctctaatgccatttttctaaacagtaatgtttactttggtattaaaatttggtatggattcactttttacttatgttaaaattataccatttaactggctcttttgtcattgtgctgttattaaaacaatgttcttcaatattttgacataatgtattaacattttaatatataatgtacaatttaagaa

SEQ ID NO: 13948 - DNA, 1692 bp, Homo sapiens
  source 1..1692: mol_type = unassigned DNA
atgcgcgtcgggcacagcgcgtgcagcctcgtgcagctcttctggtctccggcgcccgcccctcagacgtaatgttgaattaaagaaaatactttatcagaagaagatggccactgcccagttgcagaggactcccatgagtgcactggtatttcccaataagatatcaactgaacaccagtctttggtgttagtgaagaggcttctagcagtttcagtatcctgtatcacgtatttgaggggaatattcccagaatgcgcttatggaacaagatatctagatgatctttgtgtcaaaatactgagagaagataaaaattgcccaggatctacacagttagtgaaatggatgctaggatgttatgatgctttacagaaaaaatatctaaggatggttgttctagctgtatacacaaacccagaagatcctcagacaatttcagaatgttaccaattcaaattcaaatacaccaataatggaccactcatggacttcataagtaaaaaccaaagcaacgaatctagcatgttgtctactgacaccaagaaagcaagcattctcctcattcgcaagatttatatcctaatgcaaaatctggggcctttacctaatgatgtttgtttgaccatgaaacttttttactatgatgaagttacacccccagattaccagcctcccggttttaaggatggtgattgtgaaggagttatatttgaaggggaacctatgtatttaaatgtgggagaagtctcaacaccttttcacatcttcaaagtaaaagtgaccactgagagagaacgaatggaaaatattgactcaactatactatcaccaaaacaaataaaaacaccatttcaaaaaatcctgagggacaaagatgtagaagatgaacaggagcattatacaagtgatgatttggacattgaaactaaaatggaagaacaggaaaaaaaccctgcatcttctgaacttgaagaaccaagtttagtttgtgaggaagatgaaattatgaggtctaaagaaagtccagatctttctatttctcattctcaggttgagcagttagtcaataaaacatctgaacttgatatgtctgaaagcaaaacaagaagtggaaaagtctttcagaataaaatggcaaatggaaatcaaccagtaaaatcttccaaagaaaatcggaagagaagtcaacatgaatctgggagaatagtcctccatcactttgattcttctagtcaagagtcagtgccaaaaaggagaaagtttagtgaaccaaaggaacatatataaaaattatttttgttctgcaggcttgcagagttcttctcaccatttaaactgaaggaccctatattatatttccctaactctgaagatgtatatgtagtttaaagcagtttgtacactaaaactaagtttttggctgactgtcatattgtggtccttaatcttgagataaatccaatagaacttttgaataaaagcaaaagtacaaatgtcataattgattcggtaataagtaaaatttcaaaattgattttgttcattacctacttaatatttcctttaaatatatactaactgttaaggccctctaatgccatttttctaaacagtaatgtttactttggtattaaaatttggtatggattcactttttacttatgttaaaattataccatttaactggc

SEQ ID NO: 13949 - DNA, 791 bp, Homo sapiens
  source 1..791: mol_type = unassigned DNA
ctcttctggtctccggcgcccgcccctcagacgtaatgttgaattaaagaaaatactttatcagaagaagatggccactgcccagttgcagaggactcccatgagtgcactggtatttcccaataagatatcaactgaacaccagtctttggtgttagtgaagaggcttctagcagtttcagtatcctgtatcacgtatttgaggggaatattcccagaatgcgcttatggaacaagatatctagatggatgctaggatgttatgatgctttacagaaaaaatatctaaggatggttgttctagctgtatacacaaacccagaagatcctcagacaatttcagaatgttaccaattcaaattcaaatacaccaataatggaccactcatggacttcataagtaaaaaccaaagcaacgaatctagcatgttgtctactgacaccaagaaagcaagcattctcctcattcgcaagatttatatcctaatgcaaaatctggggcctttacctaatgatgtttgtttgaccatgaaacttttttactatgatgaagttacacccccagattaccagcctcccggttttaaggatggtgattgtgaaggagttatatttgaaggggaacctatgtatttaaatgtgggagaagtctcaacaccttttcacatcttcaaagtaaaagtgaccactgagagagaacgaatggaaaatattgactcaactatactatcaccaaaacaaataaaaacaccatttcaaaaaatcctgagggacaaagatgtagaagatga

SEQ ID NO: 13950 - DNA, 1815 bp, Homo sapiens
  source 1..1815: mol_type = unassigned DNA
atgcgcgtcgggcacagcgcgtgcagcctcgtgcagctcttctggtctccggcgcccgcccctcagacgtaatgttgaattaaagaaaatactttatcagaagaagatggccactgcccagttgcagaggactcccatgagtgcactggtatttcccaataagatatcaactgaacaccagtctttggtgttagtgaagaggcttctagcagtttcagtatcctgtatcacgtatttgaggggaatattcccagaatgcgcttatggaacaagatatctagatggatgctaggatgttatgatgctttacagaaaaaatatttaaagataatggaattaacagtatacacaaacccagaagatcctcagacaatttcagaatgttaccaattcaaattcaaatacaccaataatggaccactcatggacttcataagtaaaaaccaaagcaacgaatctagcatgttgtctactgacaccaagaaagcaagcattctcctcattcgcaagatttatatcctaatgcaaaatctggggcctttacctaatgatgtttgtttgaccatgaaacttttttactatgatgaagttacacccccagattaccagcctcccggttttaaggatggtgattgtgaaggagttatatttgaaggggaacctatgtatttaaatgtgggagaagtctcaacaccttttcacatcttcaaagtaaaagtgaccactgagagagaacgaatggaaaatattgactcaactatactatcaccaaaacaaataaaaacaccatttcaaaaaatcctgagggacaaagatgtagaagatgaacaggagcattatacaagtgatgatttggacattgaaactaaaatggaagaacaggaaaaaaaccctgcatcttctgaacttgaagaaccaagtttagtttgtgaggaagatgaaattatgaggtctaaagaaagtccagatctttctatttctcattctcaggttgagcagttagtcaataaaacatctgaacttgatatgtctgaaagcaaaacaagaagtggaaaagtctttcagaataaaatggcaaatggaaatcaaccagtaaaatcttccaaagaaaatcggaagagaagtcaacatgaatctgggagaatagtcctccatcactttgattcttctagtcaagagtcagtgccaaaaaggagaaagtttagtgaaccaaaggaacatatataaaaattatttttgttctgcaggcttgcagagttcttctcaccatttaaactgaaggaccctatattatatttccctaactctgaagatgtatatgtagtttaaagcagtttgtacactaaaactaagtttttggctgactgtcatattgtggtccttaatcttgagataaatccaatagaacttttgaataaaagcaaaagtacaaatgtcataattgattcggtaataagtaaaatttcaaaattgattttgttcattacctacttaatatttcctttaaatatatactaactgttaaggccctctaatgccatttttctaaacagtaatgtttactttggtattaaaatttggtatggattcactttttacttatgttaaaattataccatttaactggctcttttgtcattgtgctgttattaaaacaatgttcttcaatattttgacataatgtattaacattttaatatataatgtacaatttaagaattggtgctttacctttactatgcttttttttacaggacaaaaagactgatttttaaagtatggcattttttgcagcataaataaaatattgttcag

SEQ ID NO: 13951 - DNA, 1879 bp, Homo sapiens
  source 1..1879: mol_type = unassigned DNA
atgcgcgtcgggcacagcgcgtgcagcctcgtgcagctcttctggtctccggcgcccgcccctcagacgtaatgttgaattaaagaaaatactttatcagaagaagatggccactgcccagttgcagaggactcccatgagtgcactggtatttcccaataagatatcaactgaacaccagtctttggtgttagtgaagaggcttctagcagtttcagtatcctgtatcacgtatttgaggggaatattcccagaatgcgcttatggaacaagatatctagatgatctttgtgtcaaaatactgagagaagataaaaattgcccaggatctacacagttagtgaaatggatgctaggatgttatgatgctttacagaaaaaatatttaaagataatggaattaacagtatacacaaacccagaagatcctcagacaatttcagaatgttaccaattcaaattcaaatacaccaataatggaccactcatggacttcataagtaaaaaccaaagcaacgaatctagcatgttgtctactgacaccaagaaagcaagcattctcctcattcgcaagatttatatcctaatgcaaaatctggggcctttacctaatgatgtttgtttgaccatgaaacttttttactatgatgaagttacacccccagattaccagcctcccggttttaaggatggtgattgtgaaggagttatatttgaaggggaacctatgtatttaaatgtgggagaagtctcaacaccttttcacatcttcaaagtaaaagtgaccactgagagagaacgaatggaaaatattgactcaactatactatcaccaaaacaaataaaaacaccatttcaaaaaatcctgagggacaaagatgtagaagatgaacaggagcattatacaagtgatgatttggacattgaaactaaaatggaagaacaggaaaaaaaccctgcatcttctgaacttgaagaaccaagtttagtttgtgaggaagatgaaattatgaggtctaaagaaagtccagatctttctatttctcattctcaggttgagcagttagtcaataaaacatctgaacttgatatgtctgaaagcaaaacaagaagtggaaaagtctttcagaataaaatggcaaatggaaatcaaccagtaaaatcttccaaagaaaatcggaagagaagtcaacatgaatctgggagaatagtcctccatcactttgattcttctagtcaagagtcagtgccaaaaaggagaaagtttagtgaaccaaaggaacatatataaaaattatttttgttctgcaggcttgcagagttcttctcaccatttaaactgaaggaccctatattatatttccctaactctgaagatgtatatgtagtttaaagcagtttgtacactaaaactaagtttttggctgactgtcatattgtggtccttaatcttgagataaatccaatagaacttttgaataaaagcaaaagtacaaatgtcataattgattcggtaataagtaaaatttcaaaattgattttgttcattacctacttaatatttcctttaaatatatactaactgttaaggccctctaatgccatttttctaaacagtaatgtttactttggtattaaaatttggtatggattcactttttacttatgttaaaattataccatttaactggctcttttgtcattgtgctgttattaaaacaatgttcttcaatattttgacataatgtattaacattttaatatataatgtacaatttaagaattggtgctttacctttactatgcttttttttacaggacaaaaagactgatttttaaagtatggcattttttgcagcataaataaaatattgttcag

SEQ ID NO: 13952 - DNA, 1794 bp, Homo sapiens
  source 1..1794: mol_type = unassigned DNA
atgcgcgtcgggcacagcgcgtgcagcctcgtgcagctcttctggtctccggcgcccgcccctcagacgtaatgttgaattaaagaaaatactttatcagaagaagatggccactgcccagttgcagaggactcccatgagtgcactggtatttcccaataagatatcaactgaacaccagtctttggtgttagtgaagaggcttctagcagtttcagtatcctgtatcacgtatttgaggggaatattcccagaatgcgcttatggaacaagatatctagatggatgctaggatgttatgatgctttacagaaaaaatatctaaggatggttgttctagctacaatttcagaatgttaccaattcaaattcaaatacaccaataatggaccactcatggacttcataagtaaaaaccaaagcaacgaatctagcatgttgtctactgacaccaagaaagcaagcattctcctcattcgcaagatttatatcctaatgcaaaatctggggcctttacctaatgatgtttgtttgaccatgaaacttttttactatgatgaagttacacccccagattaccagcctcccggttttaaggatggtgattgtgaaggagttatatttgaaggggaacctatgtatttaaatgtgggagaagtctcaacaccttttcacatcttcaaagtaaaagtgaccactgagagagaacgaatggaaaatattgactcaactatactatcaccaaaacaaataaaaacaccatttcaaaaaatcctgagggacaaagatgtagaagatgaacaggagcattatacaagtgatgatttggacattgaaactaaaatggaagaacaggaaaaaaaccctgcatcttctgaacttgaagaaccaagtttagtttgtgaggaagatgaaattatgaggtctaaagaaagtccagatctttctatttctcattctcaggttgagcagttagtcaataaaacatctgaacttgatatgtctgaaagcaaaacaagaagtggaaaagtctttcagaataaaatggcaaatggaaatcaaccagtaaaatcttccaaagaaaatcggaagagaagtcaacatgaatctgggagaatagtcctccatcactttgattcttctagtcaagagtcagtgccaaaaaggagaaagtttagtgaaccaaaggaacatatataaaaattatttttgttctgcaggcttgcagagttcttctcaccatttaaactgaaggaccctatattatatttccctaactctgaagatgtatatgtagtttaaagcagtttgtacactaaaactaagtttttggctgactgtcatattgtggtccttaatcttgagataaatccaatagaacttttgaataaaagcaaaagtacaaatgtcataattgattcggtaataagtaaaatttcaaaattgattttgttcattacctacttaatatttcctttaaatatatactaactgttaaggccctctaatgccatttttctaaacagtaatgtttactttggtattaaaatttggtatggattcactttttacttatgttaaaattataccatttaactggctcttttgtcattgtgctgttattaaaacaatgttcttcaatattttgacataatgtattaacattttaatatataatgtacaatttaagaattggtgctttacctttactatgcttttttttacaggacaaaaagactgatttttaaagtatggcattttttgcagcataaataaaatattgttcagtacgta

SEQ ID NO: 13953 - DNA, 740 bp, Homo sapiens
  source 1..740: mol_type = unassigned DNA
cgggcacagcgcgtgcagcctcgtgcagctcttctggtctccggcgcccgcccctcagacgtaatgttgaattaaagaaaatactttatcagaagaagatggccactgcccagttgcagaggactcccatgagtgcactggtatttcccaataagatatcaactgaacaccagtctttggtgttagtgaagaggcttctagcagtttcagtatcctgtatcacgtatttgaggggaatattcccagaatgcgcttatggaacaagatatctagatggatgctaggatgttatgatgctttacagaaaaaatatgtatacacaaacccagaagatcctcagacaatttcagaatgttaccaattcaaattcaaatacaccaataatggaccactcatggacttcataagtaaaaaccaaagcaacgaatctagcatgttgtctactgacaccaagaaagcaagcattctcctcattcgcaagatttatatcctaatgcaaaatctggggcctttacctaatgatgtttgtttgaccatgaaacttttttactatgatgaagttacacccccagattaccagcctcccggttttaaggatggtgattgtgaaggagttatatttgaaggggaacctatgtatttaaatgtgggagaagtctcaacaccttttcacatcttcaaagtaaaagtgaccactgagagagaacgaatggaaaatattgactcaactatactatcac

SEQ ID NO: 13954 - DNA, 1788 bp, Homo sapiens
  source 1..1788: mol_type = unassigned DNA
atgcgcgtcgggcacagcgcgtgcagcctcgtgcagctcttctggtctccggcgcccgcccctcagacgtaatgttgaattaaagaaaatactttatcagaagaagatggccactgcccagttgcagaggactcccatgagtgcactggtatttcccaataagatatcaactgaacaccagtctttggtgttagtgaagaggcttctagcagtttcagtatcctgtatcacgtatttgaggggaatattcccagaatgcgcttatggaacaagatatctagatggatgctaggatgttatgatgctttacagaaaaaatatctgcgatattttctatttaagacaatttcagaatgttaccaattcaaattcaaatacaccaataatggaccactcatggacttcataagtaaaaaccaaagcaacgaatctagcatgttgtctactgacaccaagaaagcaagcattctcctcattcgcaagatttatatcctaatgcaaaatctggggcctttacctaatgatgtttgtttgaccatgaaacttttttactatgatgaagttacacccccagattaccagcctcccggttttaaggatggtgattgtgaaggagttatatttgaaggggaacctatgtatttaaatgtgggagaagtctcaacaccttttcacatcttcaaagtaaaagtgaccactgagagagaacgaatggaaaatattgactcaactatactatcaccaaaacaaataaaaacaccatttcaaaaaatcctgagggacaaagatgtagaagatgaacaggagcattatacaagtgatgatttggacattgaaactaaaatggaagaacaggaaaaaaaccctgcatcttctgaacttgaagaaccaagtttagtttgtgaggaagatgaaattatgaggtctaaagaaagtccagatctttctatttctcattctcaggttgagcagttagtcaataaaacatctgaacttgatatgtctgaaagcaaaacaagaagtggaaaagtctttcagaataaaatggcaaatggaaatcaaccagtaaaatcttccaaagaaaatcggaagagaagtcaacatgaatctgggagaatagtcctccatcactttgattcttctagtcaagagtcagtgccaaaaaggagaaagtttagtgaaccaaaggaacatatataaaaattatttttgttctgcaggcttgcagagttcttctcaccatttaaactgaaggaccctatattatatttccctaactctgaagatgtatatgtagtttaaagcagtttgtacactaaaactaagtttttggctgactgtcatattgtggtccttaatcttgagataaatccaatagaacttttgaataaaagcaaaagtacaaatgtcataattgattcggtaataagtaaaatttcaaaattgattttgttcattacctacttaatatttcctttaaatatatactaactgttaaggccctctaatgccatttttctaaacagtaatgtttactttggtattaaaatttggtatggattcactttttacttatgttaaaattataccatttaactggctcttttgtcattgtgctgttattaaaacaatgttcttcaatattttgacataatgtattaacattttaatatataatgtacaatttaagaattggtgctttacctttactatgcttttttttacaggacaaaaagactgatttttaaagtatggcattttttgcagcataaataaaatattgttcag

SEQ ID NO: 13955 - DNA, 8869 bp, Homo sapiens
  source 1..8869: mol_type = unassigned DNA
cggctcccagggaggaggcatgagcgccctgccgttaccgcttcttctgccgtacagttgccgcttcggggcctaactctagctctttgaagcggctcctgtgggaaggagtcataaggcgggaagtgaggatcggacaccgccttgagtttggtgtgcagtggaagaactgacctaggaggaagagaataggggggaacggggagctagtctcaagatggcggctcccacggcggcaggcgcagcctgagcagcagaggcggactaaggggagaggcgcgagacttcacaagccgtacggcgcgagcccccaaacggccctcgagagctcgagctggttccaccggcctccggcccgcctccattcgttaggtgtgtcgaggctgtttcgggagcggcggctgcactaaggcgctgggcggggaagcgggacggtctcaagatggcggctcccacaattgtggtctgagcgccggcggggctgcgacgaccgcggcgcttgtggctcctttccacccgccccggaagccggccagtgctggggacttgggggtgtgggaaccgggccggggctccgccatttccggcgggggagggctacgactgaggaagggaggagagagaggcggctcaagatggcggctcccagggcctcccgcccgagcttgtaagcgggagcgcccggacaagtagtcggggcgacgggactcagcggcctccagcttcttgagcctaggcgctcgacagtttcgggcggctcttgcggagacggggtgagcgagaagaaagggaagagccaaagggaaggagggcagttaagatggcggcctccatggagtcgtctaccgctgtgtgagaaaccgcttctccgtgagagctgccttagacgaaagggggtgtgtgaaaggaattgaggggctcccttcccgcttgttgacttctccccaccgcaccctttcccggaactatggcttcggccgtgtcgcccgccaacttgccagcggtgcttctgcagccccgctggaagcgagtggtgggctggtcgggtccggtgccacggccccgccacggccaccgcgccgtggccatcaaggagctcatcgtggtgtttggcggcggcaacgagggaatagtggacgaactgcacgtgtacaacacggcaaccaaccagtggttcatcccagccgtgaggggggacattccccctgggtgtgcagcctatggcttcgtgtgtgacgggactcgcctcctggtgtttggtgggatggtggagtatgggaaatacagcaatgacctctacgaactccaggcgagccggtgggagtggaagagactcaaagcaaagacgcccaaaaacgggccccctccgtgtcctcgactcgggcacagcttctcccttgtgggcaacaaatgctacctgtttgggggtctggccaatgatagcgaggacccaaagaacaacattccaaggtacctgaatgacttatatatcctggaattacggccaggctctggagtggtagcctgggacattcccatcacttacggggtcctaccaccaccccgggagtcacatactgccgtggtctacaccgaaaaagacaataagaagtccaagctggtgatctacggcgggatgagtggctgcaggctgggggacctgtggaccctagatattgacaccctgacgtggaataagcccagtctcagcggggtggcgcctcttcctcgcagtctccactcggcaaccaccatcggaaataaaatgtacgtgtttggtggctgggtgcctctcgtcatggatgacgtcaaagtggccacacacgagaaggagtggaagtgtaccaacacgctggcttgtctcaacctggataccatggcctgggagaccatcctgatggatacactggaggacaacatcccccgtgctcgggctggccactgcgcagtcgccatcaacacccgcctgtacatttggagtgggcgtgacggctaccgcaaggcctggaacaaccaggtctgctgcaaggacctctggtacctagagacagaaaagccaccacccccagcccgagtacaactggtacgcgccaacaccaactccctggaggtgagctggggggcagtggcaacagccgacagctaccttctccagctccagaaatatgacattcctgccacggctgctactgccacctcccctacacccaatccggtcccatctgtgcctgccaaccctcccaagagccctgccccagcagcagccgcacctgctgtgcagccgctgacccaagtaggcatcacgctcctgccccaggctgcccccgcacccccgaccaccaccaccatccaggtcttgccaacggtgcctggcagctccatttctgtgcccaccgcagccaggactcaaggtgtccctgctgttctcaaagtgaccggtcctcaggctacaacaggaactccattggtcaccatgcgacctgccagccaggctgggaaagcccctgtcaccgtgacctcccttcccgccggagtgcggatggttgtgccaacacagagtgcccagggaacggtgattggcagtagcccacagatgagtgggatggccgcactggccgctgcggccgctgccacccagaagatccccccttcctcggcacccacggtgctgagtgtcccagcgggtaccaccatcgtgaagaccatggctgtgacacctggcactaccaccctcccagccactgtgaaggtggcctcctcgccagtcatggtgagcaaccctgccactcgcatgctgaagactgcagccgcccaggtggggacatcggtttcctccgccaccaacacgtctacccgccctatcatcacagtgcacaagtcaggcactgtgacagtggcccagcaagcccaggtggtgaccacagttgtgggcggggtcaccaagaccatcaccctggtgaagagccccatctctgtcccaggaggcagtgctctgatttccaatctgggcaaagtgatgtcggtggtccagaccaaaccagttcagacttcagcagtcacaggccaggcgtccacgggtcctgtgactcagatcatccagaccaaagggcccctgccagcgggaacaatcctgaagctggtgacctcagcagatggcaagcccaccaccatcatcactaccacgcaggccagtggggcggggaccaagcccaccatcctgggcatcagcagcgtctcccccagtaccaccaagcccggcacgaccaccatcatcaaaaccatccccatgtcggccatcatcacccaggcgggcgccacgggtgtgaccagcagtcctggcatcaagtcccccatcaccatcatcaccaccaaggtgatgacttcaggaactggagcacctgcgaaaatcatcactgctgtccccaaaattgccactggccacgggcagcagggagtgacccaggtggtgcttaagggggccccgggacagccaggcaccatcctccgcactgtgcccatggggggtgttcgcctggtcacacccgtcaccgtctccgccgtcaagccagccgtcaccacgttggttgtgaaaggcaccacaggtgtcacgaccctaggcacagtgacaggcaccgtctccaccagccttgccggggcggggggccacagcactagtgcttccctggccacgcccatcaccaccttgggcaccattgccaccctctcaagccaggtgatcaaccccactgccatcactgtgtcggccgcacagaccacgctgacagcggcaggcgggctcacaaccccaaccatcaccatgcagcccgtgtcccagcccacccaggtaactctgatcacggcacctagtggggtggaggcccagcctgtgcatgacctccctgtgtccattctggcctccccgactacagaacagcccaccgccacagttaccatcgccgactcaggccagggtgatgtgcagcctggcactgtcaccttggtgtgctccaacccaccctgtgagacccacgagactggcaccaccaacacggccaccactactgttgtggctaaccttgggggacacccccagcccacccaagtgcagttcgtctgtgacagacaggaggcagctgcttctcttgtgacctcgactgtgggccagcagaatggtagcgtggtccgagtctgttcgaacccgccctgcgagacccacgagacgggcaccaccaacaccgccaccaccgccacctccaacatggccgggcagcatggctgctcaaacccaccctgcgagacccacgagacgggcaccaccaacactgccactacagccatgtcgagcgtcggcgccaaccaccagcgagatgcccgtcgggcctgtgcagctggcacccctgccgtgatccggatcagtgtggccactggggcgctggaggcagcccagggctctaagtcccagtgccaaacccgccagaccagcgcgaccagcaccaccatgactgtgatggccaccggggccccgtgctcggccggcccactccttgggccgagcatggcacgggagcccgggggccgcagccctgcttttgtgcagttggcccctctgagcagcaaagtcaggctgagcagcccaagcattaaggaccttcctgcggggcgccacagccatgcggtcagcaccgctgccatgacccgttccagcgtgggtgctggggagccccgcatggcacctgtgtgcgagagcctccagggtggctcgcccagcaccacagtgactgtgacagccctggaggcactgctgtgcccctcggccaccgtgacccaagtctgctccaacccaccatgtgagacccacgagacaggcaccaccaacaccgccactacctcgaatgcaggcagcgcccagagggtgtgctccaacccgccatgcgagacccacgagacgggcaccacccacacggccaccaccgctacttcaaacgggggcacgggccagcccgagggtgggcagcagccccctgctggtcgcccctgtgagacacaccagaccacttccactggcaccaccatgtcggtcagcgtgggtgccctgcttcccgacgccacttcttcccacaggaccgtggagtctggcctagaggtggcggcggcacccagcgtcaccccccaggctggcaccgcgctgctggctcctttcccaacacagagggtgtgctccaaccccccctgtgagacccacgagacgggcaccactcacacggccaccactgtcacttccaacatgagttcaaaccaagaccccccacctgctgccagcgatcagggagaggtggagagcacccagggcgacagcgtgaacatcaccagctccagtgccatcacgacaaccgtgtcctccacactgacgcgggctgtgaccaccgtgacgcagtccacaccggtcccgggcccctctgtgccgcccccagaggaactccaggtgtcgccaggtcctcgccagcagctgccgccacggcagcttctgcagtcggcttccacagccctgatgggggagtccgccgaggtcctgtcagcctcccagacccctgagctcccggccgccgtggatctgagcagcacaggggagccatcttcgggccaggagtctgccggctctgcggtggtggccactgtggtggtccagccacccccacccacacagtccgaagtagaccagttatcacttccccaagagctaatggccgaggcccaagctggcaccaccaccctcatggtaacggggctcacccccgaggagctggcagtgacggctgctgcagaagcagctgcccaggccgcagccacggaggaagcccaggccctggccatccaggcggtgctccaggccgcgcagcaggccgtcatgggcaccggcgagcccatggacacctccgaggcagcagcaaccgtgactcaggcggagctggggcacctgtcggccgagggtcaggagggccaggccaccaccatacccattgtgctgacacagcaggagctggctgccctggtgcagcagcagcagctgcaggaggcccaggcccagcagcagcatcaccacctccccactgaggccctggcccctgccgacagtctcaacgacccagccattgagagcaattgcctcaatgagctggccggcacggtccccagcactgtggcgctgctgccctcaacggccactgagagcctggctccatccaacacatttgtggccccccagccggttgtggtggccagcccagccaagctgcaggctgcagctaccctgaccgaagtggccaatggcatcgagtccctgggtgtgaagccagacctgccgcccccacccagcaaagcccccatgaagaaggaaaaccagtggtttgatgtgggagtcattaagggcaccaatgtaatggtgacacactatttcctgccaccagatgatgctgtcccatcagacgatgatttgggcaccgtccctgactataaccagctgaagaagcaggagctgcagccaggcacagcctataagtttcgtgttgccggaatcaatgcctgtggccgggggcccttcagcgaaatctcagcctttaagacgtgcctgcctggtttcccaggggccccttgtgccattaaaatcagcaaaagtccggatggtgctcacctcacctgggagccaccctctgtgacctccggcaagattatcgagtactccgtgtacctggccatccagagctcacaggctgggggcgagctcaagagctccaccccggcccagctggccttcatgcgggtgtactgcgggcccagcccctcctgcctggtgcagtcctccagcctttccaacgcccacatcgactacaccaccaagcccgccatcatcttccgcatcgccgcccgcaatgagaagggctatggcccggccacacaagtgaggtggctgcaggaaaccagtaaagacagctctggcaccaagccagccaacaagcggcccatgtcctctccagaaatgaaatctgctccaaagaaatctaaggccgatggtcagtgagaggaagctgactagcccctggattcttctccagacccccctgcttcaggaacacccgccagggcccacccctcccaccccgtcccagcattcgcacttcaccctcgcgagccgctgttcactcctctcccctttctctttctctctgtttttaaaataatctaaagaaagcacattttaccattgctgttgggaggaagcagaggcagatgggaaagcagagagaggagcgcgcttcctttcctccccgctgccgcccaccctggggagagacttttgcggggagggaaggcggagctgaggacagccagctccgccctcccaaggctgtgcgttcctgagggccaggtcgggggcaggcatggaggggaggaaaggcgtccctcttggccctccccagagtggctttcctggcaccctggcctgggtgtctggttctgttttcttttcttccccttgtgtttccagtcacctaacttcccttcctcaggctcccccggcccaccctgctcagtgaccccacaggaagcttacacattttctcagaggcctttgtgctcccacctcttctaccctccccctcttctttcccattttaaaaaagaaaagaaggaaaaagaaaaaaggggcaaggagccccgcggcggcctgggcagcgcctgtgcagacctccctgcaggccgcactgccaactgctgcatttgttgtgttttttaggttgcaattggtgaagttcacactttcattgtaattttagcgtgtggggttttgtcccttttttgttgttgttagctgtgtacagaatgtgtaatcttttttcttttctcttttttttgttttgttttgttttgtttttgtttttttacttttttcttcttggctaattcttggcagggatctttctggaggaaaagctggggccagccagggcaggagaggtgtgaaatctgccacgaggggcctgctgtttgccacccagcccaacttcctgttgctggcccctgccctctgcccttttgcctgtcctcaggccgctggaacaaaggaaggacagctcattcctcatgggcgatcactccgcatctatagggtcgagcctaggggagcttgagggagggctggggcctccttgtcctggatttccagctctccccatgccccctccctgagcaccaccggcaccgcctcccaaacagggctgctggtttccgcagccactgctccacctcccccaaatcgtcatggaaagggtggagaatggaggggaaccaggcgtccttggaggcagcttgggagggtgactgtgtagtgtcacccacaagggaggctagggcaatggagcaggccaccagcagcagctgtgcagcatggaactcaggccaggctccgaggctgggggatctgcttggagttttctgccccccaccccaaacttctgtcgaggagcaaggcttgccagcaagtcagaaggatttgaaccgagcagccaatctttccagccctcccctaccgacctctgcctggagacgcagcagcctgtgtcctccagggcctctggtttgttgtattatagtatatttcgctgtggaaaatgtcacgtttagtcaccttggagcccactcacctggtcctgttgttttaccccatcccttctctcgcgcgcctattgatttgtttctgaggagagtacaccgttcactattgtagagtaacccctgtgactcaatattaccatagtgcgatgtcgttttgtgctattttgaacaattaaaagactttttttgaaataaccac

SEQ ID NO: 13956 - DNA, 8213 bp, Homo sapiens
  source 1..8213: mol_type = unassigned DNA
aagatggcggctcccacaattgtggtctgagcgccggcggggctgcgacgaccgcggcgcttgtggctcctttccacccgccccggaagccggccagtgctggggacttgggggtgtgggaaccgggccggggctccgccatttccggcgggggagggctacgactgaggaagggaggagagagaggcggctcaagatggcggctcccagggcctcccgcccgagcttgtaagcgggagcgcccggacaagtagtcggggcgacgggactcagcggcctccagcttcttgagcctaggcgctcgacagtttcgggcggctcttgcggagacggggtgagcgagaagaaagggaagagccaaagggaaggagggcagttaagatggcggcctccatggagtcgtctaccgctgtgtgagaaaccgcttctccgtgagagctgccttagacgaaagggggtgtgtgaaaggaattgaggggctcccttcccgcttgttgacttctccccaccgcaccctttcccggaactatggcttcggccgtgtcgcccgccaacttgccagcggtgcttctgcagccccgctggaagcgagtggtgggctggtcgggtccggtgccacggccccgccacggccaccgcgccgtggccatcaaggagctcatcgtggtgtttggcggcggcaacgagggaatagtggacgaactgcacgtgtacaacacggcaaccaaccagtggttcatcccagccgtgaggggggacattccccctgggtgtgcagcctatggcttcgtgtgtgacgggactcgcctcctggtgtttggtgggatggtggagtatgggaaatacagcaatgacctctacgaactccaggcgagccggtgggagtggaagagactcaaagcaaagacgcccaaaaacgggccccctccgtgtcctcgactcgggcacagcttctcccttgtgggcaacaaatgctacctgtttgggggtctggccaatgatagcgaggacccaaagaacaacattccaaggtacctgaatgacttatatatcctggaattacggccaggctctggagtggtagcctgggacattcccatcacttacggggtcctaccaccaccccgggagtcacatactgccgtggtctacaccgaaaaagacaataagaagtccaagctggtgatctacggcgggatgagtggctgcaggctgggggacctgtggaccctagatattgacaccctgacgtggaataagcccagtctcagcggggtggcgcctcttcctcgcagtctccactcggcaaccaccatcggaaataaaatgtacgtgtttggtggctgggtgcctctcgtcatggatgacgtcaaagtggccacacacgagaaggagtggaagtgtaccaacacgctggcttgtctcaacctggataccatggcctgggagaccatcctgatggatacactggaggacaacatcccccgtgctcgggctggccactgcgcagtcgccatcaacacccgcctgtacatttggagtgggcgtgacggctaccgcaaggcctggaacaaccaggtctgctgcaaggacctctggtacctagagacagaaaagccaccacccccagcccgagtacaactggtacgcgccaacaccaactccctggaggctgcccccgcacccccgaccaccaccaccatccaggtcttgccaacggtgcctggcagctccatttctgtgcccaccgcagccaggactcaaggtgtccctgctgttctcaaagtgaccggtcctcaggctacaacaggaactccattggtcaccatgcgacctgccagccaggctgggaaagcccctgtcaccgtgacctcccttcccgccggagtgcggatggttgtgccaacacagagtgcccagggaacggtgattggcagtagcccacagatgagtgggatggccgcactggccgctgcggccgctgccacccagaagatccccccttcctcggcacccacggtgctgagtgtcccagcgggtaccaccatcgtgaagaccatggctgtgacacctggcactaccaccctcccagccactgtgaaggtggcctcctcgccagtcatggtgagcaaccctgccactcgcatgctgaagactgcagccgcccaggtggggacatcggtttcctccgccaccaacacgtctacccgccctatcatcacagtgcacaagtcaggcactgtgacagtggcccagcaagcccaggtggtgaccacagttgtgggcggggtcaccaagaccatcaccctggtgaagagccccatctctgtcccaggaggcagtgctctgatttccaatctgggcaaagtgatgtcggtggtccagaccaaaccagttcagacttcagcagtcacaggccaggcgtccacgggtcctgtgactcagatcatccagaccaaagggcccctgccagcgggaacaatcctgaagctggtgacctcagcagatggcaagcccaccaccatcatcactaccacgcaggccagtggggcggggaccaagcccaccatcctgggcatcagcagcgtctcccccagtaccaccaagcccggcacgaccaccatcatcaaaaccatccccatgtcggccatcatcacccaggcgggcgccacgggtgtgaccagcagtcctggcatcaagtcccccatcaccatcatcaccaccaaggtgatgacttcaggaactggagcacctgcgaaaatcatcactgctgtccccaaaattgccactggccacgggcagcagggagtgacccaggtggtgcttaagggggccccgggacagccaggcaccatcctccgcactgtgcccatggggggtgttcgcctggtcacacccgtcaccgtctccgccgtcaagccagccgtcaccacgttggttgtgaaaggcaccacaggtgtcacgaccctaggcacagtgacaggcaccgtctccaccagccttgccggggcggggggccacagcactagtgcttccctggccacgcccatcaccaccttgggcaccattgccaccctctcaagccaggtgatcaaccccactgccatcactgtgtcggccgcacagaccacgctgacagcggcaggcgggctcacaaccccaaccatcaccatgcagcccgtgtcccagcccacccaggtaactctgatcacggcacctagtggggtggaggcccagcctgtgcatgacctccctgtgtccattctggcctccccgactacagaacagcccaccgccacagttaccatcgccgactcaggccagggtgatgtgcagcctggcactgtcaccttggtgtgctccaacccaccctgtgagacccacgagactggcaccaccaacacggccaccactactgttgtggctaaccttgggggacacccccagcccacccaagtgcagttcgtctgtgacagacaggaggcagctgcttctcttgtgacctcgactgtgggccagcagaatggtagcgtggtccgagtctgttcgaacccgccctgcgagacccacgagacgggcaccaccaacaccgccaccaccgccacctccaacatggccgggcagcatggctgctcaaacccaccctgcgagacccacgagacgggcaccaccaacactgccactacagccatgtcgagcgtcggcgccaaccaccagcgagatgcccgtcgggcctgtgcagctggcacccctgccgtgatccggatcagtgtggccactggggcgctggaggcagcccagggctctaagtcccagtgccaaacccgccagaccagcgcgaccagcaccaccatgactgtgatggccaccggggccccgtgctcggccggcccactccttgggccgagcatggcacgggagcccgggggccgcagccctgcttttgtgcagttggcccctctgagcagcaaagtcaggctgagcagcccaagcattaaggaccttcctgcggggcgccacagccatgcggtcagcaccgctgccatgacccgttccagcgtgggtgctggggagccccgcatggcacctgtgtgcgagagcctccagggtggctcgcccagcaccacagtgactgtgacagccctggaggcactgctgtgcccctcggccaccgtgacccaagtctgctccaacccaccatgtgagacccacgagacaggcaccaccaacaccgccactacctcgaatgcaggcagcgcccagagggtgtgctccaacccgccatgcgagacccacgagacgggcaccacccacacggccaccaccgctacttcaaacgggggcacgggccagcccgagggtgggcagcagccccctgctggtcgcccctgtgagacacaccagaccacttccactggcaccaccatgtcggtcagcgtgggtgccctgcttcccgacgccacttcttcccacaggaccgtggagtctggcctagaggtggcggcggcacccagcgtcaccccccaggctggcaccgcgctgctggctcctttcccaacacagagggtgtgctccaaccccccctgtgagacccacgagacgggcaccactcacacggccaccactgtcacttccaacatgagttcaaaccaagaccccccacctgctgccagcgatcagggagaggtggagagcacccagggcgacagcgtgaacatcaccagctccagtgccatcacgacaaccgtgtcctccacactgacgcgggctgtgaccaccgtgacgcagtccacaccggtcccgggcccctctgtgccgcccccagaggaactccaggtgtcgccaggtcctcgccagcagctgccgccacggcagcttctgcagtcggcttccacagccctgatgggggagtccgccgaggtcctgtcagcctcccagacccctgagctcccggccgccgtggatctgagcagcacaggggagccatcttcgggccaggagtctgccggctctgcggtggtggccactgtggtggtccagccacccccacccacacagtccgaagtagaccagttatcacttccccaagagctaatggccgaggcccaagctggcaccaccaccctcatggtaacggggctcacccccgaggagctggcagtgacggctgctgcagaagcagctgcccaggccgcagccacggaggaagcccaggccctggccatccaggcggtgctccaggccgcgcagcaggccgtcatgggcaccggcgagcccatggacacctccgaggcagcagcaaccgtgactcaggcggagctggggcacctgtcggccgagggtcaggagggccaggccaccaccatacccattgtgctgacacagcaggagctggctgccctggtgcagcagcagcagctgcaggaggcccaggcccagcagcagcatcaccacctccccactgaggccctggcccctgccgacagtctcaacgacccagccattgagagcaattgcctcaatgagctggccggcacggtccccagcactgtggcgctgctgccctcaacggccactgagagcctggctccatccaacacatttgtggccccccagccggttgtggtggccagcccagccaagctgcaggctgcagctaccctgaccgaagtggccaatggcatcgagtccctgggtgtgaagccagacctgccgcccccacccagcaaagcccccatgaagaaggaaaaccagtggtttgatgtgggagtcattaagggcaccaatgtaatggtgacacactatttcctgccaccagatgatgctgtcccatcagacgatgatttgggcaccgtccctgactataaccagctgaagaagcaggagctgcagccaggcacagcctataagtttcgtgttgccggaatcaatgcctgtggccgggggcccttcagcgaaatctcagcctttaagacgtgcctgcctggtttcccaggggccccttgtgccattaaaatcagcaaaagtccggatggtgctcacctcacctgggagccaccctctgtgacctccggcaagattatcgagtactccgtgtacctggccatccagagctcacaggctgggggcgagctcaagagctccaccccggcccagctggccttcatgcgggtgtactgcgggcccagcccctcctgcctggtgcagtcctccagcctttccaacgcccacatcgactacaccaccaagcccgccatcatcttccgcatcgccgcccgcaatgagaagggctatggcccggccacacaagtgaggtggctgcaggaaaccagtaaagacagctctggcaccaagccagccaacaagcggcccatgtcctctccagaaatgaaatctgctccaaagaaatctaaggccgatggtcagtgagaggaagctgactagcccctggattcttctccagacccccctgcttcaggaacacccgccagggcccacccctcccaccccgtcccagcattcgcacttcaccctcgcgagccgctgttcactcctctcccctttctctttctctctgtttttaaaataatctaaagaaagcacattttaccattgctgttgggaggaagcagaggcagatgggaaagcagagagaggagcgcgcttcctttcctccccgctgccgcccaccctggggagagacttttgcggggagggaaggcggagctgaggacagccagctccgccctcccaaggctgtgcgttcctgagggccaggtcgggggcaggcatggaggggaggaaaggcgtccctcttggccctccccagagtggctttcctggcaccctggcctgggtgtctggttctgttttcttttcttccccttgtgtttccagtcacctaacttcccttcctcaggctcccccggcccaccctgctcagtgaccccacaggaagcttacacattttctcagaggcctttgtgctcccacctcttctaccctccccctcttctttcccattttaaaaaagaaaagaaggaaaaagaaaaaaggggcaaggagccccgcggcggcctgggcagcgcctgtgcagacctccctgcaggccgcactgccaactgctgcatttgttgtgttttttaggttgcaattggtgaagttcacactttcattgtaattttagcgtgtggggttttgtcccttttttgttgttgttagctgtgtacagaatgtgtaatcttttttcttttctcttttttttgttttgttttgttttgtttttgtttttttacttttttcttcttggctaattcttggcagggatctttctggaggaaaagctggggccagccagggcaggagaggtgtgaaatctgccacgaggggcctgctgtttgccacccagcccaacttcctgttgctggcccctgccctctgcccttttgcctgtcctcaggccgctggaacaaaggaaggacagctcattcctcatgggcgatcactccgcatctatagggtcgagcctaggggagcttgagggagggctggggcctccttgtcctggatttccagctctccccatgccccctccctgagcaccaccggcaccgcctcccaaacagggctgctggtttccgcagccactgctccacctcccccaaatcgtcatggaaagggtggagaatggaggggaaccaggcgtccttggaggcagcttgggagggtgactgtgtagtgtcacccacaagggaggctagggcaatggagcaggccaccagcagcagctgtgcagcatggaactcaggccaggctccgaggctgggggatctgcttggagttttctgccccccaccccaaacttctgtcgaggagcaaggcttgccagcaagtcagaaggatttgaaccgagcagccaatctttccagccctcccctaccgacctctgcctggagacgcagcagcctgtgtcctccagggcctctggtttgttgtattatagtatatttcgctgtggaaaatgtcacgtttagtcaccttggagcccactcacctggtcctgttgttttaccccatcccttctctcgcgcgcctattgatttgtttctgaggagagtacaccgttcactattgtagagtaacccctgtgactcaatattaccatagtgcgatgtcgttttgtgctattttgaacaattaaaagactttttttg

SEQ ID NO: 13957 - DNA, 8375 bp, Homo sapiens
  source 1..8375: mol_type = unassigned DNA
aggcggctcaagatggcggctcccagggcctcccgcccgagcttgtaagcgggagcgcccggacaagtagtcggggcgacgggactcagcggcctccagcttcttgagcctaggcgctcgacagtttcgggcggctcttgcggagacggggtgagcgagaagaaagggaagagccaaagggaaggagggcagttaagatggcggcctccatggagtcgtctaccgctgtgtgagaaaccgcttctccgtgagagctgccttagacgaaagggggtgtgtgaaaggaattgaggggctcccttcccgcttgttgacttctccccaccgcaccctttcccggaactatggcttcggccgtgtcgcccgccaacttgccagcggtgcttctgcagccccgctggaagcgagtggtgggctggtcgggtccggtgccacggccccgccacggccaccgcgccgtggccatcaaggagctcatcgtggtgtttggcggcggcaacgagggaatagtggacgaactgcacgtgtacaacacggcaaccaaccagtggttcatcccagccgtgaggggggacattccccctgggtgtgcagcctatggcttcgtgtgtgacgggactcgcctcctggtgtttggtgggatggtggagtatgggaaatacagcaatgacctctacgaactccaggcgagccggtgggagtggaagagactcaaagcaaagacgcccaaaaacgggccccctccgtgtcctcgactcgggcacagcttctcccttgtgggcaacaaatgctacctgtttgggggtctggccaatgatagcgaggacccaaagaacaacattccaaggtacctgaatgacttatatatcctggaattacggccaggctctggagtggtagcctgggacattcccatcacttacggggtcctaccaccaccccgggagtcacatactgccgtggtctacaccgaaaaagacaataagaagtccaagctggtgatctacggcgggatgagtggctgcaggctgggggacctgtggaccctagatattgacaccctgacgtggaataagcccagtctcagcggggtggcgcctcttcctcgcagtctccactcggcaaccaccatcggaaataaaatgtacgtgtttggtggctgggtgcctctcgtcatggatgacgtcaaagtggccacacacgagaaggagtggaagtgtaccaacacgctggcttgtctcaacctggataccatggcctgggagaccatcctgatggatacactggaggacaacatcccccgtgctcgggctggccactgcgcagtcgccatcaacacccgcctgtacatttggagtgggcgtgacggctaccgcaaggcctggaacaaccaggtctgctgcaaggacctctggtacctagagacagaaaagccaccacccccagcccgagtacaactggtacgcgccaacaccaactccctggaggtgagctggggggcagtggcaacagccgacagctaccttctccagctccagaaatatgacattcctgccacggctgctactgccacctcccctacacccaatccggtcccatctgtgcctgccaaccctcccaagagccctgccccagcagcagccgcacctgctgtgcagccgctgacccaagtaggcatcacgctcctgccccaggctgcccccgcacccccgaccaccaccaccatccaggtcttgccaacggtgcctggcagctccatttctgtgcccaccgcagccaggactcaaggtgtccctgctgttctcaaagtgaccggtcctcaggctacaacaggaactccattggtcaccatgcgacctgccagccaggctgggaaagcccctgtcaccgtgacctcccttcccgccggagtgcggatggttgtgccaacacagagtgcccagggaacggtgattggcagtagcccacagatgagtgggatggccgcactggccgctgcggccgctgccacccagaagatccccccttcctcggcacccacggtgctgagtgtcccagcgggtaccaccatcgtgaagaccatggctgtgacacctggcactaccaccctcccagccactgtgaaggtggcctcctcgccagtcatggtgagcaaccctgccactcgcatgctgaagactgcagccgcccaggtggggacatcggtttcctccgccaccaacacgtctacccgccctatcatcacagtgcacaagtcaggcactgtgacagtggcccagcaagcccaggtggtgaccacagttgtgggcggggtcaccaagaccatcaccctggtgaagagccccatctctgtcccaggaggcagtgctctgatttccaatctgggcaaagtgatgtcggtggtccagaccaaaccagttcagacttcagcagtcacaggccaggcgtccacgggtcctgtgactcagatcatccagaccaaagggcccctgccagcgggaacaatcctgaagctggtgacctcagcagatggcaagcccaccaccatcatcactaccacgcaggccagtggggcggggaccaagcccaccatcctgggcatcagcagcgtctcccccagtaccaccaagcccggcacgaccaccatcatcaaaaccatccccatgtcggccatcatcacccaggcgggcgccacgggtgtgaccagcagtcctggcatcaagtcccccatcaccatcatcaccaccaaggtgatgacttcaggaactggagcacctgcgaaaatcatcactgctgtccccaaaattgccactggccacgggcagcagggagtgacccaggtggtgcttaagggggccccgggacagccaggcaccatcctccgcactgtgcccatggggggtgttcgcctggtcacacccgtcaccgtctccgccgtcaagccagccgtcaccacgttggttgtgaaaggcaccacaggtgtcacgaccctaggcacagtgacaggcaccgtctccaccagccttgccggggcggggggccacagcactagtgcttccctggccacgcccatcaccaccttgggcaccattgccaccctctcaagccaggtgatcaaccccactgccatcactgtgtcggccgcacagaccacgctgacagcggcaggcgggctcacaaccccaaccatcaccatgcagcccgtgtcccagcccacccaggtaactctgatcacggcacctagtggggtggaggcccagcctgtgcatgacctccctgtgtccattctggcctccccgactacagaacagcccaccgccacagttaccatcgccgactcaggccagggtgatgtgcagcctggcactgtcaccttggtgtgctccaacccaccctgtgagacccacgagactggcaccaccaacacggccaccactactgttgtggctaaccttgggggacacccccagcccacccaagtgcagttcgtctgtgacagacaggaggcagctgcttctcttgtgacctcgactgtgggccagcagaatggtagcgtggtccgagtctgttcgaacccgccctgcgagacccacgagacgggcaccaccaacaccgccaccaccgccacctccaacatggccgggcagcatggctgctcaaacccaccctgcgagacccacgagacgggcaccaccaacactgccactacagccatgtcgagcgtcggcgccaaccaccagcgagatgcccgtcgggcctgtgcagctggcacccctgccgtgatccggatcagtgtggccactggggcgctggaggcagcccagggctctaagtcccagtgccaaacccgccagaccagcgcgaccagcaccaccatgactgtgatggccaccggggccccgtgctcggccggcccactccttgggccgagcatggcacgggagcccgggggccgcagccctgcttttgtgcagttggcccctctgagcagcaaagtcaggctgagcagcccaagcattaaggaccttcctgcggggcgccacagccatgcggtcagcaccgctgccatgacccgttccagcgtgggtgctggggagccccgcatggcacctgtgtgcgagagcctccagggtggctcgcccagcaccacagtgactgtgacagccctggaggcactgctgtgcccctcggccaccgtgacccaagtctgctccaacccaccatgtgagacccacgagacaggcaccaccaacaccgccactacctcgaatgcaggcagcgcccagagggtgtgctccaacccgccatgcgagacccacgagacgggcaccacccacacggccaccaccgctacttcaaacgggggcacgggccagcccgagggtgggcagcagccccctgctggtcgcccctgtgagacacaccagaccacttccactggcaccaccatgtcggtcagcgtgggtgccctgcttcccgacgccacttcttcccacaggaccgtggagtctggcctagaggtggcggcggcacccagcgtcaccccccaggctggcaccgcgctgctggctcctttcccaacacagagggtgtgctccaaccccccctgtgagacccacgagacgggcaccactcacacggccaccactgtcacttccaacatgagttcaaaccaagaccccccacctgctgccagcgatcagggagaggtggagagcacccagggcgacagcgtgaacatcaccagctccagtgccatcacgacaaccgtgtcctccacactgacgcgggctgtgaccaccgtgacgcagtccacaccggtcccgggcccctctgtgccgaagatctcatcaatgactgagactgccccaagggctctgactactgaagtccccatcccggccaaaataacagtgaccatagccaacacagaaacttctgacatgcccttctctgctgttgacatcctgcagcccccagaggaactccaggtgtcgccaggtcctcgccagcagctgccgccacggcagcttctgcagtcggcttccacagccctgatgggggagtccgccgaggtcctgtcagcctcccagacccctgagctcccggccgccgtggatctgagcagcacaggggagccatcttcgggccaggagtctgccggctctgcggtggtggccactgtggtggtccagccacccccacccacacagtccgaagtagaccagttatcacttccccaagagctaatggccgaggcccaagctggcaccaccaccctcatggtaacggggctcacccccgaggagctggcagtgacggctgctgcagaagcagctgcccaggccgcagccacggaggaagcccaggccctggccatccaggcggtgctccaggccgcgcagcaggccgtcatggcaggcaccggcgagcccatggacacctccgaggcagcagcaaccgtgactcaggcggagctggggcacctgtcggccgagggtcaggagggccaggccaccaccatacccattgtgctgacacagcaggagctggctgccctggtgcagcagcagcagctgcaggaggcccaggcccagcagcagcatcaccacctccccactgaggccctggcccctgccgacagtctcaacgacccagccattgagagcaattgcctcaatgagctggccggcacggtccccagcactgtggcgctgctgccctcaacggccactgagagcctggctccatccaacacatttgtggccccccagccggttgtggtggccagcccagccaagctgcaggctgcagctaccctgaccgaagtggccaatggcatcgagtccctgggtgtgaagccagacctgccgcccccacccagcaaagcccccatgaagaaggaaaaccagtggtttgatgtgggagtcattaagggcaccaatgtaatggtgacacactatttcctgccaccagatgatgctgtcccatcagacgatgatttgggcaccgtccctgactataaccagctgaagaagcaggagctgcagccaggcacagcctataagtttcgtgttgccggaatcaatgcctgtggccgggggcccttcagcgaaatctcagcctttaagacgtgcctgcctggtttcccaggggccccttgtgccattaaaatcagcaaaagtccggatggtgctcacctcacctgggagccaccctctgtgacctccggcaagattatcgagtactccgtgtacctggccatccagagctcacaggctgggggcgagctcaagagctccaccccggcccagctggccttcatgcgggtgtactgcgggcccagcccctcctgcctggtgcagtcctccagcctttccaacgcccacatcgactacaccaccaagcccgccatcatcttccgcatcgccgcccgcaatgagaagggctatggcccggccacacaagtgaggtggctgcaggaaaccagtaaagacagctctggcaccaagccagccaacaagcggcccatgtcctctccagaaatgaaatctgctccaaagaaatctaaggccgatggtcagtgagaggaagctgactagcccctggattcttctccagacccccctgcttcaggaacacccgccagggcccacccctcccaccccgtcccagcattcgcacttcaccctcgcgagccgctgttcactcctctcccctttctctttctctctgtttttaaaataatctaaagaaagcacattttaccattgctgttgggaggaagcagaggcagatgggaaagcagagagaggagcgcgcttcctttcctccccgctgccgcccaccctggggagagacttttgcggggagggaaggcggagctgaggacagccagctccgccctcccaaggctgtgcgttcctgagggccaggtcgggggcaggcatggaggggaggaaaggcgtccctcttggccctccccagagtggctttcctggcaccctggcctgggtgtctggttctgttttcttttcttccccttgtgtttccagtcacctaacttcccttcctcaggctcccccggcccaccctgctcagtgaccccacaggaagcttacacattttctcagaggcctttgtgctcccacctcttctaccctccccctcttctttcccattttaaaaaagaaaagaaggaaaaagaaaaaaggggcaaggagccccgcggcggcctgggcagcgcctgtgcagacctccctgcaggccgcactgccaactgctgcatttgttgtgttttttaggttgcaattggtgaagttcacactttcattgtaattttagcgtgtggggttttgtcccttttttgttgttgttagctgtgtacagaatgtgtaatcttttttcttttctcttttttttgttttgttttgttttgtttttgtttttttacttttttcttcttggctaattcttggcagggatctttctggaggaaaagctggggccagccagggcaggagaggtgtgaaatctgccacgaggggcctgctgtttgccacccagcccaacttcctgttgctggcccctgccctctgcccttttgcctgtcctcaggccgctggaacaaaggaaggacagctcattcctcatgggcgatcactccgcatctatagggtcgagcctaggggagcttgagggagggctggggcctccttgtcctggatttccagctctccccatgccccctccctgagcaccaccggcaccgcctcccaaacagggctgctggtttccgcagccactgctccacctcccccaaatcgtcatggaaagggtggagaatggaggggaaccaggcgtccttggaggcagcttgggagggtgactgtgtagtgtcacccacaagggaggctagggcaatggagcaggccaccagcagcagctgtgcagcatggaactcaggccaggctccgaggctgggggatctgcttggagttttctgccccccaccccaaacttctgtcgaggagcaaggcttgccagcaagtcagaaggatttgaaccgagcagccaatctttccagccctcccctaccgacctctgcctggagacgcagcagcctgtgtcctccagggcctctggtttgttgtattatagtatatttcgctgtggaaaatgtcacgtttagtcaccttggagcccactcacctggtcctgttgttttaccccatcccttctctcgcgcgcctattgatttgtttctgaggagagtacaccgttcactattgtagagtaacccctgtgactcaatattaccatagtgcgatgtcgttttgtgctattttgaacaattaaaagactttttttgaaat

SEQ ID NO: 13958 - DNA, 4071 bp, Homo sapiens
  source 1..4071: mol_type = unassigned DNA
cacgtgaccccagcacagctggaggcgggtccccgccctccccagggagcagccggttgaggcgggagcggtgcattgtgggcagaggggcgggggttgggaagatggcggctcccagcctcctcaactggaggcgagtttcttccttcacggggccggtcccccgcgcccggcacggacaccgagcggtggccatccgggagctgatgatcatctttggagggggaaatgagggcatcgcggatgagctgcacgtctacaacacggctacgaatcagtggtttctgccagctgttagaggagatatccctccaggctgtgctgcccatggatttgtctgtgatggtaccagaatattagtatttgggggaatggttgaatatggaagatacagcaatgagttatatgagttacaagcaagtcgttggttatggaaaaaagtgaaaccccatccccctccttctggtttacctccttgtcctcggcttggacatagcttctctttatatggtaacaaatgctatttgtttggtggcctggcaaacgaaagcgaagattcaaacaataatgttcccagatatttaaatgatttttatgagttggagctacagcatggctctggtgttgtgggttggagcattccagtgactaaaggggttgtgccttctccaagagaatcccacacagctgttatatattgcaaaaaagattctggaagtcctaaaatgtatgtttttggtggaatgtgtggtgctcgcctggatgacctatggcagcttgacttagaaactatgtcatggtcaaaaccagaaactaaagggacagtgccacttccacgaagccttcatacagccagtgttataggaaacaagatgtacatttttggtggatgggtcccacataagggggaaaatactgagacttcacctcatgattgtgaatggagatgtaccagttcattttcttacctaaatctggatacaacagagtggaccaccctagtatcagattctcaggaagataaaaaaaattcaagaccaagaccaagagctggccactgtgctgttgcaatcggcactcgattgtatttttggagtggaagagatggctacaaaaaagcactgaatagtcaagtttgctgcaaggatctttggtatcttgatactgagaaaccaccggcaccatctcaagtacagctgatcaaagccactaccaactcctttcatgtcaagtgggatgaagtgtctacagttgagggctatcttttgcagttgagtacagacttgccataccaagctgcatcatcagattcttcagcagcaccaaatatgcaaggagtcaggatggaccctcacagacaaggcagtaataacatcgttcctaacagtatcaatgatacaataaacagcacaaaaactgaacagccagccacaaaagaaacttcaatgaaaaacaaaccagactttaaagcactgacggattctaatgccattttatatccatctttggcatcaaatgcttctaatcataatagtcatgtggtggatatgctaaggaaaaatgaaggtcctcacacttcagcaaatgtaggtgttctaagtagttgcctggatgtaagaacagtaattcctgaaacatctgtatccagtactgtttccagcacacaaactatggtaacccagcagaccattaaaactgaatcatccagtacaaatggggcagttgttaaagatgaaacttcactaacaacattcagtaccaaatctgaagttgatgaaacatatgcactgcctgcaacgaagatcagccgtgtagagacacatgctacagcaacgccgttttctaaagagactccttcaaatccagtggccacagtgaaagcgggagaacgacaatggtgtgatgtgggaatttttaaaaataatacagctttggtgagccagttttatttgctgccaaaagggaagcaaagcatctcaaaggtaggaaatgcagatgtacctgactacagcttgcttaagaaacaagatcttgttccaggcacaggatacagattcagggttgctgcaatcaatggttgtgggataggtcctttcagcaaaatcagtgaatttaaaacttgtattcctggttttcctggagctccttctgcagtcagaatttcaaagaatgttgaaggtatccacctttcctgggaacctccaacctcaccttctggaaatattttggaatattcagcctacttggctatccgcacagcacagatacaagataatccaagtcaacttgtgttcatgaggatttattgtggtcttaagacatcatgtatagtaactgctgggcaacttgcaaatgcacatattgattatacatccaggcctgccattgtgttcaggatatcagcaaagaatgaaaagggatatggaccagctacacaagttcggtggcttcaaggtaacaataagaaagcacctttaaattgaattggtttttttactgaagctattgtgatgatgattatttattagtaactggttatgaagatttgtcatttaaaagagtattctctggctgtatttccagcagttatgaacttgagtttgtaaattgttcttaaaatgtatttgctgaattatagatccaaataaaagaaaagaagcaaagactctctgaaaattagtatatgagttcttccttacagatatagctcttttataaagaaaaacagtgaaattaagataaaagctagaaagctttattaccccaatatcttttataagggctgtgtaacccagtcatcctagagttattgagatgattctggtaactggctgttgtatactatgctgtcttatatagtaaatgttctctacattgtaaatgtcctacctttgagtactccttctatctttattctatatgagcagtgttcctctaacaactgtcttctattggataatatgtgtgatactataataattctaatagttatttgattcctttctttgtttacagttagcacagagcttaagaaattaaaaaagaggcaagtttagaaactgcttttgaacttttattattttccaagaatcatggtaaaatacaacaagaacaatgagttttcttgattcttaccaggccaatatatttgaatatatttttggccaaagcacttaacttatctggccctcattttcctcataacagatgagggagttaaagcagtttatcttttaggtccctttcagcactaaggttttgtgtttttagtagaagtgaagtatgtccctgaacattttcatctgtcttaatggctctaattttgcttttgctaaaattaaaatcttcataattgaattcaaaattaaagtatatgtcctcctattggagaaaaaaacaagcaccttaacaggacacaagttttaaaatagtgttttaaacatttgtaagatttttgtaaatgctctaaatgttttatttttgcattgtttttaccttgaaattgtataaacttttttactatgaaaatataagcattagacagctaactcaggttccattacaaccttaaagatacagataggcattataaacactctgctacaggtaacttgttttaaaccttttaggaatttcatggttccactgcctatttaaatctggaattaatatacagagcaataattgcagaaaagatatttcaaactaagagcttcaataactgcaggggcacaggtctatctttttttataccacataaccttatgccagtttaggttgactgagtagctatgtcctcaaatttcatgtatgataccccccagcaaagatggatttaattgtgcagaattgatatatatgtgtgttccagttactaatttaaagtgtatagaatattttaatatataatttttgtaaagaactgggatttttatactacagtatttgtaattaatgtgtctcactaattaagtttctcttgaagaaaatatgcaaattgttagacacataatgagtggtttccaaactctaaagataaaataaatgcactactatggtgttgttagaata

SEQ ID NO: 13959 - DNA, 1066 bp, Homo sapiens
  source 1..1066: mol_type = unassigned DNA
cgggcgggcgggcgggcgaagctgggctcggggccaagcgaggtctagccggagcgactgtgccccgcctcctgggcggagcgggcggctccccatggtcagagcctcgtgccggctcggcagcgcccggacgccgagcccagcgcgtcggccccccggcgtgcgggcgtctcagagccgcggaggggccgccgggaccgtttcagcgtggcggcgctggtgctggcgttggccctggaggacggccccgagtgatggctggcgcctgcctcccgggtgtctcccgggtacagatggagtcgtcccgcggccgccggcggcaaggtcggcagctgcgaggccaagagagaccccaggacacacacagctgcctcccggtgcgagaagaagaccccggcttgagagtgagatggcgtttaatgattgcttcagtttgaactaccctggcaacccctgcccaggggacttgatcgaagtgttccgtcctggctatcagcactgggccctgtacttgggtgatggttacgttatcaacatagcacctgtagatggcattcctgcgtcctttacaagcgccaagtctgtattcagcagtaaggccctggtgaaaatgcagctcttgaaggatgttgtgggaaatgacacatacagaataaacaataaatacgatgaaacgtacccccctctccctgtggaagaaatcataaagcggtcagagtttgtaattggacaggaggtggcctataacttacttgtcaacaactgtgaacattttgtgacattgcttcgctatggagaaggagtttcagagcaggccaaccgagcgataagtaccgttgagtttgtgacagctgctgttggtgtcttctcattcctgggcttgtttccaaaaggacaaagagcaaaatactattaacaatttaccaaagagatattgatattgaaggaatttgggaggaggaaaagaaacctggggtgaatacttattttcagtgcatcattactgttccagattcctatgatggatggcagactctttaataaattgcttactgatattatctta

SEQ ID NO: 13960 - DNA, 742 bp, Homo sapiens
  source 1..742: mol_type = unassigned DNA
agctaatttaaggctggacacagagtcagcaacacacaagacatcatcttgaaggaaggatggctttggccagaccaagaccgagacttggagacctgattgagatttctcgctttggctatgcacactgggccatctacgtgggagatggctatgtggtccatctggctccggcaagtgaaattgctggagctggtgcggccagtgtcctgtctgccctgaccaacaaagccatagtgaagaaggaactgctgtctgtggtggctgggggagacaactacagggtcaataacaagcacgatgacagatacacaccactgccttccaacaaaatcgtcaagcgggcagaggagttggtggggcaggagttgccttattcgctgaccagtgacaactgcgagcacttcgtgaaccatctgcgctatggcgtctcccgcagtgaccaggtcactggtgcagtcacgacagtaggtgtggcagcaggcctgctggctgccgcaagccttgtggggatcctgctggccagaagcaagcgggaaaggcaataaatccaagaaattgtcccaacaaccaccaattcttacggaggaatattatttagccagcaggagtggagtttggtttactgattttactgttttgtgttcatgaatctttattttaatggagttaaaagcacaggaaaatgtatttggaaatgcagcttagtatgaattctattaaagacacaattgggctctgc

SEQ ID NO: 13961 - DNA, 1114 bp, Homo sapiens
  source 1..1114: mol_type = unassigned DNA
gtctggttagacgctctctttgcttttccccacgagtgaccacggctagataggccgccggccagatgtggcgggggagagccggggctttgctccgggtgtgggggttttggccgacaggggttcccagaaggagaccgctaagctgcgatgctgcgtcgcaggcgggaagcaattatccccgctgttggaactgcggcggcccatggggccccgggcgggaggacaggttcttctgcccacagtgccgagcgctgcaggcacctgaccccactcgagactacttcagccttatggactgcaaccgttccttcagagttgatacagcgaagctccagcacaggtaccagcaactgcagcgtcttgtccacccagatttcttcagccagaggtctcagactgaaaaggacttctcagagaagcattcgaccctggtgaatgatgcctataagaccctcctggcccccctgagcagaggactgtaccttctaaagctccatggaatagagattcctgaaaggacagattatgaaatggacaggcaattcctcatagaaataatggaaatcaatgaaaaactcgcagaagctgaaagtgaagctgccatgaaagagattgaatccattgtcaaagctaaacagaaagaatttactgacaatgtgagcagtgcttttgaacaagatgactttgaagaagccaaggaaattttgacaaagatgagatacttttcaaatatagaagaaaagatcaagttaaagaagattcccctttaattgtggatagtttaaagtttaaaaaataaagttcttgctgggcacagtggctcacacctgtaatcccagcactttgggaggctgaggtgggtggatgacaaggtcaggagttcaagaccagcttggccaacatagtgaaaccccgtctctgctgaaaatacaaaaattagccgggcatggtggcgcgtgcctgtaatcccagctacttggtaggccgaggcaggagaatcgcttaaacccgtgaggtggaggttgcagtgagcagagatcacgcaactgcactccagcttgggcaacagagtgagacttaatcttgaaaaataaataaatgaaaaataaaa

SEQ ID NO: 13962 - DNA, 1798 bp, Homo sapiens
  source 1..1798: mol_type = unassigned DNA
gcaaaagtatcgggggcgggactcgctgaggtgcgaaaactgggccaggggcagggctttgaccagctacttgagcgtgaaggggcggcgcccgcacgaaggggcgtcccagcttggaggcggggcccggatgggaggggcggggccgagtgcagtatcccgccagatggcggcgcccagcagagtcaggtgcggacgactttgtctgtaggagcagcggcggcttgaggacccggggagaccctcaagaatcgacccatcaggacgccagagctgcttcagcggtgaccaccttctccctctaacacattcttcccttcttcacaaacggcccatgtcagacgaaggctcaagggggagccgcctgcccctggcgctgcccccggcctcccagggttgctcttcagggggcggcggcggcggctcctcggctgggggctcgggcaattcccggcccccacgcaacctccaaggcttgctgcagatggccatcaccgcgggctctgaagagccagaccctcctccagaaccgatgagtgaggagaggcgtcagtggctgcaggaggccatgtcggctgccttccgaggccagcgggaggaggtggagcagatgaagagctgcctccgagtgctgtcacagcccatgccccccactgctggggaggccgagcaggcggccgaccagcaagagcgagagggggccctggagctgctggccgacctgtgtgagaacatggacaatgccgcagacttctgccagctgtctggcatgcacctgctggtgggccggtacctggaggcgggggctgcgggactgcggtggcgggcggcacagctcatcggcacgtgcagtcagaacgtggcagccatccaggagcaggtgctgggcctgggtgccctgcgtaagctgctgcggctgctggaccgcgacgcctgcgacacggtgcgcgtcaaggccctcttcgccatctcctgtctggtccgagagcaggaggctgggctgctgcagttcctccgcctggacggcttctctgtgttgatgagggccatgcagcagcaggtgcagaagctcaaggtcaaatcagcattcctgctgcagaacctgctggtgggccaccctgaacacaaagggaccctgtgctccatggggatggtccagcagctggtggccctggtgcggacagagcacagccccttccacgagcacgtgcttggagccctgtgcagcctggtgacagactttccgcagggtgtgcgcgagtgtcgggagccggaactgggcctggaggagctcctccgccaccgctgtcagctgctgcagcagcatgaggagtaccaggaggagctggagttctgtgaaaagctgctacagacctgtttctccagcccagcggacgacagcatggatcggtgaaaccaggtggcttcttgcccccttctccgtgggaaccccaggcctcttgcctccctccccacctacaaggccctctcccaagggatcgcagggcctaggtgcctggacccagggtgtgccagcccgtctctgtgcagtccctggaaggggcgctgagaaaggcaccagctccttggaccccacctcccatgctctcactctcatccccgttctcttgtccacacagctcttccaataaaggtgtttctcttcctccttctcctccttcactgccgcctttgtcatctcctttggagggtgcatgggggacgggaggaggggcacgggtttaagggacttggggagccactggaagaataataaaagtgttgctctttatcatct

SEQ ID NO: 13963 - DNA, 1197 bp, Homo sapiens
  source 1..1197: mol_type = unassigned DNA
aagatggcggcgcccagcagagtcaggtgcggacgactttgtctgtaggagcagcggcggcttgaggacccggggagaccctcaagaatcgacccatcaggacgccagagctgcttcagcggtgaccaccttctccctctaacacattcttcccttcttcacaaacggcccatgtcagacgaaggctcaagggggagccgcctgcccctggcgctgcccccggcctcccagggttgctcttcagggggcggcggcggcggctcctcggctgggggctcgggcaattcccggcccccacgcaacctccaaggcttgctgcagatggccatcaccgcgggctctgaagagccagaccctcctccagaaccgatgagtgaggagaggcgtcagtggctgcaggaggccatgtcggctgccttccgaggccagcgggaggaggtggagcagatgaagagctgcctccgagtgctgtcacagcccatgccccccactgctggggaggccgagcaggcggccgaccagcaagagcgagagggggccctggagctgctggccgacctgtgtgagaacatggacaatgccgcagacttctgccagctgtctggcatgcacctgctggtgggccggtacctggaggcgggggctgcgggactgcggtggcgggcggcacagctcatcggcacgtgcagtcagaacgtggcagccatccaggagcaggtgctgggcctgggtgccctgcgtaagctgctgcggctgctggaccgcgacgcctgcgacacgggtgtgcgcgagtgtcgggagccggaactgggcctggaggagctcctccgccaccgctgtcagctgctgcagcagcatgaggagtaccaggaggagctggagttctgtgaaaagctgctacagacctgtttctccagcccagcggacgacagcatggatcggtgaaaccaggtggcttcttgcccccttctccgtgggaaccccaggcctcttgcctccctccccacctacaaggccctctcccaagggatcgcagggcctaggtgcctggacccagggtgtgccagcccgtctctgtgcagtccctggaaggggcgctgagaaaggcaccagctccttggaccccacctcccatgctctcactctcatccccgttctcttgtccacacagctcttccaataaaggtgtttctcttc

SEQ ID NO: 13964 - DNA, 1907 bp, Homo sapiens
  source 1..1907: mol_type = unassigned DNA
gcaaaagtatcgggggcgggactcgctgaggtgcgaaaactgggccaggggcagggctttgaccagctacttgagcgtgaaggggcggcgcccgcacgaaggggcgtcccagcttggaggcggggcccggatgggaggggcggggccgagtgcagtatcccgccaggtgagaaggggataagagtcgggcaagcagcttcagccgcaaccacggcacgaagttgggtgggtacgcctggcacttccgggtgaaaccgtgcgtatttccggttaagatggcggcgcccagcagagtcaggtgcggacgactttgtctgtaggagcagcggcggcttgaggacccggggagaccctcaagaatcgacccatcaggacgccagagctgcttcagcggtgaccaccttctccctctaacacattcttcccttcttcacaaacggcccatgtcagacgaaggctcaagggggagccgcctgcccctggcgctgcccccggcctcccagggttgctcttcagggggcggcggcggcggctcctcggctgggggctcgggcaattcccggcccccacgcaacctccaaggcttgctgcagatggccatcaccgcgggctctgaagagccagaccctcctccagaaccgatgagtgaggagaggcgtcagtggctgcaggaggccatgtcggctgccttccgaggccagcgggaggaggtggagcagatgaagagctgcctccgagtgctgtcacagcccatgccccccactgctggggaggccgagcaggcggccgaccagcaagagcgagagggggccctggagctgctggccgacctgtgtgagaacatggacaatgccgcagacttctgccagctgtctggcatgcacctgctggtgggccggtacctggaggcgggggctgcgggactgcggtggcgggcggcacagctcatcggcacgtgcagtcagaacgtggcagccatccaggagcaggtgctgggcctgggtgccctgcgtaagctgctgcggctgctggaccgcgacgcctgcgacacggtgcgcgtcaaggccctcttcgccatctcctgtctggtccgagagcaggaggctgggctgctgcagttcctccgcctggacggcttctctgtgttgatgagggccatgcagcagcaggtgcagaagctcaaggtcaaatcagcattcctgctgcagaacctgctggtgggccaccctgaacacaaagggaccctgtgctccatggggatggtccagcagctggtggccctggtgcggacagagcacagccccttccacgagcacgtgcttggagccctgtgcagcctggtgacagactttccgcagggtgtgcgcgagtgtcgggagccggaactgggcctggaggagctcctccgccaccgctgtcagctgctgcagcagcatgaggagtaccaggaggagctggagttctgtgaaaagctgctacagacctgtttctccagcccagcggacgacagcatggatcggtgaaaccaggtggcttcttgcccccttctccgtgggaaccccaggcctcttgcctccctccccacctacaaggccctctcccaagggatcgcagggcctaggtgcctggacccagggtgtgccagcccgtctctgtgcagtccctggaaggggcgctgagaaaggcaccagctccttggaccccacctcccatgctctcactctcatccccgttctcttgtccacacagctcttccaataaaggtgtttctcttcctccttctcctccttcactgccgcctttgtcatctcctttggagggtgcatgggggacgggaggaggggcacgggtttaagggacttggggagccactggaagaataataaaagtgttgctctttatcatct

SEQ ID NO: 13965 - DNA, 2120 bp, Homo sapiens
  source 1..2120: mol_type = unassigned DNA
caatgggctgggccgcgcggccgcgcgcactcgcacccgctgcccccgaggccctcctgcactctccccggcgccgctctccggccctcgccctgtccgccgccaccgccgccgccgccagagtcgccatgcagatcccgcgcgccgctcttctcccgctgctgctgctgctgctggcggcgcccgcctcggcgcagctgtcccgggccggccgctcggcgcctttggccgccgggtgcccagaccgctgcgagccggcgcgctgcccgccgcagccggagcactgcgagggcggccgggcccgggacgcgtgcggctgctgcgaggtgtgcggcgcgcccgagggcgccgcgtgcggcctgcaggagggcccgtgcggcgaggggctgcagtgcgtggtgcccttcggggtgccagcctcggccacggtgcggcggcgcgcgcaggccggcctctgtgtgtgcgccagcagcgagccggtgtgcggcagcgacgccaacacctacgccaacctgtgccagctgcgcgccgccagccgccgctccgagaggctgcaccggccgccggtcatcgtcctgcagcgcggagcctgcggccaagggcaggaagatcccaacagtttgcgccataaatataactttatcgcggacgtggtggagaagatcgcccctgccgtggttcatatcgaattgtttcgcaagcttccgttttctaaacgagaggtgccggtggctagtgggtctgggtttattgtgtcggaagatggactgatcgtgacaaatgcccacgtggtgaccaacaagcaccgggtcaaagttgagctgaagaacggtgccacttacgaagccaaaatcaaggatgtggatgagaaagcagacatcgcactcatcaaaattgaccaccagggcaagctgcctgtcctgctgcttggccgctcctcagagctgcggccgggagagttcgtggtcgccatcggaagcccgttttcccttcaaaacacagtcaccaccgggatcgtgagcaccacccagcgaggcggcaaagagctggggctccgcaactcagacatggactacatccagaccgacgccatcatcaactatggaaactcgggaggcccgttagtaaacctggacggtgaagtgattggaattaacactttgaaagtgacagctggaatctcctttgcaatcccatctgataagattaaaaagttcctcacggagtcccatgaccgacaggccaaaggaaaagccatcaccaagaagaagtatattggtatccgaatgatgtcactcacgtccagcaaagccaaagagctgaaggaccggcaccgggacttcccagacgtgatctcaggagcgtatataattgaagtaattcctgataccccagcagaagctggtggtctcaaggaaaacgacgtcataatcagcatcaatggacagtccgtggtctccgccaatgatgtcagcgacgtcattaaaagggaaagcaccctgaacatggtggtccgcaggggtaatgaagatatcatgatcacagtgattcccgaagaaattgacccataggcagaggcatgagctggacttcatgtttccctcaaagactctcccgtggatgacggatgaggactctgggctgctggaataggacactcaagacttttgactgccattttgtttgttcagtggagactccctggccaacagaatccttcttgatagtttgcaggcaaaacaaatgtaatgttgcagatccgcaggcagaagctctgcccttctgtatcctatgtatgcagtgtgctttttcttgccagcttgggccattcttgcttagacagtcagcatttgtctcctcctttaactgagtcatcatcttagtccaactaatgcagtcgatacaatgcgtagatagaagaagccccacgggagccaggatgggactggtcgtgtttgtgcttttctccaagtcagcacccaaaggtcaatgcacagagaccccgggtgggtgagcgctggcttctcaaacggccgaagttgcctcttttaggaatctctttggaattgggagcacgatgactctgagtttgagctattaaagtacttcttacacattgc

SEQ ID NO: 13966 - DNA, 1214 bp, Homo sapiens
  source 1..1214: mol_type = unassigned DNA
ggcaagctgcctgtcctgctgcttggccgctcctcagagctgcggccgggagagttcgtggtcgccatcggaagcccgttttcccttcaaaacacagtcaccaccgggatcgtgagcaccacccagcgaggcggcaaagagctggggctccgcaactcagacatggactacatccagaccgacgccatcatcaactatggaaactcgggaggcccgttagtaaacctggacggtgaagtgattggaattaacactttgaaagtgacagctggaatctcctttgcaatcccatctgataagattaaaaagttcctcacggagtcccatgaccgacaggccaaaggaaaagccatcaccaagaagaagtatattggtatccgaatgatgtcactcacgtccagcaaagccaaagagctgaaggaccggcaccgggacttcccagacgtgatctcaggagcgtatataattgaagtaattcctgataccccagcagaagctggtggtctcaaggaaaacgacgtcataatcagcatcaatggacagtccgtggtctccgccaatgatgtcagcgacgtcattaaaagggaaagcaccctgaacatggtggtccgcaggggtaatgaagatatcatgatcacagtgattcccgaagaaattgacccataggcagaggcatgagctggacttcatgtttccctcaaagactctcccgtggatgacggatgaggactctgggctgctggaataggacactcaagacttttgactgccattttgtttgttcagtggagactccctggccaacagaatccttcttgatagtttgcaggcaaaacaaatgtaatgttgcagatccgcaggcagaagctctgcccttctgtatcctatgtatgcagtgtgctttttcttgccagcttgggccattcttgcttagacagtcagcatttgtctcctcctttaactgagtcatcatcttagtccaactaatgcagtcgatacaatgcgtagatagaagaagccccacgggagccaggatgggactggtcgtgtttgtgcttttctccaagtcagcacccaaaggtcaatgcacagagaccccgggtgggtgagcgctggcttctcaaacggccgaagttgcctcttttaggaatctctttggaattgggagcacgatgactctgagtttgagctattaaagtacttcttacacattg

SEQ ID NO: 13967 - DNA, 1892 bp, Homo sapiens
  source 1..1892: mol_type = unassigned DNA
atgggctgggccgcgcggccgcgcgcactcgcacccgctgcccccgaggccctcctgcactctccccggcgccgctctccggccctcgccctgtccgccgccaccgccgccgccgccagaggcccgggacgcgtgcggctgctgcgaggtgtgcggcgcgcccgagggcgccgcgtgcggcctgcaggagggcccgtgcggcgaggggctgcagtgcgtggtgcccttcggggtgccagcctcggccacggtgcggcggcgcgcgcaggccggcctctgtgtgtgcgccagcagctgcgcgccgccagccgccgctccgagaggctgcaccggccgccggtcatcgtcctgcagcgcggagcctgcggccaagggcaggaagatcccaacagtttgcgccataaatataactttatcgcggacgtggtggagaagatcgcccctgccgtggttcatatcgaattgtttcgcaagcttccgttttctaaacgagaggtgccggtggctagtgggtctgggtttattgtgtcggaagatggactgatcgtgacaaatgcccacgtggtgaccaacaagcaccgggtcaaagttgagctgaagaacggtgccacttacgaagccaaaatcaaggatgtggatgagaaagcagacatcgcactcatcaaaattgaccaccagggcaagctgcctgtcctgctgcttggccgctcctcagagctgcggccgggagagttcgtggtcgccatcggaagcccgttttcccttcaaaacacagtcaccaccgggatcgtgagcaccacccagcgaggcggcaaagagctggggctccgcaactcagacatggactacatccagaccgacgccatcatcaactatggaaactcgggaggcccgttagtaaacctggacggtgaagtgattggaattaacactttgaaagtgacagctggaatctcctttgcaatcccatctgataagattaaaaagttcctcacggagtcccatgaccgacaggccaaaggaaaagccatcaccaagaagaagtatattggtatccgaatgatgtcactcacgtccagcaaagccaaagagctgaaggaccggcaccgggacttcccagacgtgatctcaggagcgtatataattgaagtaattcctgataccccagcagaagctggtggtctcaaggaaaacgacgtcataatcagcatcaatggacagtccgtggtctccgccaatgatgtcagcgacgtcattaaaagggaaagcaccctgaacatggtggtccgcaggggtaatgaagatatcatgatcacagtgattcccgaagaaattgacccataggcagaggcatgagctggacttcatgtttccctcaaagactctcccgtggatgacggatgaggactctgggctgctggaataggacactcaagacttttgactgccattttgtttgttcagtggagactccctggccaacagaatccttcttgatagtttgcaggcaaaacaaatgtaatgttgcagatccgcaggcagaagctctgcccttctgtatcctatgtatgcagtgtgctttttcttgccagcttgggccattcttgcttagacagtcagcatttgtctcctcctttaactgagtcatcatcttagtccaactaatgcagtcgatacaatgcgtagatagaagaagccccacgggagccaggatgggactggtcgtgtttgtgcttttctccaagtcagcacccaaaggtcaatgcacagagaccccgggtgggtgagcgctggcttctcaaacggccgaagttgcctcttttaggaatctctttggaattgggagcacgatgactctgagtttgagctattaaagtacttcttacacattg

SEQ ID NO: 13968 - DNA, 2367 bp, Homo sapiens
  source 1..2367: mol_type = unassigned DNA
tctggcagcgcgcagctgaccaggaagacgtggatcccgagaaagaggcgcaggacgaggaggcagaacccgactggcgcgtagagcagcagcacgagcagtaggaagcagtcacccggaagcctgggggcgagaggcgaagtggtcaggcgccgaaggccgagagcacgcggggatcggtctcttcccgccgggtctcttaccggtgcgagtcaaagagccgctccggccccggccctgagggaagctccataactgctgcttcaggagcgcccggccgtcgccgccgccgccattttcgcgcccggccgcaggggctcttgggaaggcggagtctttgggcatccgcccggggtgaggggacccgaagtcctgaggcgcgccggaagggctagcggtcccagcataccccgcggccccttgggccgtctcacaactcgcgtccggcggagaccacaattcccggcattcgtggggcagggaggagtcggcctcccggaatcctggtcccggcgtgcacttctgaaggacttcaggtaccggcgtgccccgcgtcctactgtccgcctgctcgcgtcctgggtgccgcctctgagtagggcgggcgaggaggcagccaaggcggagctgatggctgcgccgagggcggggcggggtgcaggctggagccttcgggcatggcgggctttggggggcattcgctgggggaggagaccccgtttgacccctgacctccgggccctgctgacgtcaggaacttctgacccccgggcccgagtgacttatgggacccccagtctctgggcccggttgtctgttggggtcactgaaccccgagcatgcctgacgtctgggaccccgggtccccgggcacaactgactgcggtgaccccagataccaggacccgggaggcctcagagaactctggaacccgttcgcgcgcgtggctggcggtggcgctgggcgctgggggggcagtgctgttgttgttgtggggcgggggtcggggtcctccggccgtcctcgccgccgtccctagcccgccgcccgcttctccccggagtcagtacaacttcatcgcagatgtggtggagaagacagcacctgccgtggtctatatcgagatcctggaccggcaccctttcttgggccgcgaggtccctatctcgaacggctcaggattcgtggtggctgccgatgggctcattgtcaccaacgcccatgtggtggctgatcggcgcagagtccgtgtgagactgctaagcggcgacacgtatgaggccgtggtcacagctgtggatcccgtggcagacatcgcaacgctgaggattcagactaaggagcctctccccacgctgcctctgggacgctcagctgatgtccggcaaggggagtttgttgttgccatgggaagtccctttgcactgcagaacacgatcacatccggcattgttagctctgctcagcgtccagccagagacctgggactcccccaaaccaatgtggaatacattcaaactgatgcagctattgattttggaaactctggaggtcccctggttaacctggatggggaggtgattggagtgaacaccatgaaggtcacagctggaatctcctttgccatcccttctgatcgtcttcgagagtttctgcatcgtggggaaaagaagaattcctcctccggaatcagtgggtcccagcggcgctacattggggtgatgatgctgaccctgagtcccagcatccttgctgaactacagcttcgagaaccaagctttcccgatgttcagcatggtgtactcatccataaagtcatcctgggctcccctgcacaccgggctggtctgcggcctggtgatgtgattttggccattggggagcagatggtacaaaatgctgaagatgtttatgaagctgttcgaacccaatcccagttggcagtgcagatccggcggggacgagaaacactgaccttatatgtgacccctgaggtcacagaatgaatagatcaccaagagtatgaggctcctgctctgatttcctccttgcctttctggctgaggttctgagggcaccgagacagagggttaaatgaaccagtgggggcaggtccctccaaccaccagcactgactcctgggctctgaagaatcacagaaacactttttatataaaataaaattatacctagcaacatattatagtaaaaaatgaggtgggagggctggatcttttcccccaccaaaaggctagaggtaaagctgtatccccctaaacttaggggagatactggagctgaccatcctgacctcctattaaagaaaatgagctgctgccatcttttgtgggcagttagtcaggtgc

SEQ ID NO: 13969 - DNA, 1450 bp, Homo sapiens
  source 1..1450: mol_type = unassigned DNA
cagccaaggcggagctgatggctgcgccgagggcggggcggggtgcaggctggagccttcgggcatggcgggctttggggggcattcgctgggggaggagaccccgtttgacccctgacctccgggccctgctgacgtcaggaacttctgacccccgggcccgagtgacttatgggacccccagtctctgggcccggttgtctgttggggtcactgaaccccgagcatgcctgacgtctgggaccccgggtccccgggcacaactgactgcggtgaccccagataccaggacccgggaggcctcagagaactctggaacccgttcgcgcgcgtggctggcggtggcgctgggcgctgggggggcagtgctgttgttgttgtggggcgggggtcggggtcctccggccgtcctcgccgccgtccctagcccgccgcccgcttctccccggagtcagtacaacttcatcgcagatgtggtggagaagacagcacctgccgtggtctatatcgagatcctggaccggcaccctttcttgggccgcgaggtccctatctcgaacggctcaggattcgtggtggctgccgatgggctcattgtcaccaacgcccatgtggtggctgatcggcgcagagtccgtgtgagactgctaagcggcgacacgtatgaggccgtggtcacagctgtggatcccgtggcagacatcgcaacgctgaggattcagactaagtttggaaactctggaggtcccctggttaacctggatggggaggtgattggagtgaacaccatgaaggtcacagctggaatctcctttgccatcccttctgatcgtcttcgagagtttctgcatcgtggggaaaagaagaattcctcctccggaatcagtgggtcccagcggcgctacattggggtgatgatgctgaccctgagtcccagggctggtctgcggcctggtgatgtgattttggccattggggagcagatggtacaaaatgctgaagatgtttatgaagctgttcgaacccaatcccagttggcagtgcagatccggcggggacgagaaacactgaccttatatgtgacccctgaggtcacagaatgaatagatcaccaagagtatgaggctcctgctctgatttcctccttgcctttctggctgaggttctgagggcaccgagacagagggttaaatgaaccagtgggggcaggtccctccaaccaccagcactgactcctgggctctgaagaatcacagaaacactttttatataaaataaaattatacctagcaacatattatagtaaaaaatgaggtgggagggctggatcttttcccccaccaaaaggctagaggtaaagctgtatccccctaaacttaggggagatactggagctgaccatcctgacctcctattaaagaaaatgagctgctgccatcttttgtgggca

SEQ ID NO: 13970 - DNA, 2541 bp, Homo sapiens
  source 1..2541: mol_type = unassigned DNA
gggagctggtccctgcgctccctgcgccctggggatgcccctgccgccctgacgcccgccagcctgagccaccggcgcatgtgaccgcgcgtccgccccagtcccatccgtaggcgcccggcgcccggccccgcagcggcctcgttgtccccgccggcccccgcccggtctcccgcgctgccacccgccgccggccctgccgccatgcaggcgcgagcgctgctcctggccgcgttggccgcgctggcgctggcccgggagccccctgcggcgccgtgtcccgcgcgctgcgacgtgtcgcggtgtcccagcccccgctgccccggcggctacgtgcccgacctctgcaactgctgcctggtgtgcgccgccagcgagggcgagccctgtggcggccctctggactcgccttgcggcgagagcctggagtgcgtgcgcggcctatgccgctgccgctggtcgcacgccgtgtgtggcaccgacgggcacacctatgccaacgtgtgcgcgctgcaggcggccagccgccgcgcgctgcagctctccgggacgcccgtgcgccagctgcagaagggcgcctgcccgttgggtctccaccagctgagcagcccgcgctacaagttcaacttcattgctgacgtggtggagaagatcgcaccagccgtggtccacatagagctcttcctgagacacccgctgtttggccgcaacgtgcccctgtccagcggttctggcttcatcatgtcagaggccggcctgatcatcaccaatgcccacgtggtgtccagcaacagtgctgccccgggcaggcagcagctcaaggtgcagctacagaatggggactcctatgaggccaccatcaaagacatcgacaagaagtcggacattgccaccatcaagatccatcccaagaaaaagctccctgtgttgttgctgggtcactcggccgacctgcggcctggggagtttgtggtggccatcggcagtcccttcgccctacagaacacagtgacaacgggcatcgtcagcactgcccagcgggagggcagggagctgggcctccgggactccgacatggactacatccagacggatgccatcatcaactacgggaactccgggggaccactggtgaacctggatggcgaggtcattggcatcaacacgctcaaggtcacggctggcatctcctttgccatcccctcagaccgcatcacacggttcctcacagagttccaagacaagcagatcaaagactggaagaagcgcttcatcggcatacggatgcggacgatcacaccaagcctggtggatgagctgaaggccagcaacccggacttcccagaggtcagcagtggaatttatgtgcaagaggttgcgccgaattcaccttctcagagaggcggcatccaagatggtgacatcatcgtcaaggtcaacgggcgtcctctagtggactcgagtgagctgcaggaggccgtgctgaccgagtctcctctcctactggaggtgcggcgggggaacgacgacctcctcttcagcatcgcacctgaggtggtcatgtgaggggcgcattcctccagcgccaagcgtcagagcctgcagacaacggagggcagcgcccccccgagatcaggacgaaggaccaccgtcggtcctcagcagggcggcagcctcctcctggctgtccggggcagagcggaggctgggcttggccaggggcccgaatttccgcctggggagtgttggatccacatcccggtgccggggagggaagcccaacatccccttgtacagatgatcctgaaagtcacttccaagttctccggatattcacaaaactgccttccatggaggtcccctcctctcctagcttcccgcctctgcccctgtgaacacccatctgcagtatcccctgctcctgcccctcctactgcaggtctgggctgccaagcttcttcccccctgacaaacgcccacctgacctgaggccccagcttccctctgccctaggacttaccaagctgtagggccagggctgctgcctgccagcctggggtccctggaggacaggtcacatctgatccctttggggtgcgggggtggggtccagcccagagcaggcactgagtgaatgccccctggctgcggagctgagccccgccctgccatgaggttttcctccccaggcaggcaggaggccgcggggagcacgtggaaagttggctgctgcctggggaagcttctcctccccaaggcggccatggggcagcctgcagaggacagtggacgtggagctgcggggtgtgaggactgagccggcttccccttcccacgcagctctgggatgcagcagccgctcgcatggaagtgccgcccagaggcatgcaggctgctgggcaccaccccctcatccagggaacgagtgtgtctcaaggggcatttgtgagctttgctgtaaatggattcccagtgttgcttgtactgtatgtttctctactgtatggaaaataaagtttacaagcacacggttctcagcca

SEQ ID NO: 13971 - DNA, 2095 bp, Homo sapiens
  source 1..2095: mol_type = unassigned DNA
gcggaggcggcgccgtggccgggagaaagtgtctctcatttaggagggtttgcaggtccagagtaaagtcactgaagagtggaagcgaggaaggaacaggatgattagacctcagctgcggaccgcggggctgggacgatgcctcctgccggggctgctgctgctcctggtgcccgtcctctgggccggggctgaaaagctacatacccagccctcctgccccgcggtctgccagcccacgcgctgccccgcgctgcccacctgcgcgctggggaccacgccggtgttcgacctgtgccgctgttgccgcgtctgccccgcggccgagcgtgaagtctgcggcggggcgcagggccaaccgtgcgccccggggctgcagtgcctccagccgctgcgccccgggttccccagcacctgcggttgcccgacgctgggaggggccgtgtgcggcagcgacaggcgcacctaccccagcatgtgcgcgctccgggccgaaaaccgcgccgcgcgccgcctgggcaaggtcccggccgtgcctgtgcagtgggggaactgcggggatacagggaccagaagcgcaggcccgctcaggaggaattacaacttcatcgccgcggtggtggagaaggtggcgccatcggtggttcacgtgcagctgtggggcaggttacttcacggcagcaggcttgttcctgtgtacagtggctctgggttcatagtgtctgaggacgggctcattattaccaatgcccatgttgtcaggaaccagcagtggattgaggtggtgctccagaatggggcccgttatgaagctgttgtcaaggatattgaccttaaattggatcttgcggtgattaagattgaatcaaatgctgaacttcctgtactgatgctgggaagatcatctgaccttcgggctggagagtttgtggtggctttgggcagcccattttctctgcagaacacagctactgcaggaattgtcagcaccaaacagcgagggggcaaagaactggggatgaaggattcagatatggactacgtccagattgatgccacaattaattatgggaattctggtggtcctctggtgaacttggatggtgatgtgattggcgtcaattcattgagggtgactgatggaatctcctttgcaattccttcagatcgagttaggcagttcttggcagaataccatgagcaccagatgaaaggaaaggcgttttcaaataagaaatatctgggtctgcaaatgctgtccctcactgtgccccttagtgaagaattgaaaatgcattatccagatttccctgatgtgagttctggggtttatgtatgtaaagtggttgaaggaacagctgctcaaagctctggattgagagatcacgatgtaattgtcaacataaatgggaaacctattactactacaactgatgttgttaaagctcttgacagtgattccctttccatggctgttcttcggggaaaagataatttgctcctgacagtcatacctgaaacaatcaattaaatatcttgttttaaagtgggattatctaaaaaaaaaaaaaccagttatatcacgtggtttgtattggagatgtgccaaacatggcaagaagtttttggatctttttcttacaaagaaaaatggatggttatcaacccaaatgcccatcaatgacagactggataaagcaaatgtggtacatatacaccatggaatactatgcagccataaaaagcaacagtcctctgcagggacatggatggagctggaaaccattatcctcagcaaactaacgcaggaacagaaaaccaaatactgcatgttctcacttataagtgggagctgaacaatgagaacacatgaacatagggaggggaacaacacacactggggcctggcagtgggtagggtagagggagggagagcattagcaaaaatagctaatgcatgctgggcttaacacccaggtgatgggttgattgataggtgcagcaaaccatcatggcacacatttacctatgaaacaaacctgcacatcctgcatatgtacctcagaacttaaaaataaaaataaaaagaaaaatg

SEQ ID NO: 13972 - DNA, 9027 bp, Homo sapiens
  source 1..9027: mol_type = unassigned DNA
gctgctgggcggcggcagggtggcggacggagcgggggaccggggagcggcggccgccggaggaggttatgtttgtgtttggggttgtcaagtgaaggagggatcccaggcgccgccgccgccgccgcgcgggggtcgcggagatcccgagccgcggccgccgccatcagcagcgcagctccagggccggctgcagcggcagcggctccgccgggcgtcctggcagcagcacatggattaattgatgtatgttgagtttatggagctgccttttggtggcttgctttatctgcagtttttaagaagaaaaagaaggccctgagtcaaagaagatgcctcgaactaaacaaattcatcccagaaatctaagagacaaaattgaagaagcacaaaaagaacttaatggggcagaagtttcaaaaaaagaaatcttacaggctggtgttaaaggaacttcggaatcccttaaaggtgtgaaacgcaaaaagatcgtagctgagaatcacctgaaaaaaataccaaaatccccactgagaaatcctcttcaggcaaaacataaacaaaatacagaagagtcatctttcgccgttcttcatagtgcttcggagtctcacaagaaacagaattatattcctgtaaaaaatgggaagcagtttaccaaacaaaatggagaaacacctggaataattgctgaagcctcaaaatctgaagaatctgtctccccaaagaagcccttgtttctgcagcaaccatctgaactgcgtagatggagatccgaaggcgctgatcctgccaaattcagtgacctcgatgaacaatgtgactcaagttccttgtcaagtaaaaccaggactgacaatagcgaatgcatctcttctcattgtggcactacgtccccctcctatacaaacactgcattcgatgtcttactgaaagcaatggagccagaactgagcaccttgtcacaaaagggctcaccttgtgcaattaagacagaaaaactgaggccaaataaaactgcacgttcccctcccaaattaaaaaacagttcaatggatgccccaaatcagacttcacaggaattggttgctgaatcacagtcttcttgtacctcatacacagtccatatgtctgctgctcagaagaatgagcaaggggcaatgcagtcagcttctcatttgtatcatcaacatgaacactttgttcccaaatccaaccaacataatcaacagcttccggggtgttcaggtttcacaggatcactgacaaatctgcaaaatcaagagaatgccaaacttgaacaggtttataatatagcagtgacatcatctgtaggcctaacttcaccttccagtagatctcaggttactcctcaaaaccagcaaatggattctgcttcacctttgtcaataagtccggctaattctacacagtcgccccccatgccaatctataattcaactcatgttgcctctgttgttaatcaaagcgtagagcaaatgtgcaatcttcttctgaaagatcagaagccaaaaaaacaaggaaaatatatttgtgagtattgcaatagagcatgtgcaaagcctagtgtgcttttaaagcatatccgctcccacactggagagcgaccctatccctgtgtgacttgtggattttcatttaagactaaaagtaatctgtataagcacaagaaatcccacgcacatactatcaaactgggtcttgtcttgcaaccagatgctggtggcttgttcttgtcccacgagtcccccaaagcacttagtattcattcagacgtagaagacagtggggagagcgaggaggaaggcgccactgatgagagacagcatgacctgggcgccatggagctgcagcctgtgcacataataaagaggatgtcaaatgctgaaactttactaaaatcaagcttcactccaagcagtccagaaaatgtgataggtgactttttgctacaggacagatctgcagaatcacaagctgtgacagagttaccgaaagttgtggtccaccatgtcactgtgtcccccttaagaactgacagtccaaaggccatggatcccaagcctgaactttctagtgcacaaaagcagaaggaccttcaggtgacaaacgtacagccactttcagccaacatgtcccagggtggagtctccaggttggagactaatgagaattcccaccagaaaggcgacatgaatccactggaaggaaagcaagactctcacgtaggaacggtacacgcccagctacaaaggcagcaggctaccgattactcccaagagcagcaaggaaagctcctgagtcctcgaagtttaggaagtacggattctggttacttttcacgttctgaaagtgccgatcaaacagtgagtccaccaactccctttgccagaaggttacccagcacagaacaagactctggaaggagtaacggaccctctgcagctcttgtcaccacgtcaacaccctctgctttgcccacaggggaaaaggcattgcttttaccaggtcagatgcgcccacctttggccacaaaaacacttgaggagcggatatcgaagcttatctcagacaatgaagctttggtagatgacaagcaactggatagtgtgaagccgcggagaacctcactgtcaagacgaggaagcattgattcccccaaatcatacatatttaaagattctttccagtttgatttaaaaccagtgggacggagaacaagttcaagctctgatataccgaagtcacctttcacccctactgaaaaatcaaagcaagtgtttcttctgtctgtaccttcacttgactgtttacctatcacaagaagtaattccatgccgaccacaggttattcagcagtacctgcaaatataatacctcctcctcatccactaagaggaagtcagtcatttgatgacaaaattggcactttctatgatgatgtctttgtatcgggacctaacgctcctgtgccccagagtgggcatccccgtacacttgtgagacaagcagccatagaagactcttcagcaaatgaaagtcatgttcttggtactggacagtccctggatgagagccaccaaggatgccatgctgctggtgaagccatgtcagtgaggagcaaggcactggcacaaggcccacatatagaaaaaaagaagtctcatcaagggcgagggacaatgtttgagtgtgaaacttgtagaaacaggtataggaaactggaaaattttgaaaatcataagaaattttactgttctgagttacatggaccaaaaacaaaggtagccatgagagaacctgagcacagccctgtgcccggcggtctgcagcctcagattctacactacagagtcgctgggtcctccggcatctgggaacagacgccccagataagaaaaaggaggaaaatgaaaagtgttggggatgatgaagaacttcagcaaaatgaaagtggaacatctccaaaaagttctgaaggccttcagtttcagaatgctctgggctgtaatcccagtttgcctaaacataatgttaccataagaagtgaccagcagcataaaaatatacagttgcaaaactcccatattcaccttgttgccaggggccctgagcagaccatggatcccaagctgtcgaccatcatggaacaacagataagttcagcagcccaggacaagatagaactgcagagacacggaactggaatctctgtcatccagcacaccaactccctgagcaggcccaactcatttgacaagcctgagccttttgaaagagcctccccagtttctttccaggagctgaatagaacggggaagtccgggtctctaaaagtgataggaatctcccaagaggaaagtcacccttctcgggacgggtctcatcctcaccagcttgcactatcagacgctctcagaggagaacttcaggaaagctccagaaagagtccaagtgaacgacatgtgttaggacagccctcaagacttgtccggcagcacaacatccaagttccagagattttggtcacagaagaaccagatcgagacctggaagctcaatgccatgatcaagaaaagtcagagaagttcagttggccccagcgtagtgaaaccttgtcaaaattgccaacagagaaactgccacccaaaaagaaaaggctccgtctggctgagatagaacattcctcaacagaatcgagctttgattccactctctccaggagtctaagtagggagagcagtttatctcacacttcaagtttctcagcctctttagacatagaggacgtttctaaaacggaggcttcccccaaaatcgattttctaaataaagccgagtttcttatgattccagctggcttgaatactctgaatgttcctggatgtcaccgggaaatgaggcgtactgcatcagaacagattaattgcacgcaaacgtcaatggaggtctctgatctcagaagcaaatcattcgattgtggaagcatcaccccaccccagacaacaccacttactgaattgcagcctccatcttcaccttctcgagtgggagtgactgggcatgtgcctctcttagaaagaaggagaggcccactggtacggcaaatatctttaaacatagccccagatagtcatctgtctcctgtacacccaacatctttccaaaatactgctcttcccagtgtgaatgcagtgccatatcaggggcctcagctcactagtacatctttagctgagttttctgcaaatactttgcactctcagactcaggttaaggatctgcaggcagaaacatcaaactccagctctaccaacgtttttcctgttcaacagctctgtgatatcaatttgttaaatcaaatccatgcaccgcctagccaccagagcacacagctatctctgcaagtgtctacgcagggtagcaagccagataaaaattctgttttatctgggtcttctaaaagtgaggattgctttgctcccaaataccaattgcattgtcaggttttcacttcaggcccatcttgctcttctaatcctgtgcattctttgccaaatcaagttatttcagatccagttggaacagatcattgtgtgacatcagcaacattaccaaccaaattaattgacagcatgtctaattcgcatcctctgctaccaccagagctcaggccccttggaagtcaggtgcagaaggtgccatcatcattcatgctgcccatacgcctgcagagtagtgttcctgcttactgttttgctacactcacatccctgccacaaatactagtgacccaagatctgcccaatcagccaatttgccagactaatcatagtgtagtgccaatcagtgaagaacaaaattctgtgccaacattacaaaaaggtcatcagaatgctttgccaaacccagagaaggaatttctatgtgaaaatgttttttcagagatgagccaaaattcttctctatcagaatccttgcccataactcagaaaatatctgttggtcgactttcccctcaacaagaatcttcagcttcgagtaaaaggatgctttccccagcaaatagtttagacattgccatggaaaagcaccagaagcgggccaaagatgaaaatggagctgtttgtgcaacagacgtgagacctttagaggctttgagttcgagagttaatgaagctagtaaacagaagaagcctattttagtgagacaggtttgtactacagagcccctggacggtgtgatgttggaaaaggatgttttttctcaacctgaaattagtaatgaggctgttaatttgacaaatgttttaccagctgataattcatcaacaggatgctctaaatttgtcgttatagaacctataagtgaattgcaggaatttgaaaacatcaagtcatccacatcattaactcttacagttcgaagttcacctgctccttcagaaaatactcatatttctcctttgaaatgtacagacaataaccaagaaaggaagtctccaggggttaaaaatcaaggtgacaaagtgaacatccaagagcaaagtcaacagccagtcacttctctttcattgtttaacatcaaggacacccagcagctggctttccctagcctgaaaactacaaccaactttacatggtgttatctcttaaggcagaagtcgttgcatttgcctcagaaggaccagaaaacttcagcctatactgattggacagtaagcgccagtaatccaaatccactcggtttgcccacaaaagttgcacttgctctccttaattcaaaacagaacactggaaaatcactatactgtcaagcaataactacccattccaagtcagacttattggtctattcaagcaagtggaaaagcagcttaagcaagagagcattaggtaatcaaaagtccacagtagttgaattcagcaataaagatgcctctgaaattaacagtgagcaagataaagaaaattccttaatcaaaagtgaaccaagaagaattaaaatatttgatggaggatataagtcaaatgaagagtatgtatatgtccgaggcaggggaagaggaaaatacatttgtgaagaatgtggaatacgttgtaagaaacctagcatgttaaagaaacacatacgaacccatacagatgtccgcccctaccactgcacttactgtaacttctcctttaagactaaaggaaatctgacaaaacacatgaagtccaaggcacatagcaagaaatgtgtggatttaggcgtctcagtaggtttaatagatgaacaggatacagaagaatcagatgaaaaacagagattcagttatgagcgatctggatatgatcttgaagaatctgatggcccagatgaggatgacaatgaaaatgaagacgatgatgaggacagccaggctgaatcagtcctgtcagccacaccctcagtcacagctagcccgcagcaccttccatctagaagtagccttcaggaccctgtgagtactgacgaggatgtcaggatcaccgattgcttttctggggtacacacggacccaatggacgttctgcccagggcgctgctcaccagaatgactgtcctgagcacagcacagtctgactacaataggaagacactctctccggggaaggccaggcagcgtgctgcgagagatgaaaacgacacaattccgtctgtagacacttccaggtccccgtgtcatcagatgtctgtggactaccctgagtcagaagaaattctgagaagttctatggcaggaaaagctgttgctataacacagagcccatcatctgtaagacttcctcctgctgcagctgagcacagcccccagacagcagcggggatgccttctgtggcctcaccacatcctgaccctcaagaacagaagcagcaaataactctacagccgactccaggcttgccttctccccacactcatttgtttagccaccttcctttgcattcccagcagcaatcgaggacaccttataatatggttccagttggggggatccatgtggtacctgctggcctcacatactccacgtttgtgccccttcaggctggaccagtgcagctcacgatccctgctgtcagtgtcgttcacagaactttgggtactcataggaatacggtcacagaagtgtctggcactacaaaccctgctggagtggctgaattaagcagtgttgtgccatgtattcctatcggccaaatccgcgtgccaggccttcagaacctaagtaccccaggcttgcagtcactcccctcgttaagcatggaaaccgtcaatattgtaggcctagccaatacaaatatggccccacaagtccatccaccaggactggctctgaatgctgtcggactgcaggttctgactgcaaacccttcatcacaaagcagccccgcccctcaggcacacattccaggtctccagatcttgaacatagcattgcccaccttaatcccctcagtcagtcaagtagccgttgatgcacagggagctccagaaatgccagcttcccaaagcaaagcatgcgagacacaacccaagcagacttctgtagccagcgcaaaccaggtcagcaggaccgagtctcctcaggggttacctacagtccagcgggaaaatgcaaaaaaagttctgaatccacctgcccctgcaggtgaccatgcaaggcttgatggcctgagtaaaatggacacagagaaggctgcctcggcaaatcacgtgaagcccaagcctgaactcacttccatacagggccaaccagcgtccacgtcacaacctctgctgaaggcacattctgaagtttttacaaagccctcaggccagcagactctctctccagacagacaggttcccaggcccacagcactaccgcggaggcagcccactgtgcacttcagcgacgtgagcagcgatgatgacgaggacaggcttgtgatagcaacctgatggattttattttttatttgctttttttttatataacacttaaaggtttctttgaaaaccctcctttccttaaagcacatttttctgacataaactcatgactaatctttgtgcaatcatgaacttttgaccaataattgttgttttgtgtcagctccagccatttttgtacatgttgtatagacaattgtgccttttaggagctttatgtttagaaactgtacagattgttgaatatctatatacataaaaatatattatatatgtatatgaaaaccaggtagttatttgtgtttagtaaggaaaacctgtcaaataaatcaaatgattaaattatatgttccactgttgaatataaattttatggctatggggcagagtttctgtgtataaattagtatgtaaactccatatttattgtattcatattagtctttgaaaatgggtctgtcctccttgtgtaagacagtaactttacacttcagacagattttctgtgttatgaaatgtttcagtaaaatattgtttactgacttta

SEQ ID NO: 13973 - DNA, 576 bp, Homo sapiens
  source 1..576: mol_type = unassigned DNA
gtgcaaccgccgaccttgcagaggggatggctgcgtgcgggagacccttggcacttctgggcgccctcgccgcgcgcgagccgagcagcacatggattaattgatgtatgttgagtttatggagctgccttttggtggcttgctttatctgcagtttttaagaagaaaaagaaggccctgagtcaaagaagatgcctcgaactaaacaaattcatcccagaaatctaagagacaaaattgaagaagcacaaaaagaacttaatggggcagaagtttcaaaaaaagaaatcttacaggctggtgttaaaggaacttcggaatcccttaaaggtgtgaaacgcaaaaagatcgtagctgagaatcacctgaaaaaaataccaaaatccccactgagaaatcctcttcaggcaaaacataaacaaaatacagaagagtcatctttcgccgttcttcatagtgcttcggagtctcacaagaaacagaattatattcctgtaaaaaatgggaagcagtttaccaaacaaaatggagaaacacctggaataattgctgaagcctcaaaatctgaagaatctg

SEQ ID NO: 13974 - DNA, 585 bp, Homo sapiens
  source 1..585: mol_type = unassigned DNA
tcctcccgccggccccaaagacgctaaacgtgccctactctgccccgggggagagcacatggattaattgatgtatgttgagtttatggagctgccttttggtggcttgctttatctgcagtttttaagaagaaaaagaaggccctgagtcaaagaagatgcctcgaactaaacaaattcatcccagaaatctaagagacaaaattgaagaagcacaaaaagaacttaatggggcagaagtttcaaaaaaagaaatcttacaggctggtgttaaaggaacttcggaatcccttaaaggtgtgaaacgcaaaaagatcgtagctgagaatcacctgaaaaaaataccaaaatccccactgagaaatcctcttcaggcaaaacataaacaaaatacagaagagtcatctttcgccgttcttcatagtgcttcggagtctcacaagaaacagaattatattcctgtaaaaaatgggaagcagtttaccaaacaaaatggagaaacacctggaataattgctgaagcctcaaaatctgaagaatctgtctccccaaagaagcccttgtttctgcagcaaccatctgaac

SEQ ID NO: 13975 - DNA, 579 bp, Homo sapiens
  source 1..579: mol_type = unassigned DNA
tttcctctcacgcccacttccaacctaggaggcttttggtttctgcttttttgtttttaaaattaaaagttaaacccaggaagctttggatcagacttttgtgttgcagttcggcacatggattaattgatgtatgttgagtttatggagctgccttttggtggcttgctttatctgcagtttttaagaagaaaaagaaggccctgagtcaaagaagatgcctcgaactaaacaaattcatcccagaaatctaagagacaaaattgaagaagcacaaaaagaacttaatggggcagaagtttcaaaaaaagaaatcttacaggctggtgttaaaggaacttcggaatcccttaaaggtgtgaaacgcaaaaagatcgtagctgagaatcacctgaaaaaaataccaaaatccccactgagaaatcctcttcaggcaaaacataaacaaaatacagaagagtcatctttcgccgttcttcatagtgcttcggagtctcacaagaaacagaattatattcctgtaaaaaatgggaagcagtttaccaaacaaaatggagaaacacctggaataattgctga

SEQ ID NO: 13976 - DNA, 2085 bp, Homo sapiens
  source 1..2085: mol_type = unassigned DNA
ttgcacttgctctccttaattcaaaacagaacactggaaaatcactatactgtcaagcaataactacccattccaagtcagacttattggtctattcaagcaagtggaaaagcagcttaagcaagatataagtcaaatgaagagtatgtatatgtccgaggcaggggaagaggaaaatacatttgtgaagaatgtggaatacgttgtaagaaacctagcatgttaaagaaacacatacgaacccatacagatgtccgcccctaccactgcacttactgtaacttctcctttaagactaaagatgaaaaacagagattcagttatgagcgatctggatatgatcttgaagaatctgatggcccagatgaggatgacaatgaaaatgaagacgatgatgaggacagccaggctgaatcagtcctgtcagccacaccctcagtcacagctagcccgcagcaccttccatctagaagtagccttcaggaccctgtgagtactgacgaggatgtcaggatcaccgattgcttttctggggtacacacggacccaatggacgttctgcccagggcgctgctcaccagaatgactgtcctgagcacagcacagtctgactacaataggaagacactctctccggggaaggccaggcagcgtgctgcgagagatgaaaacgacacaattccgtctgtagacacttccaggtccccgtgtcatcagatgtctgtggactaccctgagtcagaagaaattctgagaagttctatggcaggaaaagctgttgctataacacagagcccatcatctgtaagacttcctcctgctgcagctgagcacagcccccagacagcagcggggatgccttctgtggcctcaccacatcctgaccctcaagaacagaagcagcaaataactctacagccgactccaggcttgccttctccccacactcatttgtttagccaccttcctttgcattcccagcagcaatcgaggacaccttataatatggttccagttggggggatccatgtggtacctgctggcctcacatactccacgtttgtgccccttcaggctggaccagtgcagctcacgatccctgctgtcagtgtcgttcacagaactttgggtactcataggaatacggtcacagaagtgtctggcactacaaaccctgctggagtggctgaattaagcagtgttgtgccatgtattcctatcggccaaatccgcgtgccaggccttcagaacctaagtaccccaggcttgcagtcactcccctcgttaagcatggaaaccgtcaatattgtaggcctagccaatacaaatatggccccacaagtccatccaccaggactggctctgaatgctgtcggactgcaggttctgactgcaaacccttcatcacaaagcagccccgcccctcaggcacacattccaggtctccagatcttgaacatagcattgcccaccttaatcccctcagtcagtcaagtagccgttgatgcacagggagctccagaaatgccagcttcccaaagcaaagcatgcgagacacaacccaagcagacttctgtagccagcgcaaaccaggtcagcaggaccgagtctcctcaggggttacctacagtccagcgggaaaatgcaaaaaaagttctgaatccacctgcccctgcaggtgaccatgcaaggcttgatggcctgagtaaaatggacacagagaaggctgcctcggcaaatcacgtgaagcccaagcctgaactcacttccatacagggccaaccagcgtccacgtcacaacctctgctgaaggcacattctgaagtttttacaaagccctcaggccagcagactctctctccagacagacaggttcccaggcccacagcactaccgcggaggcagcccactgtgcacttcagcgacgtgagcagcgatgatgacgaggacaggcttgtgatagcaacctgatggattttattttttatttgctttttttttatataacacttaaaggtttctttgaaaaccctcctttccttaaagcacatttttctgacataaactcatgactaatctttgtgc

SEQ ID NO: 13977 - DNA, 2640 bp, Homo sapiens
  source 1..2640: mol_type = unassigned DNA
ggagataaattttcctttcagagagcattaggtaatcaaaagtccacagtagttgaattcagcaataaagatgcctctgaaattaacagtgagcaagataaagaaaattccttaatcaaaagtgaaccaagaagaattaaaatatttgatggaggatataagtcaaatgaagagtatgtatatgtccgaggcaggggaagaggaaaatacatttgtgaagaatgtggaatacgttgtaagaaacctagcatgttaaagaaacacatacgaacccatacagatgtccgcccctaccactgcacttactgtaacttctcctttaagactaaaggaaatctgacaaaacacatgaagtccaaggcacatagcaagaaatgtgtggatttaggcgtctcagtaggtttaatagatgaacaggatacagaagaatcagatgaaaaacagagattcagttatgagcgatctggatatgatcttgaagaatctgatggcccagatgaggatgacaatgaaaatgaagacgatgatgaggacagccaggctgaatcagtcctgtcagccacaccctcagtcacagctagcccgcagcaccttccatctagaagtagccttcaggaccctgtgagtactgacgaggatgtcaggatcaccgattgcttttctggggtacacacggacccaatggacgttctgcccagggcgctgctcaccagaatgactgtcctgagcacagcacagtctgactacaataggaagacactctctccggggaaggccaggcagcgtgctgcgagagatgaaaacgacacaattccgtctgtagacacttccaggtccccgtgtcatcagatgtctgtggactaccctgagtcagaagaaattctgagaagttctatggcaggaaaagctgttgctataacacagagcccatcatctgtaagacttcctcctgctgcagctgagcacagcccccagacagcagcggggatgccttctgtggcctcaccacatcctgaccctcaagaacagaagcagcaaataactctacagccgactccaggcttgccttctccccacactcatttgtttagccaccttcctttgcattcccagcagcaatcgaggacaccttataatatggttccagttggggggatccatgtggtacctgctggcctcacatactccacgtttgtgccccttcaggctggaccagtgcagctcacgatccctgctgtcagtgtcgttcacagaactttgggtactcataggaatacggtcacagaagtgtctggcactacaaaccctgctggagtggctgaattaagcagtgttgtgccatgtattcctatcggccaaatccgcgtgccaggccttcagaacctaagtaccccaggcttgcagtcactcccctcgttaagcatggaaaccgtcaatattgtaggcctagccaatacaaatatggccccacaagtccatccaccaggactggctctgaatgctgtcggactgcaggttctgactgcaaacccttcatcacaaagcagccccgcccctcaggcacacattccaggtctccagatcttgaacatagcattgcccaccttaatcccctcagtcagtcaagtagccgttgatgcacagggagctccagaaatgccagcttcccaaagcaaagcatgcgagacacaacccaagcagacttctgtagccagcgcaaaccaggtcagcaggaccgagtctcctcaggggttacctacagtccagcgggaaaatgcaaaaaaagttctgaatccacctgcccctgcaggtgaccatgcaaggcttgatggcctgagtaaaatggacacagagaaggctgcctcggcaaatcacgtgaagcccaagcctgaactcacttccatacagggccaaccagcgtccacgtcacaacctctgctgaaggcacattctgaagtttttacaaagccctcaggccagcagactctctctccagacagacaggttcccaggcccacagcactaccgcggaggcagcccactgtgcacttcagcgacgtgagcagcgatgatgacgaggacaggcttgtgatagcaacctgatggattttattttttatttgctttttttttatataacacttaaaggtttctttgaaaaccctcctttccttaaagcacatttttctgacataaactcatgactaatctttgtgcaatcatgaacttttgaccaataattgttgttttgtgtcagctccagccatttttgtacatgttgtatagacaattgtgccttttaggagctttatgtttagaaactgtacagattgttgaatatctatatacataaaaatatattatatatgtatatgaaaaccaggtagttatttgtgtttagtaaggaaaacctgtcaaataaatcaaatgattaaattatatgttccactgttgaatataaattttatggctatggggcagagtttctgtgtataaattagtatgtaaactccatatttattgtattcatattagtctttgaaaatgggtctgtcctccttgtgtaagacagtaactttacacttcagacagattttctgtgttatgaaatgtttcagtaaaatattgtttactgacttt

SEQ ID NO: 13978 - DNA, 9524 bp, Homo sapiens
  source 1..9524: mol_type = unassigned DNA
gtggagcctttgaattttttaaaagaccatagtaatcagatctacttgaaaaattaagtgaattgatttggttggaatgctcttttaccgatgctttaacatacagccactaggaagcgtcaggacaatcatgcccataagaactctaaactgttcagatcattttatcttagtgaaactggcaattgaactttgctctagttgatgggcaaaatttctcctagactattcatcatcccaatttcatcctagttgaaaattttcaaatgccataagaaatctttatagatttgcacttagcttttggatggacgtttctacaatggagagaactgtgttatagccctggtccaaggacattactagctaatgcccatcgactgtggtgtgcgtgtggaaggttccaaagagaaggagcaatcagcaagtttgcagacaccctggaacatggaagcaaccaagctttaagaagcacagctttggagacactccatgagtctgcactgctttcaggggaactagcacttaagaccttgtgtaacaaaatggacactggggacacagctctaggacaaaaagctacctcaaggtctggagaaactgataaagcatcaggtagatggagacaggaacaatcagctgttattaagatgagcacttttggcagtcatgaaggacagcggcaaccacaaatagagcctgagcaaatcggaaacacagcatcagcacaactgtttggttctgggaaactggcctcccctagtgaagtggtgcagcaagtcgcagagaagcaatatccaccgcatcgtccgagtccttactcatgccaacactcactctctttccctcagcactcattgccacagggggtcatgcacagcaccaagccacatcagagcctcgaaggtcctccgtggcttttccctggccctttgccatccgttgcctctgaggacttatttccttttcctatacatggccacagtggtggttatcctagaaaaaagatttcaagtctgaaccctgcttatagccaatactcccagaaaagtattgaacaggcagaagaggctcacaagaaagagcacaaacccaaaaagcctggcaagtacatttgcccttactgcagcagagcgtgtgccaaacctagtgtactgaaaaaacacatcaggtcccatactggggagcggccatatccatgtataccttgtggtttctctttcaagacaaagagcaatttgtacaagcacaggaagtcacatgcccatgcaattaaggcaggattagtacctttcacagagtcagctgtatctaaattggacctagaggctggttttattgatgtagaagcagaaatacattcagatggtgaacagagtacagacacagatgaggagagttctttatttgccgaggcttctgacaaaatgagtcctggtccacccatcccactggacattgccagcagaggcggctatcatgggtcattggaagaatcattgggaggtccaatgaaggtgccgattttgattatccctaaaagtgggattcctctccctaatgaaagctctcagtatattggccctgatatgctaccaaatccatctttaaatactaaggctgatgattcgcacacagtcaaacagaaacttgcactaagactgtcagagaaaaaaggacaagattctgagccatcgctcaaccttctgagcccgcacagtaaaggaagcactgattctggttacttttctcgctcagaaagtgctgagcagcaaataagccctcccaacacaaatgcaaagtcttatgaagaaatcatctttggaaaatactgtcggcttagtccgagaaatgcactcagtgttacaaccacaagtcaggagcgtgccgcaatgggtaggaagggcataatggaaccattacctcacgttaacaccaggttagatgtcaagatgtttgaagatcctgtttcacagctgatcccaagcaagggagatgtcgaccccagtcaaacgagcatgctgaaatccactaagttcaacagtgagtccagacaaccccagattattccatcatctatcaggaacgaaggaaaactttatccagcaaacttccaaggcagcaacccggttctcttagaagctcctgtagactcttcaccccttattagaagcaactcagtgccaacttcttcagcaactaatctaactattcctccttctttgagaggaagtcactcatttgatgaaaggatgactggttccgacgatgtattctatccagggaccgtgggcataccccctcagcgcatgctaagaagacaagcggcatttgagctgccttcggtacaggagggccacgtggaagtcgagcaccatggcaggatgttgaagggtatcagcagttcatccctgaaggaaaagaaattgtctcctggggacagggttgggtatgactatgatgtctgtcggaaaccctataagaagtgggaggactctgaaacaccaaagcaaaactacagggacatttcctgcttgagttctttaaagcatggtggagaatatttcatggatcccgtggtgccattgcagggagtaccaagcatgtttggaactacctgtgaaaacaggaaacgccggaaagagaagagcgtaggggatgaagaggacacgcccatgatctgcagcagcattgtaagcactcctgtgggcatcatggcttccgattatgaccccaaactgcagatgcaggaaggagtcaggagtggatttgccatggctggacacgaaaacctttctcatggtcacacggaacgctttgacccatgtcggccccaactgcagcctggaagtccatctcttgtgtcagaggagtcaccttcagccattgattcagacaagatgtcagacctagggggcaggaaacctcctggaaatgtgatttctgtgattcagcacaccaactcactgagccgacccaattcatttgaaaggtctgagtcagccgaacttgtggcttgcacacaggataaagccccttccccttcagagacttgtgacagtgagatttcagaagccccagtgagtcctgagtgggctccacctggggatggtgcagaaagtggggggaaaccctctccatctcagcaggtgcagcagcagtcctatcacacacagcccaggctagttcggcaacacaacatccaggttcctgagattcgagtgaccgaggagcctgataaacctgagaaggagaaggaagcccagagcaaagagccagagaagcctgtggaagaatttcagtggccccagagaagtgagaccctttcccagctccccgcggagaagttgccacccaaaaagaagcgtctgcgacttgcagatatggagcactcctcaggggagtccagctttgaatccacaggcacaggcctctcccgcagccccagccaagaaagcaacttgtcccacagctccagtttctccatgtcttttgaaagagaagaaaccagtaagctttctgcacttcctaagcaggatgagtttgggaagcattcagagtttctgactgtccctgctggttcatactcattgtctgtcccaggccatcaccaccagaaagagatgcgacgctgctcatcagagcagatgccttgtcctcacccagcggaagtcccagaagttcggagcaaatcatttgattatgggaatctgtcccatgctcctgtgtcgggagcagcagcctccacggtatcaccgtccagggagaggaagaaatgctttctggtgcggcaagcttccttcagtggctccccagaaatctcccagggcgaggttggcatggatcagagcgtgaagcaagagcagctggagcacctgcatgctggcctccggtccgggtggcaccatggcccgcctgctgtgctgcctcctcttcagcaagaggacccagggaagcaggtggcgggtccttgtcccccgctgagctcggggccactgcacctggcccagccacagatcatgcacatggacagtcaggaatctttgagaaatcccttgatccaaccaacatcctatatgacaagcaagcacttacctgaacagccacacttatttccacatcaagagacaattccattttctccaatccagaatgccttgtttcagtttcagtatcctacagtttgtatggttcatttaccagctcagcagcctccctggtggcaggcacatttcccacatccctttgctcagcaccctcagaagagctatggcaagccctcttttcagacagaaatccattcgagctatcccttagagcatgtggcagagcacactggaaagaaacctgctgagtatgcacacacgaaagagcagacctacccatgttattcaggagcatcagggctacacccaaagaaccttcttccaaagtttccatcagaccagagcagtaagtcaactgaaacgccctctgagcaggttcttcaagaagattttgcctcggcaaatgctgggtctttgcagtccctcccaggaacagtggttcctgttcggatccagacgcacgtaccatcctatggaagtgtcatgtacacaagcatttctcagatacttgggcagaatagccctgccattgtcatatgcaaagtcgatgagaatatgacccaaaggacactggtcaccaacgcagccatgcaagggataggattcaacattgcccaggtgctggggcagcatgcgggcttggagaagtaccccatttggaaagcacctcagactttgcccctcggcttagaatcctccatccccttgtgtttaccttccacctctgacagcgtggccaccctgggaggtagcaagcgaatgctttctccagccagtagcttggagctcttcatggaaaccaagcagcagaaaagggtcaaagaagaaaagatgtacggacagattgtggaggagcttagtgctgtggagctgaccaactcagacatcaaaaaggacctctcccgcccccagaaaccccagctggttcgacaaggatgtgcttctgagccaaaagatggcttgcagtcagggtcatcttccttctcctcgctgtcgccctcctcatctcaagactatccttctgttagcccgtcttccagggagccattcctgcccagcaaggagatgctttccggttcccgggcaccacttccggggcagaagtccagtgggccttctgaaagcaaagaatcttcagatgaattagatatcgatgagacggcatcggacatgagcatgagcccacagagttcttcattaccagcaggagatggtcagctggaagaggaagggaagggccacaagcggcctgttggcatgctggtccgcatggcctctgcccccagcgggaacgtggcagactcaactcttcttctcacggacatggcagatttccagcagattcttcagttccccagtctgcggacaacaactactgtgagttggtgcttcttgaattatacaaaacccaattatgtgcaacaggccaccttcaaatcctcggtttatgcttcatggtgcattagttcctgtaatccaaacccatcaggattgaacaccaagaccacgctggctcttctgaggtccaagcaaaaaatcactgcagaaatttatactctggctgctatgcataggcctggaaccggcaagcttacatcatcaagtgcttggaagcagtttactcagatgaaacctgatgcgtcctttttatttggcagcaaactagaaaggaaactagtgggaaatatcttaaaggaaagagggaaaggagatattcatggagataaagatattggatccaaacaaactgagccaatccgaattaaaatatttgaaggagggtacaaatcgaatgaagattatgtatatgtcagaggacgtggccggggaaagtacatttgtgaagaatgtgggattcgctgtaagaagccaagcatgctcaaaaaacacatccgtacccatactgatgttcggccttatgtatgcaagttatgtaactttgccttcaaaacgaaaggaaacctaacgaagcatatgaaatctaaagcacacatgaaaaaatgcctggaattgggagtctcaatgacatcggtggatgatacagaaactgaggaagcagaaaatttggaagatttgcacaaagcagcagagaagcatagcatgtccagcatttcaactgatcatcagttctccgatgctgaggaatcagatggtgaggatggagatgataatgatgatgatgatgaagatgaagatgactttgacgaccagggagatttaacaccaaaaacaagatcaagaagcaccagtcctcagcctcctagattctcctccttgcctgtgaatgttggcgccgtaccccacggggttccttcagatagttccctgggacattcttcgttgatcagctatttggttactttgccaagtattcgagttactcagcttatgacacccagtgattcatgtgaagatacccagatgacagaataccagaggctattccagagcaaaagtacggactcagaaccagacaaagacagattggacatacctagttgtatggatgaggagtgcatgctaccttcagagccaagctcctctcccagggacttctcaccctcaagccaccattcctctccaggatatgattcttcaccctgtcgagataattcaccaaagaggtatctgatacccaaaggagatttatctcccaggagacatttatcacctaggagagatctgtcacccatgagacatctttcaccaagaaaggaagctgcattgagaagagagatgtcccaaagagatgtttcaccaagaaggcatttgtctccaaggaggccagtgtctcctgggaaagatatcacagcaagaagagacctctctcctagaagagagagaagatacatgaccacaataagagcgccatctcccagaagggctttataccataacccaccattgtccatgggacagtatttgcaagcagagccaattgtattggggcctcctaatttaagaagaggattacctcaggttccttacttcagtctctatggagaccaagaaggtgcttatgaacatccaggctccagccttttccctgagggtcctaatgactatgtcttcagtcatcttccactccactctcagcaacaagtgcgagcccctatccccatggtgcccgttggtgggatccagatggttcactccatgccgccagccctttccagtttacatccttcacccacattgcccctgccaatggagggctttgaggagaagaaaggcgcgtcaggggagtccttctccaaggacccctatgtgctttctaagcagcatgagaagcgaggtcctcacgctttgcagtcatctggtccacctagcactccctcctctcctcggctgttgatgaaacagagcacttcggaagacagcctaaacgcaacagagcgggaacaggaggaaaatatacagacttgtacaaaagccattgcctctctccggattgccacggaagaggcagctctgctcgggccagatcagccagcgcgggtgcaggagccccaccagaaccccctgggaagtgcacatgttagcattagacactttagtagacctgagccaggtcagccctgtacctcagccacccaccctgacttgcatgatggtgaaaaggacaattttggtacatcacagactccattagctcactccacgttttacagcaagagttgtgtggatgacaagcagttggactttcacagcagcaaggaattatcttcaagcacagaggaaagcaaagatccttcatcagaaaagagtcagctacattgatctatgatgcatggagactttcatttccacattttcccatttttttgtttttgtttttctagaaatggaggtaatccagtttatagcatgcctgtcctaagttacagtagtttgctattatatatacttttgttatatcaaaagaattaggtaaattaacaagtcatcatgagcctgaccaaaacaaaatttgaaattaacctattgggtctggtacttttaaaattgtacagatgtttgtgccttttctttactttgcttatattcttataagcattttttagcagtaatttgtacatattttagaatttgtgtatctgctttgtaataaatgtaatttctttccttttttggacacttggatctaaatgatgtaaagcaaaacagcatcaatatatatgtgaggttgcactaaaacatatttttatatgattaaaactgaacagcttttatgtacagctctgattctgtaatactaatatttatttactttgtttcataaattgtacattttttcttaatgttgtggattgcttttctatgtgaagcatgggatttactgttgcgtaactagaacaaaaatgtacattgtaaacaagatatttaaactagagtatcttattctgcacttatgcattagttaaaaaaagataaaggatgtatcagtcagttcttaactcttgtatatttttttgtctcttgtttgctggattgactataacttaagtgctgattgtgattttaaaatgatagtaccgtaaagcattaaagtaaacaatgtgctattgtgagttttttcaaagctttataaatcagttataaataatattaaaagtatttggtcttatgtgaacatgttgatctatatactcatctaaaaatatgggaaaacattccaccccatgtaaatatgtacaagtgcatcactggtacaattttatgtaactcagttggacactaggttgccacagacctatgctaggtgtctttaaaaaattaaggtgacaaagcacatgggactgtgtagagcttggttatcggccggcccggtggcttggcaggcagtgctgtgcgctgctcatggagaagacctgggcttagcaatctccttagttcttgctacacaggatggtgactggaactaaggctacacagagggtcgcacttggactctgagggttgggtgtggaagggggaaaaggagatggagacctgctccccagctcttcctgtcagccggtttacatgggaacagggttaacatctgtgttaggggaggtcaccttaccctttttcataggggaagagtgtcacactcctggctatctcagggggaatggggaaaagaatctttcaagggcaaagaactcgtgggaggatgtctgttgtatgtaatactcacaatggcttttggttagtgttgaaggtgggaagagcatttgtaggtccagaagagtgaaagagagggaggggtgcagcaacatgtgcacaggcacgcacatgtgtgcacgcacacatacaatctgggttatctttgtgctatatagtggattataattctgtgaaaccaagtttgtatattgaattacattaaggagtgttctttaaaaagagaaataaatatacaattacatgctt

SEQ ID NO: 13979 - DNA, 9723 bp, Homo sapiens
  source 1..9723: mol_type = unassigned DNA
gctggaggcaggaatgtgcctgcttactaatgagcgacgtgcaccggcgcgcacggcccggccaccgctgcggctgcggcggccggcggcggcccgttgtcaggtggagcctttgaattttttaaaagaccatagtaatcagatctacttgaaaaattaagtgaattgatttggttggaatgctcttttaccgatgctttaacatacagccactagattcccagaagttgtgcatgagttcctgtgaggagagttggcatcttggaaatcaaagacggttgtgatgcagttttttgatatgaggataacaggaagcgtcaggacaatcatgcccataagaactctaaactgttcagatcattttatcttagtgaaactggcaattgaactttgctctagttgatgggcaaaatttctcctagactattcatcatcccaatttcatcctagttgaaaattttcaaatgccataagaaatctttatagatttgcacttagcttttggatggacgtttctacaatggagagaactgtgttatagccctggtccaaggacattactagctaatgcccatcgactgtggtgtgcgtgtggaaggttccaaagagaaggagcaatcagcaagtttgcagacaccctggaacatggaagcaaccaagctttaagaagcacagctttggagacactccatgagtctgcactgctttcaggggaactagcacttaagaccttgtgtaacaaaatggacactggggacacagctctaggacaaaaagctacctcaaggtctggagaaactgataaagcatcaggtagatggagacaggaacaatcagctgttattaagatgagcacttttggcagtcatgaaggacagcggcaaccacaaatagagcctgagcaaatcggaaacacagcatcagcacaactgtttggttctgggaaactggcctcccctagtgaagtggtgcagcaagtcgcagagaagcaatatccaccgcatcgtccgagtccttactcatgccaacactcactctctttccctcagcactcattgccacagggggtcatgcacagcaccaagccacatcagagcctcgaaggtcctccgtggcttttccctggccctttgccatccgttgcctctgaggacttatttccttttcctatacatggccacagtggtggttatcctagaaaaaagatttcaagtctgaaccctgcttatagccaatactcccagaaaagtattgaacaggcagaagaggctcacaagaaagagcacaaacccaaaaagcctggcaagtacatttgcccttactgcagcagagcgtgtgccaaacctagtgtactgaaaaaacacatcaggtcccatactggggagcggccatatccatgtataccttgtggtttctctttcaagacaaagagcaatttgtacaagcacaggaagtcacatgcccatgcaattaaggcaggattagtacctttcacagagtcagctgtatctaaattggacctagaggctggttttattgatgtagaagcagaaatacattcagatggtgaacagagtacagacacagatgaggagagttctttatttgccgaggcttctgacaaaatgagtcctggtccacccatcccactggacattgccagcagaggcggctatcatgggtcattggaagaatcattgggaggtccaatgaaggtgccgattttgattatccctaaaagtgggattcctctccctaatgaaagctctcagtatattggccctgatatgctaccaaatccatctttaaatactaaggctgatgattcgcacacagtcaaacagaaacttgcactaagactgtcagagaaaaaaggacaagattctgagccatcgctcaaccttctgagcccgcacagtaaaggaagcactgattctggttacttttctcgctcagaaagtgctgagcagcaaataagccctcccaacacaaatgcaaagtcttatgaagaaatcatctttggaaaatactgtcggcttagtccgagaaatgcactcagtgttacaaccacaagtcaggagcgtgccgcaatgggtaggaagggcataatggaaccattacctcacgttaacaccaggttagatgtcaagatgtttgaagatcctgtttcacagctgatcccaagcaagggagatgtcgaccccagtcaaacgagcatgctgaaatccactaagttcaacagtgagtccagacaaccccagattattccatcatctatcaggaacgaaggaaaactttatccagcaaacttccaaggcagcaacccggttctcttagaagctcctgtagactcttcaccccttattagaagcaactcagtgccaacttcttcagcaactaatctaactattcctccttctttgagaggaagtcactcatttgatgaaaggatgactggttccgacgatgtattctatccagggaccgtgggcataccccctcagcgcatgctaagaagacaagcggcatttgagctgccttcggtacaggagggccacgtggaagtcgagcaccatggcaggatgttgaagggtatcagcagttcatccctgaaggaaaagaaattgtctcctggggacagggttgggtatgactatgatgtctgtcggaaaccctataagaagtgggaggactctgaaacaccaaagcaaaactacagggacatttcctgcttgagttctttaaagcatggtggagaatatttcatggatcccgtggtgccattgcagggagtaccaagcatgtttggaactacctgtgaaaacaggaaacgccggaaagagaagagcgtaggggatgaagaggacacgcccatgatctgcagcagcattgtaagcactcctgtgggcatcatggcttccgattatgaccccaaactgcagatgcaggaaggagtcaggagtggatttgccatggctggacacgaaaacctttctcatggtcacacggaacgctttgacccatgtcggccccaactgcagcctggaagtccatctcttgtgtcagaggagtcaccttcagccattgattcagacaagatgtcagacctagggggcaggaaacctcctggaaatgtgatttctgtgattcagcacaccaactcactgagccgacccaattcatttgaaaggtctgagtcagccgaacttgtggcttgcacacaggataaagccccttccccttcagagacttgtgacagtgagatttcagaagccccagtgagtcctgagtgggctccacctggggatggtgcagaaagtggggggaaaccctctccatctcagcaggtgcagcagcagtcctatcacacacagcccaggctagttcggcaacacaacatccaggttcctgagattcgagtgaccgaggagcctgataaacctgagaaggagaaggaagcccagagcaaagagccagagaagcctgtggaagaatttcagtggccccagagaagtgagaccctttcccagctccccgcggagaagttgccacccaaaaagaagcgtctgcgacttgcagatatggagcactcctcaggggagtccagctttgaatccacaggcacaggcctctcccgcagccccagccaagaaagcaacttgtcccacagctccagtttctccatgtcttttgaaagagaagaaaccagtaagctttctgcacttcctaagcaggatgagtttgggaagcattcagagtttctgactgtccctgctggttcatactcattgtctgtcccaggccatcaccaccagaaagagatgcgacgctgctcatcagagcagatgccttgtcctcacccagcggaagtcccagaagttcggagcaaatcatttgattatgggaatctgtcccatgctcctgtgtcgggagcagcagcctccacggtatcaccgtccagggagaggaagaaatgctttctggtgcggcaagcttccttcagtggctccccagaaatctcccagggcgaggttggcatggatcagagcgtgaagcaagagcagctggagcacctgcatgctggcctccggtccgggtggcaccatggcccgcctgctgtgctgcctcctcttcagcaagaggacccagggaagcaggtggcgggtccttgtcccccgctgagctcggggccactgcacctggcccagccacagatcatgcacatggacagtcaggaatctttgagaaatcccttgatccaaccaacatcctatatgacaagcaagcacttacctgaacagccacacttatttccacatcaagagacaattccattttctccaatccagaatgccttgtttcagtttcagtatcctacagtttgtatggttcatttaccagctcagcagcctccctggtggcaggcacatttcccacatccctttgctcagcaccctcagaagagctatggcaagccctcttttcagacagaaatccattcgagctatcccttagagcatgtggcagagcacactggaaagaaacctgctgagtatgcacacacgaaagagcagacctacccatgttattcaggagcatcagggctacacccaaagaaccttcttccaaagtttccatcagaccagagcagtaagtcaactgaaacgccctctgagcaggttcttcaagaagattttgcctcggcaaatgctgggtctttgcagtccctcccaggaacagtggttcctgttcggatccagacgcacgtaccatcctatggaagtgtcatgtacacaagcatttctcagatacttgggcagaatagccctgccattgtcatatgcaaagtcgatgagaatatgacccaaaggacactggtcaccaacgcagccatgcaagggataggattcaacattgcccaggtgctggggcagcatgcgggcttggagaagtaccccatttggaaagcacctcagactttgcccctcggcttagaatcctccatccccttgtgtttaccttccacctctgacagcgtggccaccctgggaggtagcaagcgaatgctttctccagccagtagcttggagctcttcatggaaaccaagcagcagaaaagggtcaaagaagaaaagatgtacggacagattgtggaggagcttagtgctgtggagctgaccaactcagacatcaaaaaggacctctcccgcccccagaaaccccagctggttcgacaaggatgtgcttctgagccaaaagatggcttgcagtcagggtcatcttccttctcctcgctgtcgccctcctcatctcaagactatccttctgttagcccgtcttccagggagccattcctgcccagcaaggagatgctttccggttcccgggcaccacttccggggcagaagtccagtgggccttctgaaagcaaagaatcttcagatgaattagatatcgatgagacggcatcggacatgagcatgagcccacagagttcttcattaccagcaggagatggtcagctggaagaggaagggaagggccacaagcggcctgttggcatgctggtccgcatggcctctgcccccagcgggaacgtggcagactcaactcttcttctcacggacatggcagatttccagcagattcttcagttccccagtctgcggacaacaactactgtgagttggtgcttcttgaattatacaaaacccaattatgtgcaacaggccaccttcaaatcctcggtttatgcttcatggtgcattagttcctgtaatccaaacccatcaggattgaacaccaagaccacgctggctcttctgaggtccaagcaaaaaatcactgcagaaatttatactctggctgctatgcataggcctggaaccggcaagcttacatcatcaagtgcttggaagcagtttactcagatgaaacctgatgcgtcctttttatttggcagcaaactagaaaggaaactagtgggaaatatcttaaaggaaagagggaaaggagatattcatggagataaagatattggatccaaacaaactgagccaatccgaattaaaatatttgaaggagggtacaaatcgaatgaagattatgtatatgtcagaggacgtggccggggaaagtacatttgtgaagaatgtgggattcgctgtaagaagccaagcatgctcaaaaaacacatccgtacccatactgatgttcggccttatgtatgcaagttatgtaactttgccttcaaaacgaaaggaaacctaacgaagcatatgaaatctaaagcacacatgaaaaaatgcctggaattgggagtctcaatgacatcggtggatgatacagaaactgaggaagcagaaaatttggaagatttgcacaaagcagcagagaagcatagcatgtccagcatttcaactgatcatcagttctccgatgctgaggaatcagatggtgaggatggagatgataatgatgatgatgatgaagatgaagatgactttgacgaccagggagatttaacaccaaaaacaagatcaagaagcaccagtcctcagcctcctagattctcctccttgcctgtgaatgttggcgccgtaccccacggggttccttcagatagttccctgggacattcttcgttgatcagctatttggttactttgccaagtattcgagttactcagcttatgacacccagtgattcatgtgaagatacccagatgacagaataccagaggctattccagagcaaaagtacggactcagaaccagacaaagacagattggacatacctagttgtatggatgaggagtgcatgctaccttcagagccaagctcctctcccagggacttctcaccctcaagccaccattcctctccaggatatgattcttcaccctgtcgagataattcaccaaagaggtatctgatacccaaaggagatttatctcccaggagacatttatcacctaggagagatctgtcacccatgagacatctttcaccaagaaaggaagctgcattgagaagagagatgtcccaaagagatgtttcaccaagaaggcatttgtctccaaggaggccagtgtctcctgggaaagatatcacagcaagaagagacctctctcctagaagagagagaagatacatgaccacaataagagcgccatctcccagaagggctttataccataacccaccattgtccatgggacagtatttgcaagcagagccaattgtattggggcctcctaatttaagaagaggattacctcaggttccttacttcagtctctatggagaccaagaaggtgcttatgaacatccaggctccagccttttccctgagggtcctaatgactatgtcttcagtcatcttccactccactctcagcaacaagtgcgagcccctatccccatggtgcccgttggtgggatccagatggttcactccatgccgccagccctttccagtttacatccttcacccacattgcccctgccaatggagggctttgaggagaagaaaggcgcgtcaggggagtccttctccaaggacccctatgtgctttctaagcagcatgagaagcgaggtcctcacgctttgcagtcatctggtccacctagcactccctcctctcctcggctgttgatgaaacagagcacttcggaagacagcctaaacgcaacagagcgggaacaggaggaaaatatacagacttgtacaaaagccattgcctctctccggattgccacggaagaggcagctctgctcgggccagatcagccagcgcgggtgcaggagccccaccagaaccccctgggaagtgcacatgttagcattagacactttagtagacctgagccaggtcagccctgtacctcagccacccaccctgacttgcatgatggtgaaaaggacaattttggtacatcacagactccattagctcactccacgttttacagcaagagttgtgtggatgacaagcagttggactttcacagcagcaaggaattatcttcaagcacagaggaaagcaaagatccttcatcagaaaagagtcagctacattgatctatgatgcatggagactttcatttccacattttcccatttttttgtttttgtttttctagaaatggaggtaatccagtttatagcatgcctgtcctaagttacagtagtttgctattatatatacttttgttatatcaaaagaattaggtaaattaacaagtcatcatgagcctgaccaaaacaaaatttgaaattaacctattgggtctggtacttttaaaattgtacagatgtttgtgccttttctttactttgcttatattcttataagcattttttagcagtaatttgtacatattttagaatttgtgtatctgctttgtaataaatgtaatttctttccttttttggacacttggatctaaatgatgtaaagcaaaacagcatcaatatatatgtgaggttgcactaaaacatatttttatatgattaaaactgaacagcttttatgtacagctctgattctgtaatactaatatttatttactttgtttcataaattgtacattttttcttaatgttgtggattgcttttctatgtgaagcatgggatttactgttgcgtaactagaacaaaaatgtacattgtaaacaagatatttaaactagagtatcttattctgcacttatgcattagttaaaaaaagataaaggatgtatcagtcagttcttaactcttgtatatttttttgtctcttgtttgctggattgactataacttaagtgctgattgtgattttaaaatgatagtaccgtaaagcattaaagtaaacaatgtgctattgtgagttttttcaaagctttataaatcagttataaataatattaaaagtatttggtcttatgtgaacatgttgatctatatactcatctaaaaatatgggaaaacattccaccccatgtaaatatgtacaagtgcatcactggtacaattttatgtaactcagttggacactaggttgccacagacctatgctaggtgtctttaaaaaattaaggtgacaaagcacatgggactgtgtagagcttggttatcggccggcccggtggcttggcaggcagtgctgtgcgctgctcatggagaagacctgggcttagcaatctccttagttcttgctacacaggatggtgactggaactaaggctacacagagggtcgcacttggactctgagggttgggtgtggaagggggaaaaggagatggagacctgctccccagctcttcctgtcagccggtttacatgggaacagggttaacatctgtgttaggggaggtcaccttaccctttttcataggggaagagtgtcacactcctggctatctcagggggaatggggaaaagaatctttcaagggcaaagaactcgtgggaggatgtctgttgtatgtaatactcacaatggcttttggttagtgttgaaggtgggaagagcatttgtaggtccagaagagtgaaagagagggaggggtgcagcaacatgtgcacaggcacgcacatgtgtgcacgcacacatacaatctgggttatctttgtgctatatagtggattataattctgtgaaaccaagtttgtatattgaattacattaaggagtgttctttaaaaagagaaataaatatacaattacatgcttg

SEQ ID NO: 13980 - DNA, 9621 bp, Homo sapiens
  source 1..9621: mol_type = unassigned DNA
gtggagcctttgaattttttaaaagaccatagtaatcagatctacttgaaaaattaagtgaattgatttggttggaatgctcttttaccgatgctttaacatacagccactagattcccagaagttgtgcatgagttcctgtgaggagagttggcatcttggaaatcaaagacggttgtgatgcagttttttgatatgaggataacaggaagcgtcaggacaatcatgcccataagaactctaaactgttcagatcattttatcttagtgaaactggcaattgaactttgctctagttgatgggcaaaatttctcctagactattcatcatcccaatttcatcctagttgaaaattttcaaatgccataagaaatctttatagatttgcacttagcttttggatggacgtttctacaatggagagaactgtgttatagccctggtccaaggacattactagctaatgcccatcgactgtggtgtgcgtgtggaaggttccaaagagaaggagcaatcagcaagtttgcagacaccctggaacatggaagcaaccaagctttaagaagcacagctttggagacactccatgagtctgcactgctttcaggggaactagcacttaagaccttgtgtaacaaaatggacactggggacacagctctaggacaaaaagctacctcaaggtctggagaaactgataaagcatcaggtagatggagacaggaacaatcagctgttattaagatgagcacttttggcagtcatgaaggacagcggcaaccacaaatagagcctgagcaaatcggaaacacagcatcagcacaactgtttggttctgggaaactggcctcccctagtgaagtggtgcagcaagtcgcagagaagcaatatccaccgcatcgtccgagtccttactcatgccaacactcactctctttccctcagcactcattgccacagggggtcatgcacagcaccaagccacatcagagcctcgaaggtcctccgtggcttttccctggccctttgccatccgttgcctctgaggacttatttccttttcctatacatggccacagtggtggttatcctagaaaaaagatttcaagtctgaaccctgcttatagccaatactcccagaaaagtattgaacaggcagaagaggctcacaagaaagagcacaaacccaaaaagcctggcaagtacatttgcccttactgcagcagagcgtgtgccaaacctagtgtactgaaaaaacacatcaggtcccatactggggagcggccatatccatgtataccttgtggtttctctttcaagacaaagagcaatttgtacaagcacaggaagtcacatgcccatgcaattaaggcaggattagtacctttcacagagtcagctgtatctaaattggacctagaggctggttttattgatgtagaagcagaaatacattcagatggtgaacagagtacagacacagatgaggagagttctttatttgccgaggcttctgacaaaatgagtcctggtccacccatcccactggacattgccagcagaggcggctatcatgggtcattggaagaatcattgggaggtccaatgaaggtgccgattttgattatccctaaaagtgggattcctctccctaatgaaagctctcagtatattggccctgatatgctaccaaatccatctttaaatactaaggctgatgattcgcacacagtcaaacagaaacttgcactaagactgtcagagaaaaaaggacaagattctgagccatcgctcaaccttctgagcccgcacagtaaaggaagcactgattctggttacttttctcgctcagaaagtgctgagcagcaaataagccctcccaacacaaatgcaaagtcttatgaagaaatcatctttggaaaatactgtcggcttagtccgagaaatgcactcagtgttacaaccacaagtcaggagcgtgccgcaatgggtaggaagggcataatggaaccattacctcacgttaacaccaggttagatgtcaagatgtttgaagatcctgtttcacagctgatcccaagcaagggagatgtcgaccccagtcaaacgagcatgctgaaatccactaagttcaacagtgagtccagacaaccccagattattccatcatctatcaggaacgaaggaaaactttatccagcaaacttccaaggcagcaacccggttctcttagaagctcctgtagactcttcaccccttattagaagcaactcagtgccaacttcttcagcaactaatctaactattcctccttctttgagaggaagtcactcatttgatgaaaggatgactggttccgacgatgtattctatccagggaccgtgggcataccccctcagcgcatgctaagaagacaagcggcatttgagctgccttcggtacaggagggccacgtggaagtcgagcaccatggcaggatgttgaagggtatcagcagttcatccctgaaggaaaagaaattgtctcctggggacagggttgggtatgactatgatgtctgtcggaaaccctataagaagtgggaggactctgaaacaccaaagcaaaactacagggacatttcctgcttgagttctttaaagcatggtggagaatatttcatggatcccgtggtgccattgcagggagtaccaagcatgtttggaactacctgtgaaaacaggaaacgccggaaagagaagagcgtaggggatgaagaggacacgcccatgatctgcagcagcattgtaagcactcctgtgggcatcatggcttccgattatgaccccaaactgcagatgcaggaaggagtcaggagtggatttgccatggctggacacgaaaacctttctcatggtcacacggaacgctttgacccatgtcggccccaactgcagcctggaagtccatctcttgtgtcagaggagtcaccttcagccattgattcagacaagatgtcagacctagggggcaggaaacctcctggaaatgtgatttctgtgattcagcacaccaactcactgagccgacccaattcatttgaaaggtctgagtcagccgaacttgtggcttgcacacaggataaagccccttccccttcagagacttgtgacagtgagatttcagaagccccagtgagtcctgagtgggctccacctggggatggtgcagaaagtggggggaaaccctctccatctcagcaggtgcagcagcagtcctatcacacacagcccaggctagttcggcaacacaacatccaggttcctgagattcgagtgaccgaggagcctgataaacctgagaaggagaaggaagcccagagcaaagagccagagaagcctgtggaagaatttcagtggccccagagaagtgagaccctttcccagctccccgcggagaagttgccacccaaaaagaagcgtctgcgacttgcagatatggagcactcctcaggggagtccagctttgaatccacaggcacaggcctctcccgcagccccagccaagaaagcaacttgtcccacagctccagtttctccatgtcttttgaaagagaagaaaccagtaagctttctgcacttcctaagcaggatgagtttgggaagcattcagagtttctgactgtccctgctggttcatactcattgtctgtcccaggccatcaccaccagaaagagatgcgacgctgctcatcagagcagatgccttgtcctcacccagcggaagtcccagaagttcggagcaaatcatttgattatgggaatctgtcccatgctcctgtgtcgggagcagcagcctccacggtatcaccgtccagggagaggaagaaatgctttctggtgcggcaagcttccttcagtggctccccagaaatctcccagggcgaggttggcatggatcagagcgtgaagcaagagcagctggagcacctgcatgctggcctccggtccgggtggcaccatggcccgcctgctgtgctgcctcctcttcagcaagaggacccagggaagcaggtggcgggtccttgtcccccgctgagctcggggccactgcacctggcccagccacagatcatgcacatggacagtcaggaatctttgagaaatcccttgatccaaccaacatcctatatgacaagcaagcacttacctgaacagccacacttatttccacatcaagagacaattccattttctccaatccagaatgccttgtttcagtttcagtatcctacagtttgtatggttcatttaccagctcagcagcctccctggtggcaggcacatttcccacatccctttgctcagcaccctcagaagagctatggcaagccctcttttcagacagaaatccattcgagctatcccttagagcatgtggcagagcacactggaaagaaacctgctgagtatgcacacacgaaagagcagacctacccatgttattcaggagcatcagggctacacccaaagaaccttcttccaaagtttccatcagaccagagcagtaagtcaactgaaacgccctctgagcaggttcttcaagaagattttgcctcggcaaatgctgggtctttgcagtccctcccaggaacagtggttcctgttcggatccagacgcacgtaccatcctatggaagtgtcatgtacacaagcatttctcagatacttgggcagaatagccctgccattgtcatatgcaaagtcgatgagaatatgacccaaaggacactggtcaccaacgcagccatgcaagggataggattcaacattgcccaggtgctggggcagcatgcgggcttggagaagtaccccatttggaaagcacctcagactttgcccctcggcttagaatcctccatccccttgtgtttaccttccacctctgacagcgtggccaccctgggaggtagcaagcgaatgctttctccagccagtagcttggagctcttcatggaaaccaagcagcagaaaagggtcaaagaagaaaagatgtacggacagattgtggaggagcttagtgctgtggagctgaccaactcagacatcaaaaaggacctctcccgcccccagaaaccccagctggttcgacaaggatgtgcttctgagccaaaagatggcttgcagtcagggtcatcttccttctcctcgctgtcgccctcctcatctcaagactatccttctgttagcccgtcttccagggagccattcctgcccagcaaggagatgctttccggttcccgggcaccacttccggggcagaagtccagtgggccttctgaaagcaaagaatcttcagatgaattagatatcgatgagacggcatcggacatgagcatgagcccacagagttcttcattaccagcaggagatggtcagctggaagaggaagggaagggccacaagcggcctgttggcatgctggtccgcatggcctctgcccccagcgggaacgtggcagactcaactcttcttctcacggacatggcagatttccagcagattcttcagttccccagtctgcggacaacaactactgtgagttggtgcttcttgaattatacaaaacccaattatgtgcaacaggccaccttcaaatcctcggtttatgcttcatggtgcattagttcctgtaatccaaacccatcaggattgaacaccaagaccacgctggctcttctgaggtccaagcaaaaaatcactgcagaaatttatactctggctgctatgcataggcctggaaccggcaagcttacatcatcaagtgcttggaagcagtttactcagatgaaacctgatgcgtcctttttatttggcagcaaactagaaaggaaactagtgggaaatatcttaaaggaaagagggaaaggagatattcatggagataaagatattggatccaaacaaactgagccaatccgaattaaaatatttgaaggagggtacaaatcgaatgaagattatgtatatgtcagaggacgtggccggggaaagtacatttgtgaagaatgtgggattcgctgtaagaagccaagcatgctcaaaaaacacatccgtacccatactgatgttcggccttatgtatgcaagttatgtaactttgccttcaaaacgaaaggaaacctaacgaagcatatgaaatctaaagcacacatgaaaaaatgcctggaattgggagtctcaatgacatcggtggatgatacagaaactgaggaagcagaaaatttggaagatttgcacaaagcagcagagaagcatagcatgtccagcatttcaactgatcatcagttctccgatgctgaggaatcagatggtgaggatggagatgataatgatgatgatgatgaagatgaagatgactttgacgaccagggagatttaacaccaaaaacaagatcaagaagcaccagtcctcagcctcctagattctcctccttgcctgtgaatgttggcgccgtaccccacggggttccttcagatagttccctgggacattcttcgttgatcagctatttggttactttgccaagtattcgagttactcagcttatgacacccagtgattcatgtgaagatacccagatgacagaataccagaggctattccagagcaaaagtacggactcagaaccagacaaagacagattggacatacctagttgtatggatgaggagtgcatgctaccttcagagccaagctcctctcccagggacttctcaccctcaagccaccattcctctccaggatatgattcttcaccctgtcgagataattcaccaaagaggtatctgatacccaaaggagatttatctcccaggagacatttatcacctaggagagatctgtcacccatgagacatctttcaccaagaaaggaagctgcattgagaagagagatgtcccaaagagatgtttcaccaagaaggcatttgtctccaaggaggccagtgtctcctgggaaagatatcacagcaagaagagacctctctcctagaagagagagaagatacatgaccacaataagagcgccatctcccagaagggctttataccataacccaccattgtccatgggacagtatttgcaagcagagccaattgtattggggcctcctaatttaagaagaggattacctcaggttccttacttcagtctctatggagaccaagaaggtgcttatgaacatccaggctccagccttttccctgagggtcctaatgactatgtcttcagtcatcttccactccactctcagcaacaagtgcgagcccctatccccatggtgcccgttggtgggatccagatggttcactccatgccgccagccctttccagtttacatccttcacccacattgcccctgccaatggagggctttgaggagaagaaaggcgcgtcaggggagtccttctccaaggacccctatgtgctttctaagcagcatgagaagcgaggtcctcacgctttgcagtcatctggtccacctagcactccctcctctcctcggctgttgatgaaacagagcacttcggaagacagcctaaacgcaacagagcgggaacaggaggaaaatatacagacttgtacaaaagccattgcctctctccggattgccacggaagaggcagctctgctcgggccagatcagccagcgcgggtgcaggagccccaccagaaccccctgggaagtgcacatgttagcattagacactttagtagacctgagccaggtcagccctgtacctcagccacccaccctgacttgcatgatggtgaaaaggacaattttggtacatcacagactccattagctcactccacgttttacagcaagagttgtgtggatgacaagcagttggactttcacagcagcaaggaattatcttcaagcacagaggaaagcaaagatccttcatcagaaaagagtcagctacattgatctatgatgcatggagactttcatttccacattttcccatttttttgtttttgtttttctagaaatggaggtaatccagtttatagcatgcctgtcctaagttacagtagtttgctattatatatacttttgttatatcaaaagaattaggtaaattaacaagtcatcatgagcctgaccaaaacaaaatttgaaattaacctattgggtctggtacttttaaaattgtacagatgtttgtgccttttctttactttgcttatattcttataagcattttttagcagtaatttgtacatattttagaatttgtgtatctgctttgtaataaatgtaatttctttccttttttggacacttggatctaaatgatgtaaagcaaaacagcatcaatatatatgtgaggttgcactaaaacatatttttatatgattaaaactgaacagcttttatgtacagctctgattctgtaatactaatatttatttactttgtttcataaattgtacattttttcttaatgttgtggattgcttttctatgtgaagcatgggatttactgttgcgtaactagaacaaaaatgtacattgtaaacaagatatttaaactagagtatcttattctgcacttatgcattagttaaaaaaagataaaggatgtatcagtcagttcttaactcttgtatatttttttgtctcttgtttgctggattgactataacttaagtgctgattgtgattttaaaatgatagtaccgtaaagcattaaagtaaacaatgtgctattgtgagttttttcaaagctttataaatcagttataaataatattaaaagtatttggtcttatgtgaacatgttgatctatatactcatctaaaaatatgggaaaacattccaccccatgtaaatatgtacaagtgcatcactggtacaattttatgtaactcagttggacactaggttgccacagacctatgctaggtgtctttaaaaaattaaggtgacaaagcacatgggactgtgtagagcttggttatcggccggcccggtggcttggcaggcagtgctgtgcgctgctcatggagaagacctgggcttagcaatctccttagttcttgctacacaggatggtgactggaactaaggctacacagagggtcgcacttggactctgagggttgggtgtggaagggggaaaaggagatggagacctgctccccagctcttcctgtcagccggtttacatgggaacagggttaacatctgtgttaggggaggtcaccttaccctttttcataggggaagagtgtcacactcctggctatctcagggggaatggggaaaagaatctttcaagggcaaagaactcgtgggaggatgtctgttgtatgtaatactcacaatggcttttggttagtgttgaaggtgggaagagcatttgtaggtccagaagagtgaaagagagggaggggtgcagcaacatgtgcacaggcacgcacatgtgtgcacgcacacatacaatctgggttatctttgtgctatatagtggattataattctgtgaaaccaagtttgtatattgaattacattaaggagtgttctttaaaaagagaaataaatatacaattacatgcttga

SEQ ID NO: 13981 - DNA, 8465 bp, Homo sapiens
  source 1..8465: mol_type = unassigned DNA
ccacaggcctccctccaacacagttctccaagctctagaaatctctgacacatcttgaccatgagaccacggctggtttttggcaggattcgaggcacaaacccagcagcctcaacctagttcatggaggagcctcgcggggtcctggccaagcaagcccgcccctctggtgggaagagcggcgcctaggtggagggtggctgccgtaggagtggacatgaatgctggctttcagagagaacagcgtttcagttttggtcatcggaagtggtgccttcagcacagaagaagagcgtgatttctcctccaaggccgttgatctccaacccagaactaaaggggagaagagccacccccagcatccagcgtggcatctcttgtgccaggaccagggatgactgggccatggacacagatgtctccaaccttcaaccgtttgcatagcacacgggggactcgtgggggccacctgccactgccagctgaaacaatacaatggcaatactgacatccttcatgacgttttcccgacagacattcaggcagaaagtgctggtgcgttttctgtctgcaaagtagagggccatgcctcaccaatagaatagcgtgggccctgatgacctgctccgagtccactcacagccagtgacacttgcaaaaaactcccaaagccgtcttgggtttggctcccacagctcttgaccaatgtggccaaagctggacacctccttgggacactgggattattcataaatgcagcccgccctgactctccctgaatagcatctgaagtctttgtgaaggtcatggatcctgaacaaagtgtcaagggcaccaagaaggctgagggaagtccccggaagcggctgaccaaaggagaggccattcagaccagtgtttcttccagcgtcccatacccaggcagcggcacagctgccacccaagagagccccgcccaagagctcttagccccgcagcccttcccgggcccctcatcagttcttagggaaggctctcaggagaaaacgggccagcagcagaagccccccaaaaggccccccatcgaagcatccgtccacatctcacagcttccgcagcaccctctgacaccagcattcatgtcgcctggcaaacctgagcatctcctggaggggtccacatggcaactggttgaccccatgagacctggaccctctggctccttcgtggcccctgggctccatcctcagagccagctccttccttcccacgcttccatcattccccccgaggaccttcctggagtccccaaagtcttcgtgcctcgtccttcccaggtctccttgaagcccacagaagaggcacacaagaaggagaggaagccccagaagccaggcaagtacatctgccagtactgcagccggccctgtgccaagcccagcgtgctccagaagcacattcgctcacacacaggtgagaggccctacccctgcggcccctgtggcttctccttcaagaccaagagtaatctctacaagcacaggaagtcccatgcccaccgcatcaaagcaggcctggcctcaggcatgggtggcgagatgtacccacatgggctggagatggagcggatccctggggaagagtttgaggagcccactgagggagaaagcacagattctgaagaggagactagtgccacctctggtcaccctgcagagctctccccaagacccaagcagccccttctctccagcgggctatacagctctgggagccacagttccagccacgaacgctgttccctgtcccagtccagcacagcccagtcactcgaagacccccctccatttgtggaaccctcatctgagcaccccctgagccataaacctgaagacacccacacgattaagcagaagctggccctccgcttaagcgagaggaagaaggtgatcgatgagcaggcgtttctgagcccaggcagcaaagggagtactgagtctgggtatttctctcgctccgagagtgcagagcagcaggtcagccccccaaacaccaacgccaagtcctacgctgagatcatctttggcaagtgtgggcgaataggacagcggaccgccatgctgacagccacctccacccagcccctcctgcccctgtccaccgaagacaagcccagcctggtgcctttgtctgtaccccggacgcaggtgatcgagcacatcacgaagctcatcaccatcaacgaggccgtggtggacaccagcgagatcgacagcgtgaagccaaggcggagctcactgtccaggcgcagcagcatggagtccccaaaatccagcctctaccgggagcccctgtcatcccacagtgagaaaaccaagcctgaacaatcactgctgagcctccagcacccgcccagtaccgccccccctgtgcctctcctgagaagccactcaatgccttctgccgcctgcactatcagcaccccccaccaccccttccgaggtagctactccttcgatgaccatatcaccgactccgaagccctgagccacagcagtcacgtgtttacctcccacccccggatgctgaagcgccagccggcaatcgaattacctttgggaggggaatacagttctgaggagcctggcccaagcagcaaagacacagcctccaagccctcggacgaagtggaacccaaggaaagcgagcttaccaaaaagaccaagaagggtttgaaaacaaaaggggtgatctacgaatgtaacatatgtggtgctcggtacaagaaaagggataactacgaagcccacaaaaaatactactgctcagagcttcagatcgcaaagcccatctctgcaggcacccacacatctccagaagctgaaaagagtcagattgagcatgagccgtggtcccaaatgatgcattacaaactgggaaccaccctggaactcactccactgaggaagaggaggaaagagaagagccttggggacgaggaagagccacctgcctttgagtccacaaaaagtcagtttggcagccccgggccatctgatgctgctcggaaccttcccctggagtccaccaagtcaccagcagaaccaagtaaatcagtgccctccttggagggacccacgggcttccagccaaggactcccaagccagggtccggttcagaatcagggaaggagaggagaacaacgtccaaagaaatttctgtcatccagcacaccagctcctttgagaaatctgattctctcgagcagccgagtggcttggaaggggaagacaaacctctggcccagttcccatcacccccacctgccccacacggacgctctgctcactccctgcagcctaagttggtccgccagcccaacattcaggttcctgagatcctagtaactgaggagcctgaccggccggacacagagccagagccgccccctaaggaacctgagaagactgaggagttccaatggccccagcgcagccagacacttgcccagctcccagctgagaagctgccacccaaaaagaagaggttgcgcctggcagagatggcccaatcatcaggggagtccagcttcgagtcctctgtgcctctgtctcgcagcccgagccaggaaagcaatgtctctttgagtgggtccagccgctcagcctcgtttgagagggatgaccatgggaaagccgaggcccccagtccctcatctgacatgcgccccaaacccctgggcacccacatgttgactgtccccagccaccacccacatgcccgagagatgcggaggtcagcctcagagcagagccccaacgtttcccattctgcccacatgaccgagacacgcagcaaatcctttgactatggcagcttgtccttgacaggcccttctgctccagccccagtggctccaccagcgcgggtggccccgccagagagaagaaaatgcttcttggtgagacaggcctctctgagcaggcctccagaatctgagttggaggttgcccccaagggaagacaggagagcgaagaaccacagccctcatccagtaaaccctctgccaaaagctcattgtcccagatttcctctgcggccacctcacatggtggacccccgggaggcaagggcccagggcaggacaggcccccattggggcccactgtgccctacacagaagcactgcaagtgttccaccaccccgttgcccagacacccctgcatgagaagccatacctgcccccaccagtctcccttttctccttccagcatctcgtgcagcatgagccaggacagtctccagaattcttctccacccaggccatgtccagcctcctgtcctcaccatactccatgcccccacttcctccctccttatttcaagccccaccgcttcctctccagcctactgttctgcacccaggccaactccatctcccccagctcatgcctcacccagccaacatccccttcaggcagcccccttccttcctccccatgccatacccgacctcctcagcactgtcttctgggtttttcctgcctctgcaatcccagtttgcacttcagctccctggtgatgtggaaagccatctgccccagatcaaaaccagcctggccccactggcaacaggaagtgctggcctctcccccagcacagagtacagcagtgacatccggctaccccctgtggctcccccagccagctcctcagcacctacatcagctcctccactggccctgcctgcctgtccagacaccatggtgtccctggttgtgcctgtccgtgttcagaccaatatgccgtcctatgggagcgcaatgtacaccaccctttcccagatcttggtcacccagtcccaaggcagctcagcaactgtggcacttcccaagtttgaggaacccccatcaaaggggacgactgtatgtggtgcagatgtgcatgaggttgggcccggcccttctgggttaagtgaagagcaaagcagagctttcccaactccatacctgagagtgcctgtgacattacctgaaagaaaaggcacttccctgtcatcagagagtatcttgagcctggaggggagttcatcaacagcagggggaagcaaacgtgtcctttcaccagctggcagccttgaacttaccatggaaacccagcagcaaaaaagagtgaaggaggaggaggcttccaaggcagatgaaaaacttgagctggtaaaaccatgcagtgtggtccttaccagcaccgaggatgggaagaggccagagaaatcccacttaggcaaccagggccaaggcaggagggagctagaaatgctgtccagcctgtcctcagatccatctgacacaaaggaaattcctcccctccctcaccctgcattgtcccatgggacagccccaggctcagaagctttgaaggaatatccccagccatctggcaaacctcaccgaagagggttgaccccactgagcgtgaagaaagaagattccaaggaacaacctgatctcccctccttggcacctccgagctctctgcctctgtcagaaacgtcctccagaccagccaagtcacaagaaggtacggactcaaagaaggtactgcagttccccagcctccacacaaccactaatgtcagttggtgctatttaaactacattaagccaaatcacatccagcatgcagataggaggtcctctgtttacgctggttggtgcataagtttgtacaaccccaaccttccgggggtttccactaaagctgctttgtccctcctgaggtctaagcagaaagtgagcaaagagacatacaccatggccacagctccgcatcctgaggcaggaaggcttgtgccatccagctcccgcaagccccgcatgacagaggttcacctcccttcactggtttccccggaaggccagaaagatctagctagagtggagaaggaagaagagaggagaggggagccggaggaggatgctcctgcctcccagagaggggagccggcgaggatcaaaatcttcgaaggagggtacaaatcaaacgaagagtatgtatatgtgcgaggccgcggccgagggaaatatgtttgtgaggagtgtggaattcgctgcaagaagcccagcatgctgaagaaacacatccgcacccacactgacgtccggccctatgtgtgcaagcactgtcactttgcttttaaaaccaaagggaatctgactaagcacatgaagtcgaaggcccacagcaaaaagtgccaagagacaggggtgctggaggagctggaagccgaagaaggaaccagtgacgacctgttccaggactcggaaggacgagagggttcagaggctgtggaggagcaccagttttcggacctggaggactcggactcagactcagacctggacgaagacgaggatgaggatgaggaggagagccaggatgagctgtccagaccatcctcagaggcgcccccgcctggcccaccacatgcactgcgggcagactcctcacccatcctgggccctcagcccccagatgcccccgcctctggcacggaggctacacgaggcagctcggtctcggaagctgagcgcctgacagccagcagctgctccatgtccagccagagcatgccgggcctcccctggctgggaccggcccctctgggctctgtggagaaagacacaggctcagccttgagctacaagcctgtgtccccaagaagaccgtggtccccaagcaaagaagcaggcagccgtccaccactagcccgcaaacactcgctaaccaaaaacgactcatctccccagcgatgctccccggcccgagaaccacaggcctcagccccaagcccacctggcctgcacgtggacccaggaaggggcatgggcgctctcccttgtgggtctccaagacttcagctgtctcctctcaccctctgccccctgggaagagaactggcccctcgagcacatgtgctctccaaactcgagggtaccaccgacccaggcctccccagatactcgcccaccaggagatggtctccaggtcaggccgagtcaccaccacggtcagcgccgccagggaagtgggccttggctgggccgggcagcccctcagcgggggagcatggcccaggcttggggctggacccacgggttctcttcccgcccgcgcctctacctcacaagctcctcagcagaagcccagagacctgcgcctccccgtggcagaaggccgagtcccgaagtccctcctgctcacccggccctgctcatcctctctcctcccgacccttctccgccctccatgacttccacggccacatcctggcccggacagaggagaacatcttcagccacctgcctctgcactcccagcacttgacccgtgccccatgtcccttgattcccatcggtgggatccagatggtgcaggcccggccaggagcccaccccaccctgctgccagggcccaccgcagcctgggtcagtggcttctccgggggtggcagcgacctgacaggggcccgggaggcccaggagcgaggccgctggagtcccactgagagctcgtcagcctccgtgtcgcctgtggctaaggtctccaaattcacactctcctcagagctggagggcggggactaccccaaggagagggagaggaccggcggaggcccgggcaggcctcctgactggacaccccatgggaccggggcacctgcagagcccacacccacgcacagcccctgcaccccacccgacaccttgccccggccgccccagggacgccgggcagcgcagtcctggagcccccgcttggagtccccgcgtgcaccgaccaaccccgagccttctgccaccccgccgctggaccgcagcagctctgtgggctgcctggcagaggcctctgcccgcttcccagcccggacgaggaacctctccggggaacccaggaccaggcaggactcccccaagccctcaggaagtggggagcccagggcacatccacatcagcctgaggacagggttccccccaacgcttagcctctctccaactgcttcagcatctggcttccagtgtccagcaacagacgtttccagccactttcctcgaatcatcccacttcctcagccccatctgtccctccgtccaggagctctcacggccccatctgttgtaccttcccatgtatgcagttacctgtgcctttttctacaccttttgttgcttaaaaagaaacaaaacaaatcacatacatacatttaaaaaaaaaacaacaacccacgaggagtctgaggctgtgaatagtttatggttttggggaaaggctgatggtgaagcctcctgaccctccccgctgtggttggcagccacccaccccagaggctggcagagggaaaggggtacactgagggagaaaggaaaaggaaacttcaaacaatatagaattaaatgtaaaaggaagcactcctgtgtacaga

SEQ ID NO: 13982 - DNA, 12193 bp, Homo sapiens
  source 1..12193: mol_type = unassigned DNA
cctgcctggccggaataattcatgaagaaggggctggatccgtgggtcagagaacacaggaccagtttgccatcccaaggccgaaggcctccctccaacacagttctccaagctctagaaatctctgacacatcttgaccatgagaccacggctggtttttggcaggattcgaggcacaaacccagcagcctcaacctagttcatggaggagcctcgcggggtcctggccaagcaagcccgcccctctggtgggaagagcggcgcctaggtggagggtggctgccgtaggagtggacatgaatgctggctttcagagagaacagcgtttcagttttggtcatcggaagtggtgccttcagcacagaagaagagcgtgatttctcctccaaggccgttgatctccaacccagaactaaaggggagaagagccacccccagcatccagcgtggcatctcttgtgccaggaccagggatgactgggccatggacacagatgtctccaaccttcaaccgtttgcatagcacacgggggactcgtgggggccacctgccactgccagctgaaacaatacaatggcaatactgacatccttcatgacgttttcccgacagacattcaggcagaaagtgctggtgcgttttctgtctgcaaagtagagggccatgcctcaccaatagaatagcgtgggccctgatgacctgctccgagtccactcacagccagtgacacttgcaaaaaactcccaaagccgtcttgggtttggctcccacagctcttgaccaatgtggccaaagctggacacctccttgggacactgggattattcataaatgcagcccgccctgactctccctgaatagcatctgaagtctttgtgaaggtcatggatcctgaacaaagtgtcaagggcaccaagaaggctgagggaagtccccggaagcggctgaccaaaggagaggccattcagaccagtgtttcttccagcgtcccatacccaggcagcggcacagctgccacccaagagagccccgcccaagagctcttagccccgcagcccttcccgggcccctcatcagttcttagggaaggctctcaggagaaaacgggccagcagcagaagccccccaaaaggccccccatcgaagcatccgtccacatctcacagcttccgcagcaccctctgacaccagcattcatgtcgcctggcaaacctgagcatctcctggaggggtccacatggcaactggttgaccccatgagacctggaccctctggctccttcgtggcccctgggctccatcctcagagccagctccttccttcccacgcttccatcattccccccgaggaccttcctggagtccccaaagtcttcgtgcctcgtccttcccaggtctccttgaagcccacagaagaggcacacaagaaggagaggaagccccagaagccaggcaagtacatctgccagtactgcagccggccctgtgccaagcccagcgtgctccagaagcacattcgctcacacacaggtgagaggccctacccctgcggcccctgtggcttctccttcaagaccaagagtaatctctacaagcacaggaagtcccatgcccaccgcatcaaagcaggcctggcctcaggcatgggtggcgagatgtacccacatgggctggagatggagcggatccctggggaagagtttgaggagcccactgagggagaaagcacagattctgaagaggagactagtgccacctctggtcaccctgcagagctctccccaagacccaagcagccccttctctccagcgggctatacagctctgggagccacagttccagccacgaacgctgttccctgtcccagtccagcacagcccagtcactcgaagacccccctccatttgtggaaccctcatctgagcaccccctgagccataaacctgaagacacccacacgattaagcagaagctggccctccgcttaagcgagaggaagaaggtgatcgatgagcaggcgtttctgagcccaggcagcaaagggagtactgagtctgggtatttctctcgctccgagagtgcagagcagcaggtcagccccccaaacaccaacgccaagtcctacgctgagatcatctttggcaagtgtgggcgaataggacagcggaccgccatgctgacagccacctccacccagcccctcctgcccctgtccaccgaagacaagcccagcctggtgcctttgtctgtaccccggacgcaggtgatcgagcacatcacgaagctcatcaccatcaacgaggccgtggtggacaccagcgagatcgacagcgtgaagccaaggcggagctcactgtccaggcgcagcagcatggagtccccaaaatccagcctctaccgggagcccctgtcatcccacagtgagaaaaccaagcctgaacaatcactgctgagcctccagcacccgcccagtaccgccccccctgtgcctctcctgagaagccactcaatgccttctgccgcctgcactatcagcaccccccaccaccccttccgaggtagctactccttcgatgaccatatcaccgactccgaagccctgagccacagcagtcacgtgtttacctcccacccccggatgctgaagcgccagccggcaatcgaattacctttgggaggggaatacagttctgaggagcctggcccaagcagcaaagacacagcctccaagccctcggacgaagtggaacccaaggaaagcgagcttaccaaaaagaccaagaagggtttgaaaacaaaaggggtgatctacgaatgtaacatatgtggtgctcggtacaagaaaagggataactacgaagcccacaaaaaatactactgctcagagcttcagatcgcaaagcccatctctgcaggcacccacacatctccagaagctgaaaagagtcagattgagcatgagccgtggtcccaaatgatgcattacaaactgggaaccaccctggaactcactccactgaggaagaggaggaaagagaagagccttggggacgaggaagagccacctgcctttgagtccacaaaaagtcagtttggcagccccgggccatctgatgctgctcggaaccttcccctggagtccaccaagtcaccagcagaaccaagtaaatcagtgccctccttggagggacccacgggcttccagccaaggactcccaagccagggtccggttcagaatcagggaaggagaggagaacaacgtccaaagaaatttctgtcatccagcacaccagctcctttgagaaatctgattctctcgagcagccgagtggcttggaaggggaagacaaacctctggcccagttcccatcacccccacctgccccacacggacgctctgctcactccctgcagcctaagttggtccgccagcccaacattcaggttcctgagatcctagtaactgaggagcctgaccggccggacacagagccagagccgccccctaaggaacctgagaagactgaggagttccaatggccccagcgcagccagacacttgcccagctcccagctgagaagctgccacccaaaaagaagaggttgcgcctggcagagatggcccaatcatcaggggagtccagcttcgagtcctctgtgcctctgtctcgcagcccgagccaggaaagcaatgtctctttgagtgggtccagccgctcagcctcgtttgagagggatgaccatgggaaagccgaggcccccagtccctcatctgacatgcgccccaaacccctgggcacccacatgttgactgtccccagccaccacccacatgcccgagagatgcggaggtcagcctcagagcagagccccaacgtttcccattctgcccacatgaccgagacacgcagcaaatcctttgactatggcagcttgtccttgacaggcccttctgctccagccccagtggctccaccagcgcgggtggccccgccagagagaagaaaatgcttcttggtgagacaggcctctctgagcaggcctccagaatctgagttggaggttgcccccaagggaagacaggagagcgaagaaccacagccctcatccagtaaaccctctgccaaaagctcattgtcccagatttcctctgcggccacctcacatggtggacccccgggaggcaagggcccagggcaggacaggcccccattggggcccactgtgccctacacagaagcactgcaagtgttccaccaccccgttgcccagacacccctgcatgagaagccatacctgcccccaccagtctcccttttctccttccagcatctcgtgcagcatgagccaggacagtctccagaattcttctccacccaggccatgtccagcctcctgtcctcaccatactccatgcccccacttcctccctccttatttcaagccccaccgcttcctctccagcctactgttctgcacccaggccaactccatctcccccagctcatgcctcacccagccaacatccccttcaggcagcccccttccttcctccccatgccatacccgacctcctcagcactgtcttctgggtttttcctgcctctgcaatcccagtttgcacttcagctccctggtgatgtggaaagccatctgccccagatcaaaaccagcctggccccactggcaacaggaagtgctggcctctcccccagcacagagtacagcagtgacatccggctaccccctgtggctcccccagccagctcctcagcacctacatcagctcctccactggccctgcctgcctgtccagacaccatggtgtccctggttgtgcctgtccgtgttcagaccaatatgccgtcctatgggagcgcaatgtacaccaccctttcccagatcttggtcacccagtcccaaggcagctcagcaactgtggcacttcccaagtttgaggaacccccatcaaaggggacgactgtatgtggtgcagatgtgcatgaggttgggcccggcccttctgggttaagtgaagagcaaagcagagctttcccaactccatacctgagagtgcctgtgacattacctgaaagaaaaggcacttccctgtcatcagagagtatcttgagcctggaggggagttcatcaacagcagggggaagcaaacgtgtcctttcaccagctggcagccttgaacttaccatggaaacccagcagcaaaaaagagtgaaggaggaggaggcttccaaggcagatgaaaaacttgagctggtaaaaccatgcagtgtggtccttaccagcaccgaggatgggaagaggccagagaaatcccacttaggcaaccagggccaaggcaggagggagctagaaatgctgtccagcctgtcctcagatccatctgacacaaaggaaattcctcccctccctcaccctgcattgtcccatgggacagccccaggctcagaagctttgaaggaatatccccagccatctggcaaacctcaccgaagagggttgaccccactgagcgtgaagaaagaagattccaaggaacaacctgatctcccctccttggcacctccgagctctctgcctctgtcagaaacgtcctccagaccagccaagtcacaagaaggtacggactcaaagaaggtactgcagttccccagcctccacacaaccactaatgtcagttggtgctatttaaactacattaagccaaatcacatccagcatgcagataggaggtcctctgtttacgctggttggtgcataagtttgtacaaccccaaccttccgggggtttccactaaagctgctttgtccctcctgaggtctaagcagaaagtgagcaaagagacatacaccatggccacagctccgcatcctgaggcaggaaggcttgtgccatccagctcccgcaagccccgcatgacagaggttcacctcccttcactggtttccccggaaggccagaaagatctagctagagtggagaaggaagaagagaggagaggggagccggaggaggatgctcctgcctcccagagaggggagccggcgaggatcaaaatcttcgaaggagggtacaaatcaaacgaagagtatgtatatgtgcgaggccgcggccgagggaaatatgtttgtgaggagtgtggaattcgctgcaagaagcccagcatgctgaagaaacacatccgcacccacactgacgtccggccctatgtgtgcaagcactgtcactttgcttttaaaaccaaagggaatctgactaagcacatgaagtcgaaggcccacagcaaaaagtgccaagagacaggggtgctggaggagctggaagccgaagaaggaaccagtgacgacctgttccaggactcggaaggacgagagggttcagaggctgtggaggagcaccagttttcggacctggaggactcggactcagactcagacctggacgaagacgaggatgaggatgaggaggagagccaggatgagctgtccagaccatcctcagaggcgcccccgcctggcccaccacatgcactgcgggcagactcctcacccatcctgggccctcagcccccagatgcccccgcctctggcacggaggctacacgaggcagctcggtctcggaagctgagcgcctgacagccagcagctgctccatgtccagccagagcatgccgggcctcccctggctgggaccggcccctctgggctctgtggagaaagacacaggctcagccttgagctacaagcctgtgtccccaagaagaccgtggtccccaagcaaagaagcaggcagccgtccaccactagcccgcaaacactcgctaaccaaaaacgactcatctccccagcgatgctccccggcccgagaaccacaggcctcagccccaagcccacctggcctgcacgtggacccaggaaggggcatgggcgctctcccttgtgggtctccaagacttcagctgtctcctctcaccctctgccccctgggaagagaactggcccctcgagcacatgtgctctccaaactcgagggtaccaccgacccaggcctccccagatactcgcccaccaggagatggtctccaggtcaggccgagtcaccaccacggtcagcgccgccagggaagtgggccttggctgggccgggcagcccctcagcgggggagcatggcccaggcttggggctggacccacgggttctcttcccgcccgcgcctctacctcacaagctcctcagcagaagcccagagacctgcgcctccccgtggcagaaggccgagtcccgaagtccctcctgctcacccggccctgctcatcctctctcctcccgacccttctccgccctccatgacttccacggccacatcctggcccggacagaggagaacatcttcagccacctgcctctgcactcccagcacttgacccgtgccccatgtcccttgattcccatcggtgggatccagatggtgcaggcccggccaggagcccaccccaccctgctgccagggcccaccgcagcctgggtcagtggcttctccgggggtggcagcgacctgacaggggcccgggaggcccaggagcgaggccgctggagtcccactgagagctcgtcagcctccgtgtcgcctgtggctaaggtctccaaattcacactctcctcagagctggagggcggggactaccccaaggagagggagaggaccggcggaggcccgggcaggcctcctgactggacaccccatgggaccggggcacctgcagagcccacacccacgcacagcccctgcaccccacccgacaccttgccccggccgccccagggacgccgggcagcgcagtcctggagcccccgcttggagtccccgcgtgcaccgaccaaccccgagccttctgccaccccgccgctggaccgcagcagctctgtgggctgcctggcagaggcctctgcccgcttcccagcccggacgaggaacctctccggggaacccaggaccaggcaggactcccccaagccctcaggaagtggggagcccagggcacatccacatcagcctgaggacagggttccccccaacgcttagcctctctccaactgcttcagcatctggcttccagtgtccagcaacagacgtttccagccactttcctcgaatcatcccacttcctcagccccatctgtccctccgtccaggagctctcacggccccatctgttgtaccttcccatgtatgcagttacctgtgcctttttctacaccttttgttgcttaaaaagaaacaaaacaaatcacatacatacatttaaaaaaaaaacaacaacccacgaggagtctgaggctgtgaatagtttatggttttggggaaaggctgatggtgaagcctcctgaccctccccgctgtggttggcagccacccaccccagaggctggcagagggaaaggggtacactgagggagaaaggaaaaggaaacttcaaacaatatagaattaaatgtaaaaggaagcactcctgtgtacagatgcgatcaaggttcctgtttattgccacttcacccccctgcccagctcgtagccacccctctctgccagcagaaaggccagtgtccccaggcagaggggcacaaacacaggcaggtgacccccacccaggccccagcaggcaggcccagaaaaactaatcttttccttttttttttttttttttttttttgcaagaaaataaaatgatacttttcctaggatttcaacacaaaataataggtgcaggtagaaggaggagggctggctccccaagggctcctggatactctggtagtctgagtcatgggcccatcctggcactccacaggtgggcaggccaccccacccacgcacccccactccagacacctcccttctgcaccccaccctggccccctgggctggggaaggagccctgactgtccgtccctggctcccaagcccctgaccgaggcctcactctcctgttgcctcctctgttctaaaaccaccaaaccacccacaaaggcagaagtggcagggcccgagccctagcggccgttcctgagactgggttttgggttttgtttcatcttggtccctggggtacaagggagcctgttcccctcatggctgggtttttccagttctccacagcagaggtttgcggggaactgtttcaggaccactttgccacaggaccgtttccccccgtccctgcccctgtctccactaccccaaggaaatacccacaactgtggctggtggatacggcctggacctgtttgctgtcttacacctcttttttaaaaagagagaggatggtgtttgatacttcacccagccaccacagattcttttgacctagaggatttttgaattgtcctaactcgttggaattctccaaagcaatcagtgtgagccagtgcctcttccttacccacatctctactttcaagaagctgccctgcatttcctggggcaaaactctactttgtaagaaaaataataggaccagaaatttaaatcccaaattgaactatggaacttgaactctagcgtgttcgccccaactgggagaggtgagctttttcccagtgtttcagaactgattttctttactttctacaagggagggcagcacagggactacggttgaggcccgtgaaggctgggtttgatgccaccctatacagagcagggacctctctggctaatccccagtcctcagccaggctgtgtgaatcaagtgcctgccccagggctcttgagctattgaagctgcttgggtacaggacacagtaggtggggagggttaagacccttctgtgagttccctgtgcggggctgtacttgcctcttccaattcgtggcctttccctgcttggtccctactagacagacaaaccagccacagtccagcctgcagccagaccaccttgttcactcattctcctttgcctcagagctaagacaaaaatgagacagaaggcagggctccctgggagtccactgtgctccagggttctggggaatcagggttagccagcagctcctggctgcttccctcagagactagggctctcatcctccccaagagaagcagcaagcccagcctggaccacactgtccatattgctggacagtggcctgacagaaagtgactcctccaagtcccaggaggccagggcttttctcatccttgcctttcagccctaacccatgggactgcccacggattggagacttcaagggctgaggtctgggagctgcataaagggcattgcttcagcccaggttagaaatctgcctgggcaagctcttcctgccccagacctacaaagcagcagaccgggggctctggtggactagcccctgacattggtggggggccccacaccactccaccccaccctgccttccagctctcctgggcatttttctccctgtactcaaacagcctacccacccaaggtttcctccctgggcagcctagcaatgaacagtgcagccggcagggcagaggcccggcagtcaccgggcccgtcaggctcaggcagagaagccacaggggccaggagtcactggagactatttctaaatgatgggggtaaatgcacaaatagaatctcaccaaagggctgcctccacattgatgccgtgcccagagggacagaaccaatgccaccagcctgggtatatgtcactgggcacagctctaaccccctcctccggactctagtcccgctcctctgcgcacagagcccccagcccacaggtacaccttcatgatttggagaaagacgctcgccccatgcacgccctcctctgggccttctgccctgctcccagtcacttccaagcttcctgtttgcctgtgatgttattgtgcctgttgagggaagcagcagaggaggcagtggctgacttggcacagatgcctgctacgtgctctgttgaaatgcgcggggtggccattcctcggtacagactagtcctggtccttgggtgtgggcagtgggggaggaaccaactggtcgaggtttcagagccaaaccttgcctttggttggtgagtccttgccccccaggcctgcgctccacgatgcctttcacccttggcaatctcagggccatcctgggtagtaaccccactcctctctgctcccgcccgcacctgtggctctcactctgggctcaacccctgcaaccctccaggagcccgacagcagccagctgcctgcactgtcgcctccgtaagctccaacttccagacccagaagtccctctgcttccctctgttggaaaaagcctaaaagaattagcttccagattcctctagcccctgctccattcccacccagtccttctgaagaggaatgagcaatacatctgagctggatttctctctagtcctttctccagacaaatccttcttaaagcaaaagtcctggctgagcacctgtccttggggaccgatctgccgtgtgaccaggggaagaaagttcccgaaagcctgttccaccaattctgcttctgtgttgtgaatccagtctgctttccattagaaaaccgcttcggcacttatggtcactttaataaatctagtatgtaaaaaaagaaagaaagaaaagaaacagaaaaaagaaacgtgcaggcaaatgtaaaatacaatgctctctgtaagataaatatttgcctttttttctaaaaggtgtacgtattctgtatgtgaaattgtctgtagaaagtttctatgttcttaaatggcaatacattccaaaaattgtactgtagatatgtacagcaaccgcactgggatggggtagttttgcctgtaattttatttaaactccagtttccacacttgcatcttgcaatgttggtatggtatatatcagtgcaaaagaaaaaacaaaacagaaacaaacaaaaaaaaaaaacaaaaatccacgcaggtctaaagcacagagtctgacgtacaaaaggaaaaatgctcagtattgatgtgtgtgacctttgttgtaaattacatctgtactgtgaatgagaagtttttacaagtataataattgcctttattacagctctggctgagtgttcagcctgaggatattttttaaaaaaaaaagaattagcatgttggaataaatttgaaaatcccaacata

SEQ ID NO: 13983 - DNA, 12319 bp, Homo sapiens
  source 1..12319: mol_type = unassigned DNA
ctcacaaccagccgactctcccattatccagctgcctagtttggtgcttcaatgtacatggctattccgtgtgcatatgtgtgtatacaaacacgcatgcatgcctggatggacatacgtatgcacaggttattttttaaggacaattctttcaataaggtctttaccccttacttgaaacaggtgttcatgaaaaaaatgcacaaaatcctgcctggccggaataattcatgaagaaggggctggatccgtgggtcagagaacacaggaccagtttgccatcccaaggccgaaggattcgaggcacaaacccagcagcctcaacctagttcatggaggagcctcgcggggtcctggccaagcaagcccgcccctctggtgggaagagcggcgcctaggtggagggtggctgccgtaggagtggacatgaatgctggctttcagagagaacagcgtttcagttttggtcatcggaagtggtgccttcagcacagaagaagagcgtgatttctcctccaaggccgttgatctccaacccagaactaaaggggagaagagccacccccagcatccagcgtggcatctcttgtgccaggaccagggatgactgggccatggacacagatgtctccaaccttcaaccgtttgcatagcacacgggggactcgtgggggccacctgccactgccagctgaaacaatacaatggcaatactgacatccttcatgacgttttcccgacagacattcaggcagaaagtgctggtgcgttttctgtctgcaaagtagagggccatgcctcaccaatagaatagcgtgggccctgatgacctgctccgagtccactcacagccagtgacacttgcaaaaaactcccaaagccgtcttgggtttggctcccacagctcttgaccaatgtggccaaagctggacacctccttgggacactgggattattcataaatgcagcccgccctgactctccctgaatagcatctgaagtctttgtgaaggtcatggatcctgaacaaagtgtcaagggcaccaagaaggctgagggaagtccccggaagcggctgaccaaaggagaggccattcagaccagtgtttcttccagcgtcccatacccaggcagcggcacagctgccacccaagagagccccgcccaagagctcttagccccgcagcccttcccgggcccctcatcagttcttagggaaggctctcaggagaaaacgggccagcagcagaagccccccaaaaggccccccatcgaagcatccgtccacatctcacagcttccgcagcaccctctgacaccagcattcatgtcgcctggcaaacctgagcatctcctggaggggtccacatggcaactggttgaccccatgagacctggaccctctggctccttcgtggcccctgggctccatcctcagagccagctccttccttcccacgcttccatcattccccccgaggaccttcctggagtccccaaagtcttcgtgcctcgtccttcccaggtctccttgaagcccacagaagaggcacacaagaaggagaggaagccccagaagccaggcaagtacatctgccagtactgcagccggccctgtgccaagcccagcgtgctccagaagcacattcgctcacacacaggtgagaggccctacccctgcggcccctgtggcttctccttcaagaccaagagtaatctctacaagcacaggaagtcccatgcccaccgcatcaaagcaggcctggcctcaggcatgggtggcgagatgtacccacatgggctggagatggagcggatccctggggaagagtttgaggagcccactgagggagaaagcacagattctgaagaggagactagtgccacctctggtcaccctgcagagctctccccaagacccaagcagccccttctctccagcgggctatacagctctgggagccacagttccagccacgaacgctgttccctgtcccagtccagcacagcccagtcactcgaagacccccctccatttgtggaaccctcatctgagcaccccctgagccataaacctgaagacacccacacgattaagcagaagctggccctccgcttaagcgagaggaagaaggtgatcgatgagcaggcgtttctgagcccaggcagcaaagggagtactgagtctgggtatttctctcgctccgagagtgcagagcagcaggtcagccccccaaacaccaacgccaagtcctacgctgagatcatctttggcaagtgtgggcgaataggacagcggaccgccatgctgacagccacctccacccagcccctcctgcccctgtccaccgaagacaagcccagcctggtgcctttgtctgtaccccggacgcaggtgatcgagcacatcacgaagctcatcaccatcaacgaggccgtggtggacaccagcgagatcgacagcgtgaagccaaggcggagctcactgtccaggcgcagcagcatggagtccccaaaatccagcctctaccgggagcccctgtcatcccacagtgagaaaaccaagcctgaacaatcactgctgagcctccagcacccgcccagtaccgccccccctgtgcctctcctgagaagccactcaatgccttctgccgcctgcactatcagcaccccccaccaccccttccgaggtagctactccttcgatgaccatatcaccgactccgaagccctgagccacagcagtcacgtgtttacctcccacccccggatgctgaagcgccagccggcaatcgaattacctttgggaggggaatacagttctgaggagcctggcccaagcagcaaagacacagcctccaagccctcggacgaagtggaacccaaggaaagcgagcttaccaaaaagaccaagaagggtttgaaaacaaaaggggtgatctacgaatgtaacatatgtggtgctcggtacaagaaaagggataactacgaagcccacaaaaaatactactgctcagagcttcagatcgcaaagcccatctctgcaggcacccacacatctccagaagctgaaaagagtcagattgagcatgagccgtggtcccaaatgatgcattacaaactgggaaccaccctggaactcactccactgaggaagaggaggaaagagaagagccttggggacgaggaagagccacctgcctttgagtccacaaaaagtcagtttggcagccccgggccatctgatgctgctcggaaccttcccctggagtccaccaagtcaccagcagaaccaagtaaatcagtgccctccttggagggacccacgggcttccagccaaggactcccaagccagggtccggttcagaatcagggaaggagaggagaacaacgtccaaagaaatttctgtcatccagcacaccagctcctttgagaaatctgattctctcgagcagccgagtggcttggaaggggaagacaaacctctggcccagttcccatcacccccacctgccccacacggacgctctgctcactccctgcagcctaagttggtccgccagcccaacattcaggttcctgagatcctagtaactgaggagcctgaccggccggacacagagccagagccgccccctaaggaacctgagaagactgaggagttccaatggccccagcgcagccagacacttgcccagctcccagctgagaagctgccacccaaaaagaagaggttgcgcctggcagagatggcccaatcatcaggggagtccagcttcgagtcctctgtgcctctgtctcgcagcccgagccaggaaagcaatgtctctttgagtgggtccagccgctcagcctcgtttgagagggatgaccatgggaaagccgaggcccccagtccctcatctgacatgcgccccaaacccctgggcacccacatgttgactgtccccagccaccacccacatgcccgagagatgcggaggtcagcctcagagcagagccccaacgtttcccattctgcccacatgaccgagacacgcagcaaatcctttgactatggcagcttgtccttgacaggcccttctgctccagccccagtggctccaccagcgcgggtggccccgccagagagaagaaaatgcttcttggtgagacaggcctctctgagcaggcctccagaatctgagttggaggttgcccccaagggaagacaggagagcgaagaaccacagccctcatccagtaaaccctctgccaaaagctcattgtcccagatttcctctgcggccacctcacatggtggacccccgggaggcaagggcccagggcaggacaggcccccattggggcccactgtgccctacacagaagcactgcaagtgttccaccaccccgttgcccagacacccctgcatgagaagccatacctgcccccaccagtctcccttttctccttccagcatctcgtgcagcatgagccaggacagtctccagaattcttctccacccaggccatgtccagcctcctgtcctcaccatactccatgcccccacttcctccctccttatttcaagccccaccgcttcctctccagcctactgttctgcacccaggccaactccatctcccccagctcatgcctcacccagccaacatccccttcaggcagcccccttccttcctccccatgccatacccgacctcctcagcactgtcttctgggtttttcctgcctctgcaatcccagtttgcacttcagctccctggtgatgtggaaagccatctgccccagatcaaaaccagcctggccccactggcaacaggaagtgctggcctctcccccagcacagagtacagcagtgacatccggctaccccctgtggctcccccagccagctcctcagcacctacatcagctcctccactggccctgcctgcctgtccagacaccatggtgtccctggttgtgcctgtccgtgttcagaccaatatgccgtcctatgggagcgcaatgtacaccaccctttcccagatcttggtcacccagtcccaaggcagctcagcaactgtggcacttcccaagtttgaggaacccccatcaaaggggacgactgtatgtggtgcagatgtgcatgaggttgggcccggcccttctgggttaagtgaagagcaaagcagagctttcccaactccatacctgagagtgcctgtgacattacctgaaagaaaaggcacttccctgtcatcagagagtatcttgagcctggaggggagttcatcaacagcagggggaagcaaacgtgtcctttcaccagctggcagccttgaacttaccatggaaacccagcagcaaaaaagagtgaaggaggaggaggcttccaaggcagatgaaaaacttgagctggtaaaaccatgcagtgtggtccttaccagcaccgaggatgggaagaggccagagaaatcccacttaggcaaccagggccaaggcaggagggagctagaaatgctgtccagcctgtcctcagatccatctgacacaaaggaaattcctcccctccctcaccctgcattgtcccatgggacagccccaggctcagaagctttgaaggaatatccccagccatctggcaaacctcaccgaagagggttgaccccactgagcgtgaagaaagaagattccaaggaacaacctgatctcccctccttggcacctccgagctctctgcctctgtcagaaacgtcctccagaccagccaagtcacaagaaggtacggactcaaagaaggtactgcagttccccagcctccacacaaccactaatgtcagttggtgctatttaaactacattaagccaaatcacatccagcatgcagataggaggtcctctgtttacgctggttggtgcataagtttgtacaaccccaaccttccgggggtttccactaaagctgctttgtccctcctgaggtctaagcagaaagtgagcaaagagacatacaccatggccacagctccgcatcctgaggcaggaaggcttgtgccatccagctcccgcaagccccgcatgacagaggttcacctcccttcactggtttccccggaaggccagaaagatctagctagagtggagaaggaagaagagaggagaggggagccggaggaggatgctcctgcctcccagagaggggagccggcgaggatcaaaatcttcgaaggagggtacaaatcaaacgaagagtatgtatatgtgcgaggccgcggccgagggaaatatgtttgtgaggagtgtggaattcgctgcaagaagcccagcatgctgaagaaacacatccgcacccacactgacgtccggccctatgtgtgcaagcactgtcactttgcttttaaaaccaaagggaatctgactaagcacatgaagtcgaaggcccacagcaaaaagtgccaagagacaggggtgctggaggagctggaagccgaagaaggaaccagtgacgacctgttccaggactcggaaggacgagagggttcagaggctgtggaggagcaccagttttcggacctggaggactcggactcagactcagacctggacgaagacgaggatgaggatgaggaggagagccaggatgagctgtccagaccatcctcagaggcgcccccgcctggcccaccacatgcactgcgggcagactcctcacccatcctgggccctcagcccccagatgcccccgcctctggcacggaggctacacgaggcagctcggtctcggaagctgagcgcctgacagccagcagctgctccatgtccagccagagcatgccgggcctcccctggctgggaccggcccctctgggctctgtggagaaagacacaggctcagccttgagctacaagcctgtgtccccaagaagaccgtggtccccaagcaaagaagcaggcagccgtccaccactagcccgcaaacactcgctaaccaaaaacgactcatctccccagcgatgctccccggcccgagaaccacaggcctcagccccaagcccacctggcctgcacgtggacccaggaaggggcatgggcgctctcccttgtgggtctccaagacttcagctgtctcctctcaccctctgccccctgggaagagaactggcccctcgagcacatgtgctctccaaactcgagggtaccaccgacccaggcctccccagatactcgcccaccaggagatggtctccaggtcaggccgagtcaccaccacggtcagcgccgccagggaagtgggccttggctgggccgggcagcccctcagcgggggagcatggcccaggcttggggctggacccacgggttctcttcccgcccgcgcctctacctcacaagctcctcagcagaagcccagagacctgcgcctccccgtggaaggccgagtcccgaagtccctcctgctcacccggccctgctcatcctctctcctcccgacccttctccgccctccatgacttccacggccacatcctggcccggacagaggagaacatcttcagccacctgcctctgcactcccagcacttgacccgtgccccatgtcccttgattcccatcggtgggatccagatggtgcaggcccggccaggagcccaccccaccctgctgccagggcccaccgcagcctgggtcagtggcttctccgggggtggcagcgacctgacaggggcccgggaggcccaggagcgaggccgctggagtcccactgagagctcgtcagcctccgtgtcgcctgtggctaaggtctccaaattcacactctcctcagagctggagggcggggactaccccaaggagagggagaggaccggcggaggcccgggcaggcctcctgactggacaccccatgggaccggggcacctgcagagcccacacccacgcacagcccctgcaccccacccgacaccttgccccggccgccccagggacgccgggcagcgcagtcctggagcccccgcttggagtccccgcgtgcaccgaccaaccccgagccttctgccaccccgccgctggaccgcagcagctctgtgggctgcctggcagaggcctctgcccgcttcccagcccggacgaggaacctctccggggaacccaggaccaggcaggactcccccaagccctcaggaagtggggagcccagggcacatccacatcagcctgaggacagggttccccccaacgcttagcctctctccaactgcttcagcatctggcttccagtgtccagcaacagacgtttccagccactttcctcgaatcatcccacttcctcagccccatctgtccctccgtccaggagctctcacggccccatctgttgtaccttcccatgtatgcagttacctgtgcctttttctacaccttttgttgcttaaaaagaaacaaaacaaatcacatacatacatttaaaaaaaaaacaacaacccacgaggagtctgaggctgtgaatagtttatggttttggggaaaggctgatggtgaagcctcctgaccctccccgctgtggttggcagccacccaccccagaggctggcagagggaaaggggtacactgagggagaaaggaaaaggaaacttcaaacaatatagaattaaatgtaaaaggaagcactcctgtgtacagatgcgatcaaggttcctgtttattgccacttcacccccctgcccagctcgtagccacccctctctgccagcagaaaggccagtgtccccaggcagaggggcacaaacacaggcaggtgacccccacccaggccccagcaggcaggcccagaaaaactaatcttttccttttttttttttttttttttttttgcaagaaaataaaatgatacttttcctaggatttcaacacaaaataataggtgcaggtagaaggaggagggctggctccccaagggctcctggatactctggtagtctgagtcatgggcccatcctggcactccacaggtgggcaggccaccccacccacgcacccccactccagacacctcccttctgcaccccaccctggccccctgggctggggaaggagccctgactgtccgtccctggctcccaagcccctgaccgaggcctcactctcctgttgcctcctctgttctaaaaccaccaaaccacccacaaaggcagaagtggcagggcccgagccctagcggccgttcctgagactgggttttgggttttgtttcatcttggtccctggggtacaagggagcctgttcccctcatggctgggtttttccagttctccacagcagaggtttgcggggaactgtttcaggaccactttgccacaggaccgtttccccccgtccctgcccctgtctccactaccccaaggaaatacccacaactgtggctggtggatacggcctggacctgtttgctgtcttacacctcttttttaaaaagagagaggatggtgtttgatacttcacccagccaccacagattcttttgacctagaggatttttgaattgtcctaactcgttggaattctccaaagcaatcagtgtgagccagtgcctcttccttacccacatctctactttcaagaagctgccctgcatttcctggggcaaaactctactttgtaagaaaaataataggaccagaaatttaaatcccaaattgaactatggaacttgaactctagcgtgttcgccccaactgggagaggtgagctttttcccagtgtttcagaactgattttctttactttctacaagggagggcagcacagggactacggttgaggcccgtgaaggctgggtttgatgccaccctatacagagcagggacctctctggctaatccccagtcctcagccaggctgtgtgaatcaagtgcctgccccagggctcttgagctattgaagctgcttgggtacaggacacagtaggtggggagggttaagacccttctgtgagttccctgtgcggggctgtacttgcctcttccaattcgtggcctttccctgcttggtccctactagacagacaaaccagccacagtccagcctgcagccagaccaccttgttcactcattctcctttgcctcagagctaagacaaaaatgagacagaaggcagggctccctgggagtccactgtgctccagggttctggggaatcagggttagccagcagctcctggctgcttccctcagagactagggctctcatcctccccaagagaagcagcaagcccagcctggaccacactgtccatattgctggacagtggcctgacagaaagtgactcctccaagtcccaggaggccagggcttttctcatccttgcctttcagccctaacccatgggactgcccacggattggagacttcaagggctgaggtctgggagctgcataaagggcattgcttcagcccaggttagaaatctgcctgggcaagctcttcctgccccagacctacaaagcagcagaccgggggctctggtggactagcccctgacattggtggggggccccacaccactccaccccaccctgccttccagctctcctgggcatttttctccctgtactcaaacagcctacccacccaaggtttcctccctgggcagcctagcaatgaacagtgcagccggcagggcagaggcccggcagtcaccgggcccgtcaggctcaggcagagaagccacaggggccaggagtcactggagactatttctaaatgatgggggtaaatgcacaaatagaatctcaccaaagggctgcctccacattgatgccgtgcccagagggacagaaccaatgccaccagcctgggtatatgtcactgggcacagctctaaccccctcctccggactctagtcccgctcctctgcgcacagagcccccagcccacaggtacaccttcatgatttggagaaagacgctcgccccatgcacgccctcctctgggccttctgccctgctcccagtcacttccaagcttcctgtttgcctgtgatgttattgtgcctgttgagggaagcagcagaggaggcagtggctgacttggcacagatgcctgctacgtgctctgttgaaatgcgcggggtggccattcctcggtacagactagtcctggtccttgggtgtgggcagtgggggaggaaccaactggtcgaggtttcagagccaaaccttgcctttggttggtgagtccttgccccccaggcctgcgctccacgatgcctttcacccttggcaatctcagggccatcctgggtagtaaccccactcctctctgctcccgcccgcacctgtggctctcactctgggctcaacccctgcaaccctccaggagcccgacagcagccagctgcctgcactgtcgcctccgtaagctccaacttccagacccagaagtccctctgcttccctctgttggaaaaagcctaaaagaattagcttccagattcctctagcccctgctccattcccacccagtccttctgaagaggaatgagcaatacatctgagctggatttctctctagtcctttctccagacaaatccttcttaaagcaaaagtcctggctgagcacctgtccttggggaccgatctgccgtgtgaccaggggaagaaagttcccgaaagcctgttccaccaattctgcttctgtgttgtgaatccagtctgctttccattagaaaaccgcttcggcacttatggtcactttaataaatctagtatgtaaaaaaagaaagaaagaaaagaaacagaaaaaagaaacgtgcaggcaaatgtaaaatacaatgctctctgtaagataaatatttgcctttttttctaaaaggtgtacgtattctgtatgtgaaattgtctgtagaaagtttctatgttcttaaatggcaatacattccaaaaattgtactgtagatatgtacagcaaccgcactgggatggggtagttttgcctgtaattttatttaaactccagtttccacacttgcatcttgcaatgttggtatggtatatatcagtgcaaaagaaaaaacaaaacagaaacaaacaaaaaaaaaaaacaaaaatccacgcaggtctaaagcacagagtctgacgtacaaaaggaaaaatgctcagtattgatgtgtgtgacctttgttgtaaattacatctgtactgtgaatgagaagtttttacaagtataataattgcctttattacagctctggctgagtgttcagcctgaggatattttttaaaaaaaaaagaattagcatgttggaataaatttgaaaatcccaacata

SEQ ID NO: 13984 - DNA, 8024 bp, Homo sapiens
  source 1..8024: mol_type = unassigned DNA
ccacaggcctccctccaacacagttctccaagctctagaaatctctgacacatcttgaccatgagaccacggctggtttttggcaggattcgaggcacaaacccagcagcctcaacctagttcatggaggagcctcgcggggtcctggccaagcaagcccgcccctctggtgggaagagcggcgcctaggtggagggtggctgccgtaggagtggacatgaatgctggctttcagagagaacagcgtttcagttttggtcatcggaagtggtgccttcagcacagaagaagagcgtgatttctcctccaaggccgttgatctccaacccagaactaaaggggagaagagccacccccagcatccagcgtggcatctcttgtgccaggaccagggatgactgggccatggacacagatgtctccaaccttcaaccgtttgcatagcacacgggggactcgtgggggccacctgccactgccagctgaaacaatacaatggcaatactgacatccttcatgacgttttcccgacagacattcaggcagaaagtgctggtgcgttttctgtctgcaaagtagagggccatgcctcaccaatagaatagcgtgggccctgatgacctgctccgagtccactcacagccagtgacacttgcaaaaaactcccaaagccgtcttgggtttggctcccacagctcttgaccaatgtggccaaagctggacacctccttgggacactgggattattcataaatgcagcccgccctgactctccctgaatagcatctgaagtctttgtgaaggtcatggatcctgaacaaagtgtcaagggcaccaagaaggctgagggaagtccccggaagcggctgaccaaaggagaggccattcagaccagtgtttcttccagcgtcccatacccaggcagcggcacagctgccacccaagagagccccgcccaagagctcttagccccgcagcccttcccgggcccctcatcagttcttagggaaggctctcaggagaaaacgggccagcagcagaagccccccaaaaggccccccatcgaagcatccgtccacatctcacagcttccgcagcaccctctgacaccagcattcatgtcgcctggcaaacctgagcatctcctggaggggtccacatggcaactggttgaccccatgagacctggaccctctggctccttcgtggcccctgggctccatcctcagagccagctccttccttcccacgcttccatcattccccccgaggaccttcctggagtccccaaagtcttcgtgcctcgtccttcccaggtctccttgaagcccacagaagaggcacacaagaaggagaggaagccccagaagccaggcaagtacatctgccagtactgcagccggccctgtgccaagcccagcgtgctccagaagcacattcgctcacacacaggtgagaggccctacccctgcggcccctgtggcttctccttcaagaccaagagtaatctctacaagcacaggaagtcccatgcccaccgcatcaaagcaggcctggcctcaggcatgggtggcgagatgtacccacatgggctggagatggagcggatccctggggaagagtttgaggagcccactgagggagaaagcacagattctgaagaggagactagtgccacctctggtcaccctgcagagctctccccaagacccaagcagccccttctctccagcgggctatacagctctgggagccacagttccagccacgaacgctgttccctgtcccagtccagcacagcccagtcactcgaagacccccctccatttgtggaaccctcatctgagcaccccctgagccataaacctgaagacacccacacgattaagcagaagctggccctccgcttaagcgagaggaagaaggtgatcgatgagcaggcgtttctgagcccaggcagcaaagggagtactgagtctgggtatttctctcgctccgagagtgcagagcagcaggtcagccccccaaacaccaacgccaagtcctacgctgagatcatctttggcaagtgtgggcgaataggacagcggaccgccatgctgacagccacctccacccagcccctcctgcccctgtccaccgaagacaagcccagcctggtgcctttgtctgtaccccggacgcaggtgatcgagcacatcacgaagctcatcaccatcaacgaggccgtggtggacaccagcgagatcgacagcgtgaagccaaggcggagctcactgtccaggcgcagcagcatggagtccccaaaatccagcctctaccgggagcccctgtcatcccacagtgagaaaaccaagcctgaacaatcactgctgagcctccagcacccgcccagtaccgccccccctgtgcctctcctgagaagccactcaatgccttctgccgcctgcactatcagcaccccccaccaccccttccgaggtagctactccttcgatgaccatatcaccgactccgaagccctgagccacagcagtcacgtgtttacctcccacccccggatgctgaagcgccagccggcaatcgaattacctttgggaggggaatacagttctgaggagcctggcccaagcagcaaagacacagcctccaagccctcggacgaagtggaacccaaggaaagcgagcttaccaaaaagaccaagaagggtttgaaaacaaaaggggtgatctacgaatgtaacatatgtggtgctcggtacaagaaaagggataactacgaagcccacaaaaaatactactgctcagagcttcagatcgcaaagcccatctctgcaggcacccacacatctccagaagctgaaaagagtcagattgagcatgagccgtggtcccaaatgatgcattacaaactgggaaccaccctggaactcactccactgaggaagaggaggaaagagaagagccttggggacgaggaagagccacctgcctttgagtccacaaaaagtcagtttggcagccccgggccatctgatgctgctcggaaccttcccctggagtccaccaagtcaccagcagaaccaagtaaatcagtgccctccttggagggacccacgggcttccagccaaggactcccaagccagggtccggttcagaatcagggaaggagaggagaacaacgtccaaagaaatttctgtcatccagcacaccagctcctttgagaaatctgattctctcgagcagccgagtggcttggaaggggaagacaaacctctggcccagttcccatcacccccacctgccccacacggacgctctgctcactccctgcagcctaagttggtccgccagcccaacattcaggttcctgagatcctagtaactgaggagcctgaccggccggacacagagccagagccgccccctaaggaacctgagaagactgaggagttccaatggccccagcgcagccagacacttgcccagctcccagctgagaagctgccacccaaaaagaagaggttgcgcctggcagagatggcccaatcatcaggggagtccagcttcgagtcctctgtgcctctgtctcgcagcccgagccaggaaagcaatgtctctttgagtgggtccagccgctcagcctcgtttgagagggatgaccatgggaaagccgaggcccccagtccctcatctgacatgcgccccaaacccctgggcacccacatgttgactgtccccagccaccacccacatgcccgagagatgcggaggtcagcctcagagcagagccccaacgtttcccattctgcccacatgaccgagacacgcagcaaatcctttgactatggcagcttgtccttgacaggcccttctgctccagccccagtggctccaccagcgcgggtggccccgccagagagaagaaaatgcttcttggtgagacaggcctctctgagcaggcctccagaatctgagttggaggttgcccccaagggaagacaggagagcgaagaaccacagccctcatccagtaaaccctctgccaaaagctcattgtcccagatttcctctgcggccacctcacatggtggacccccgggaggcaagggcccagggcaggacaggcccccattggggcccactgtgccctacacagaagcactgcaagtgttccaccaccccgttgcccagacacccctgcatgagaagccatacctgcccccaccagtctcccttttctccttccagcatctcgtgcagcatgagccaggacagtctccagaattcttctccacccaggccatgtccagcctcctgtcctcaccatactccatgcccccacttcctccctccttatttcaagccccaccgcttcctctccagcctactgttctgcacccaggccaactccatctcccccagctcatgcctcacccagccaacatccccttcaggcagcccccttccttcctccccatgccatacccgacctcctcagcactgtcttctgggtttttcctgcctctgcaatcccagtttgcacttcagctccctggtgatgtggaaagccatctgccccagatcaaaaccagcctggccccactggcaacaggaagtgctggcctctcccccagcacagagtacagcagtgacatccggctaccccctgtggctcccccagccagctcctcagcacctacatcagctcctccactggccctgcctgcctgtccagacaccatggtgtccctggttgtgcctgtccgtgttcagaccaatatgccgtcctatgggagcgcaatgtacaccaccctttcccagatcttggtcacccagtcccaaggcagctcagcaactgtggcacttcccaagtttgaggaacccccatcaaaggggacgactgtatgtggtgcagatgtgcatgaggttgggcccggcccttctgggttaagtgaagagcaaagcagagctttcccaactccatacctgagagtgcctgtgacattacctgaaagaaaaggcacttccctgtcatcagagagtatcttgagcctggaggggagttcatcaacagcagggggaagcaaacgtgtcctttcaccagctggcagccttgaacttaccatggaaacccagcagcaaaaaagagtgaaggaggaggaggcttccaaggcagatgaaaaacttgagctggtaaaaccatgcagtgtggtccttaccagcaccgaggatgggaagaggccagagaaatcccacttaggcaaccagggccaaggcaggagggagctagaaatgctgtccagcctgtcctcagatccatctgacacaaaggaaattcctcccctccctcaccctgcattgtcccatgggacagccccaggctcagaagctttgaaggaatatccccagccatctggcaaacctcaccgaagagggttgaccccactgagcgtgaagaaagaagattccaaggaacaacctgatctcccctccttggcacctccgagctctctgcctctgtcagaaacgtcctccagaccagccaagtcacaagaaggtacggactcaaagaaggtactgcagttccccagcctccacacaaccactaatgtcagttggtgctatttaaactacattaagccaaatcacatccagcatgcagataggaggtcctctgtttacgctggttggtgcataagtttgtacaaccccaaccttccgggggtttccactaaagctgctttgtccctcctgaggtctaagcagaaagtgagcaaagagacatacaccatggccacagctccgcatcctgaggcaggaaggcttgtgccatccagctcccgcaagccccgcatgacagaggttcacctcccttcactggtttccccggaaggccagaaagatctagctagagtggagaaggaagaagagaggagaggggagccggaggaggatgctcctgcctcccagagaggggagccggcgaggatcaaaatcttcgaaggagggtacaaatcaaacgaagagtatgtatatgtgcgaggccgcggccgagggaaatatgtttgtgaggagtgtggaattcgctgcaagaagcccagcatgctgaagaaacacatccgcacccacactgacgtccggccctatgtgtgcaagcactgtcactttgcttttaaaaccaaagggaatctgactaagcacatgaagtcgaaggcccacagcaaaaagtgccaagagacaggggtgctggaggagctggaagccgaagaaggaaccagtgacgacctgttccaggactcggaaggacgagagggttcagaggctgtggaggagcaccagttttcggacctggaggactcggactcagactcagacctggacgaagacgaggatgaggatgaggaggagagccaggatgagctgtccagaccatcctcagaggcgcccccgcctggcccaccacatgcactgcgggcagactcctcacccatcctgggccctcagcccccagatgcccccgcctctggcacggaggctacacgaggcagctcggtctcggaagctgagcgcctgacagccagcagctgctccatgtccagccagagcatgccgggcctcccctggctgggaccggcccctctgggctctgtggagaaagacacaggctcagccttgagctacaagcctgtgtccccaagaagaccgtggtccccaagcaaagaagcaggcagccgtccaccactagcccgcaaacactcgctaaccaaaaacgactcatctccccagcgatgctccccggcccgagaaccacaggcctcagccccaagcccacctggcctgcacgtggacccaggaaggggcatgggcgctctcccttgtgggtctccaagacttcagctgtctcctctcaccctctgccccctgggaagagaactggcccctcgagcacatgtgctctccaaactcgagggtaccaccgacccaggcctccccagatactcgcccaccaggagatggtctccaggtcaggccgagtcaccaccacggtcagcgccgccagggaagtgggccttggctgggccgggcagcccctcagcgggggagcatggcccaggcttggggctggacccacgggttctcttcccgcccgcgcctctacctcacaagctcctcagcagaagcccagagacctgcgcctccccgtggaaggccgagtcccgaagtccctcctgctcacccggccctgctcatcctctctcctcccgacccttctccgccctccatgacttccacggccacatcctggcccggacagaggagaacatcttcagccacctgcctctgcactcccagcacttgacccgtgccccatgtcccttgattcccatcggtgggatccagatggtgcaggcccggccaggagcccaccccaccctgctgccagggcccaccgcagcctgggtcagtggcttctccgggggtggcagcgacctgacaggggcccgggaggcccaggagcgaggccgctggagtcccactgagagctcgtcagcctccgtgtcgcctgtggctaaggtctccaaattcacactctcctcagagctggagggcggggactaccccaaggagagggagaggaccggcggaggcccgggcaggcctcctgactggacaccccatgggaccggggcacctgcagagcccacacccacgcacagcccctgcaccccacccgacaccttgccccggccgccccagggacgccgggcagcgcagtcctggagcccccgcttggagtccccgcgtgcaccgaccaaccccgagccttctgccaccccgccgctggaccgcagcagctctgtgggctgcctggcagaggcctctgcccgcttcccagcccggacgaggaacctctccggggaacccaggaccaggcaggactcccccaagccctcaggaagtggggagcccagggcacatccacatcagcctgaggacagggttccccccaacgcttag

SEQ ID NO: 13985 - DNA, 13464 bp, Homo sapiens
  source 1..13464: mol_type = unassigned DNA
gctgccgggacgggtccaagatggacggccgctcaggttctgcttttacctgcggcccagagccccattcattgccccggtgctgagcggcgccgcgagtcggcccgaggcctccggggactgccgtgccgggcgggagaccgccatggcgaccctggaaaagctgatgaaggccttcgagtccctcaagtccttccagcagcagcagcagcagcagcagcagcagcagcagcagcagcagcagcagcagcagcaacagccgccaccgccgccgccgccgccgccgcctcctcagcttcctcagccgccgccgcaggcacagccgctgctgcctcagccgcagccgcccccgccgccgcccccgccgccacccggcccggctgtggctgaggagccgctgcaccgaccaaagaaagaactttcagctaccaagaaagaccgtgtgaatcattgtctgacaatatgtgaaaacatagtggcacagtctgtcagaaattctccagaatttcagaaacttctgggcatcgctatggaactttttctgctgtgcagtgatgacgcagagtcagatgtcaggatggtggctgacgaatgcctcaacaaagttatcaaagctttgatggattctaatcttccaaggttacagctcgagctctataaggaaattaaaaagaatggtgcccctcggagtttgcgtgctgccctgtggaggtttgctgagctggctcacctggttcggcctcagaaatgcaggccttacctggtgaaccttctgccgtgcctgactcgaacaagcaagagacccgaagaatcagtccaggagaccttggctgcagctgttcccaaaattatggcttcttttggcaattttgcaaatgacaatgaaattaaggttttgttaaaggccttcatagcgaacctgaagtcaagctcccccaccattcggcggacagcggctggatcagcagtgagcatctgccagcactcaagaaggacacaatatttctatagttggctactaaatgtgctcttaggcttactcgttcctgtcgaggatgaacactccactctgctgattcttggcgtgctgctcaccctgaggtatttggtgcccttgctgcagcagcaggtcaaggacacaagcctgaaaggcagcttcggagtgacaaggaaagaaatggaagtctctccttctgcagagcagcttgtccaggtttatgaactgacgttacatcatacacagcaccaagaccacaatgttgtgaccggagccctggagctgttgcagcagctcttcagaacgcctccacccgagcttctgcaaaccctgaccgcagtcgggggcattgggcagctcaccgctgctaaggaggagtctggtggccgaagccgtagtgggagtattgtggaacttatagctggagggggttcctcatgcagccctgtcctttcaagaaaacaaaaaggcaaagtgctcttaggagaagaagaagccttggaggatgactctgaatcgagatcggatgtcagcagctctgccttaacagcctcagtgaaggatgagatcagtggagagctggctgcttcttcaggggtttccactccagggtcagcaggtcatgacatcatcacagaacagccacggtcacagcacacactgcaggcggactcagtggatctggccagctgtgacttgacaagctctgccactgatggggatgaggaggatatcttgagccacagctccagccaggtcagcgccgtcccatctgaccctgccatggacctgaatgatgggacccaggcctcgtcgcccatcagcgacagctcccagaccaccaccgaagggcctgattcagctgttaccccttcagacagttctgaaattgtgttagacggtaccgacaaccagtatttgggcctgcagattggacagccccaggatgaagatgaggaagccacaggtattcttcctgatgaagcctcggaggccttcaggaactcttccatggcccttcaacaggcacatttattgaaaaacatgagtcactgcaggcagccttctgacagcagtgttgataaatttgtgttgagagatgaagctactgaaccgggtgatcaagaaaacaagccttgccgcatcaaaggtgacattggacagtccactgatgatgactctgcacctcttgtccattgtgtccgccttttatctgcttcgtttttgctaacagggggaaaaaatgtgctggttccggacagggatgtgagggtcagcgtgaaggccctggccctcagctgtgtgggagcagctgtggccctccacccggaatctttcttcagcaaactctataaagttcctcttgacaccacggaataccctgaggaacagtatgtctcagacatcttgaactacatcgatcatggagacccacaggttcgaggagccactgccattctctgtgggaccctcatctgctccatcctcagcaggtcccgcttccacgtgggagattggatgggcaccattagaaccctcacaggaaatacattttctttggcggattgcattcctttgctgcggaaaacactgaaggatgagtcttctgttacttgcaagttagcttgtacagctgtgaggaactgtgtcatgagtctctgcagcagcagctacagtgagttaggactgcagctgatcatcgatgtgctgactctgaggaacagttcctattggctggtgaggacagagcttctggaaacccttgcagagattgacttcaggctggtgagctttttggaggcaaaagcagaaaacttacacagaggggctcatcattatacagggcttttaaaactgcaagaacgagtgctcaataatgttgtcatccatttgcttggagatgaagaccccagggtgcgacatgttgccgcagcatcactaattaggcttgtcccaaagctgttttataaatgtgaccaaggacaagctgatccagtagtggccgtggcaagagatcaaagcagtgtttacctgaaacttctcatgcatgagacgcagcctccatctcatttctccgtcagcacaataaccagaatatatagaggctataacctactaccaagcataacagacgtcactatggaaaataacctttcaagagttattgcagcagtttctcatgaactaatcacatcaaccaccagagcactcacatttggatgctgtgaagctttgtgtcttctttccactgccttcccagtttgcatttggagtttaggttggcactgtggagtgcctccactgagtgcctcagatgagtctaggaagagctgtaccgttgggatggccacaatgattctgaccctgctctcgtcagcttggttcccattggatctctcagcccatcaagatgctttgattttggccggaaacttgcttgcagccagtgctcccaaatctctgagaagttcatgggcctctgaagaagaagccaacccagcagccaccaagcaagaggaggtctggccagccctgggggaccgggccctggtgcccatggtggagcagctcttctctcacctgctgaaggtgattaacatttgtgcccacgtcctggatgacgtggctcctggacccgcaataaaggcagccttgccttctctaacaaaccccccttctctaagtcccatccgacgaaaggggaaggagaaagaaccaggagaacaagcatctgtaccgttgagtcccaagaaaggcagtgaggccagtgcagcttctagacaatctgatacctcaggtcctgttacaacaagtaaatcctcatcactggggagtttctatcatcttccttcatacctcaaactgcatgatgtcctgaaagctacacacgctaactacaaggtcacgctggatcttcagaacagcacggaaaagtttggagggtttctccgctcagccttggatgttctttctcagatactagagctggccacactgcaggacattgggaagtgtgttgaagagatcctaggatacctgaaatcctgctttagtcgagaaccaatgatggcaactgtttgtgttcaacaattgttgaagactctctttggcacaaacttggcctcccagtttgatggcttatcttccaaccccagcaagtcacaaggccgagcacagcgccttggctcctccagtgtgaggccaggcttgtaccactactgcttcatggccccgtacacccacttcacccaggccctcgctgacgccagcctgaggaacatggtgcaggcggagcaggagaacgacacctcgggatggtttgatgtcctccagaaagtgtctacccagttgaagacaaacctcacgagtgtcacaaagaaccgtgcagataagaatgctattcataatcacattcgtttgtttgaacctcttgttataaaagctttaaaacagtacacgactacaacatgtgtgcagttacagaagcaggttttagatttgctggcgcagctggttcagttacgggttaattactgtcttctggattcagatcaggtgtttattggctttgtattgaaacagtttgaatacattgaagtgggccagttcagggaatcagaggcaatcattccaaacatctttttcttcttggtattactatcttatgaacgctatcattcaaaacagatcattggaattcctaaaatcattcagctctgtgatggcatcatggccagtggaaggaaggctgtgacacatgccataccggctctgcagcccatagtccacgacctctttgtattaagaggaacaaataaagctgatgcaggaaaagagcttgaaacccaaaaagaggtggtggtgtcaatgttactgagactcatccagtaccatcaggtgttggagatgttcattcttgtcctgcagcagtgccacaaggagaatgaagacaagtggaagcgactgtctcgacagatagctgacatcatcctcccaatgttagccaaacagcagatgcacattgactctcatgaagcccttggagtgttaaatacattatttgagattttggccccttcctccctccgtccggtagacatgcttttacggagtatgttcgtcactccaaacacaatggcgtccgtgagcactgttcaactgtggatatcgggaattctggccattttgagggttctgatttcccagtcaactgaagatattgttctttctcgtattcaggagctctccttctctccgtatttaatctcctgtacagtaattaataggttaagagatggggacagtacttcaacgctagaagaacacagtgaagggaaacaaataaagaatttgccagaagaaacattttcaaggtttctattacaactggttggtattcttttagaagacattgttacaaaacagctgaaggtggaaatgagtgagcagcaacatactttctattgccaggaactaggcacactgctaatgtgtctgatccacatcttcaagtctggaatgttccggagaatcacagcagctgccactaggctgttccgcagtgatggctgtggcggcagtttctacaccctggacagcttgaacttgcgggctcgttccatgatcaccacccacccggccctggtgctgctctggtgtcagatactgctgcttgtcaaccacaccgactaccgctggtgggcagaagtgcagcagaccccgaaaagacacagtctgtccagcacaaagttacttagtccccagatgtctggagaagaggaggattctgacttggcagccaaacttggaatgtgcaatagagaaatagtacgaagaggggctctcattctcttctgtgattatgtctgtcagaacctccatgactccgagcacttaacgtggctcattgtaaatcacattcaagatctgatcagcctttcccacgagcctccagtacaggacttcatcagtgccgttcatcggaactctgctgccagcggcctgttcatccaggcaattcagtctcgttgtgaaaacctttcaactccaaccatgctgaagaaaactcttcagtgcttggaggggatccatctcagccagtcgggagctgtgctcacgctgtatgtggacaggcttctgtgcacccctttccgtgtgctggctcgcatggtcgacatccttgcttgtcgccgggtagaaatgcttctggctgcaaatttacagagcagcatggcccagttgccaatggaagaactcaacagaatccaggaataccttcagagcagcgggctcgctcagagacaccaaaggctctattccctgctggacaggtttcgtctctccaccatgcaagactcacttagtccctctcctccagtctcttcccacccgctggacggggatgggcacgtgtcactggaaacagtgagtccggacaaagactggtacgttcatcttgtcaaatcccagtgttggaccaggtcagattctgcactgctggaaggtgcagagctggtgaatcggattcctgctgaagatatgaatgccttcatgatgaactcggagttcaacctaagcctgctagctccatgcttaagcctagggatgagtgaaatttctggtggccagaagagtgccctttttgaagcagcccgtgaggtgactctggcccgtgtgagcggcaccgtgcagcagctccctgctgtccatcatgtcttccagcccgagctgcctgcagagccggcggcctactggagcaagttgaatgatctgtttggggatgctgcactgtatcagtccctgcccactctggcccgggccctggcacagtacctggtggtggtctccaaactgcccagtcatttgcaccttcctcctgagaaagagaaggacattgtgaaattcgtggtggcaacccttgaggccctgtcctggcatttgatccatgagcagatcccgctgagtctggatctccaggcagggctggactgctgctgcctggccctgcagctgcctggcctctggagcgtggtctcctccacagagtttgtgacccacgcctgctccctcatctactgtgtgcacttcatcctggaggccgttgcagtgcagcctggagagcagcttcttagtccagaaagaaggacaaataccccaaaagccatcagcgaggaggaggaggaagtagatccaaacacacagaatcctaagtatatcactgcagcctgtgagatggtggcagaaatggtggagtctctgcagtcggtgttggccttgggtcataaaaggaatagcggcgtgccggcgtttctcacgccattgctaaggaacatcatcatcagcctggcccgcctgccccttgtcaacagctacacacgtgtgcccccactggtgtggaagcttggatggtcacccaaaccgggaggggattttggcacagcattccctgagatccccgtggagttcctccaggaaaaggaagtctttaaggagttcatctaccgcatcaacacactaggctggaccagtcgtactcagtttgaagaaacttgggccaccctccttggtgtcctggtgacgcagcccctcgtgatggagcaggaggagagcccaccagaagaagacacagagaggacccagatcaacgtcctggccgtgcaggccatcacctcactggtgctcagtgcaatgactgtgcctgtggccggcaacccagctgtaagctgcttggagcagcagccccggaacaagcctctgaaagctctcgacaccaggtttgggaggaagctgagcattatcagagggattgtggagcaagagattcaagcaatggtttcaaagagagagaatattgccacccatcatttatatcaggcatgggatcctgtcccttctctgtctccggctactacaggtgccctcatcagccacgagaagctgctgctacagatcaaccccgagcgggagctggggagcatgagctacaaactcggccaggtgtccatacactccgtgtggctggggaacagcatcacacccctgagggaggaggaatgggacgaggaagaggaggaggaggccgacgcccctgcaccttcgtcaccacccacgtctccagtcaactccaggaaacaccgggctggagttgacatccactcctgttcgcagtttttgcttgagttgtacagccgctggatcctgccgtccagctcagccaggaggaccccggccatcctgatcagtgaggtggtcagatcccttctagtggtctcagacttgttcaccgagcgcaaccagtttgagctgatgtatgtgacgctgacagaactgcgaagggtgcacccttcagaagacgagatcctcgctcagtacctggtgcctgccacctgcaaggcagctgccgtccttgggatggacaaggccgtggcggagcctgtcagccgcctgctggagagcacgctcaggagcagccacctgcccagcagggttggagccctgcacggcgtcctctatgtgctggagtgcgacctgctggacgacactgccaagcagctcatcccggtcatcagcgactatctcctctccaacctgaaagggatcgcccactgcgtgaacattcacagccagcagcacgtactggtcatgtgtgccactgcgttttacctcattgagaactatcctctggacgtagggccggaattttcagcatcaataatacagatgtgtggggtgatgctgtctggaagtgaggagtccaccccctccatcatttaccactgtgccctcagaggcctggagcgcctcctgctctctgagcagctctcccgcctggatgcagaatcgctggtcaagctgagtgtggacagagtgaacgtgcacagcccgcaccgggccatggcggctctgggcctgatgctcacctgcatgtacacaggaaaggagaaagtcagtccgggtagaacttcagaccctaatcctgcagcccccgacagcgagtcagtgattgttgctatggagcgggtatctgttctttttgataggatcaggaaaggctttccttgtgaagccagagtggtggccaggatcctgccccagtttctagacgacttcttcccaccccaggacatcatgaacaaagtcatcggagagtttctgtccaaccagcagccatacccccagttcatggccaccgtggtgtataaggtgtttcagactctgcacagcaccgggcagtcgtccatggtccgggactgggtcatgctgtccctctccaacttcacgcagagggccccggtcgccatggccacgtggagcctctcctgcttctttgtcagcgcgtccaccagcccgtgggtcgcggcgatcctcccacatgtcatcagcaggatgggcaagctggagcaggtggacgtgaaccttttctgcctggtcgccacagacttctacagacaccagatagaggaggagctcgaccgcagggccttccagtctgtgcttgaggtggttgcagccccaggaagcccatatcaccggctgctgacttgtttacgaaatgtccacaaggtcaccacctgctgagcgccatggtgggagagactgtgaggcggcagctggggccggagcctttggaagtctgcgcccttgtgccctgcctccaccgagccagcttggtccctatgggcttccgcacatgccgcgggcggccaggcaacgtgcgtgtctctgccatgtggcagaagtgctctttgtggcagtggccaggcagggagtgtctgcagtcctggtggggctgagcctgaggccttccagaaagcaggagcagctgtgctgcaccccatgtgggtgaccaggtcctttctcctgatagtcacctgctggttgttgccaggttgcagctgctcttgcatctgggccagaagtcctccctcctgcaggctggctgttggcccctctgctgtcctgcagtagaaggtgccgtgagcaggctttgggaacactggcctgggtctccctggtggggtgtgcatgccacgccccgtgtctggatgcacagatgccatggcctgtgctgggccagtggctgggggtgctagacacccggcaccattctcccttctctcttttcttctcaggatttaaaatttaattatatcagtaaagagattaattttaacgtaactctttctatgcccgtgtaaagtatgtgaatcgcaaggcctgtgctgcatgcgacagcgtccggggtggtggacagggcccccggccacgctccctctcctgtagccactggcatagccctcctgagcacccgctgacatttccgttgtacatgttcctgtttatgcattcacaaggtgactgggatgtagagaggcgttagtgggcaggtggccacagcaggactgaggacaggcccccattatcctaggggtgcgctcacctgcagcccctcctcctcgggcacagacgactgtcgttctccacccaccagtcagggacagcagcctccctgtcactcagctgagaaggccagccctccctggctgtgagcagcctccactgtgtccagagacatgggcctcccactcctgttccttgctagccctggggtggcgtctgcctaggagctggctggcaggtgttgggacctgctgctccatggatgcatgccctaagagtgtcactgagctgtgttttgtctgagcctctctcggtcaacagcaaagcttggtgtcttggcactgttagtgacagagcccagcatcccttctgcccccgttccagctgacatcttgcacggtgaccccttttagtcaggagagtgcagatctgtgctcatcggagactgccccacggccctgtcagagccgccactcctatccccaggccaggtccctggaccagcctcctgtttgcaggcccagaggagccaagtcattaaaatggaagtggattctggatggccgggctgctgctgatgtaggagctggatttgggagctctgcttgccgactggctgtgagacgaggcaggggctctgcttcctcagccctagaggcgagccaggcaaggttggcgactgtcatgtggcttggtttggtcatgcccgtcgatgttttgggtattgaatgtggtaagtggaggaaatgttggaactctgtgcaggtgctgccttgagacccccaagcttccacctgtccctctcctatgtggcagctggggagcagctgagatgtggacttgtatgctgcccacatacgtgagggggagctgaaagggagcccctcctctgagcagcctctgccaggcctgtatgaggcttttcccaccagctcccaacagaggcctcccccagccaggaccacctcgtcctcgtggcggggcagcaggagcggtagaaaggggtccgatgtttgaggaggcccttaagggaagctactgaattataacacgtaagaaaatcaccattccgtattggttgggggctcctgtttctcatcctagctttttcctggaaagcccgctagaaggtttgggaacgaggggaaagttctcagaactgttggctgctccccacccgcctcccgcctcccccgcaggttatgtcagcagctctgagacagcagtatcacaggccagatgttgttcctggctagatgtttacatttgtaagaaataacactgtgaatgtaaaacagagccattcccttggaatgcatatcgctgggctcaacatagagtttgtcttcctcttgtttacgacgtgatctaaaccagtccttagcaaggggctcagaacaccccgctctggcagtaggtgtcccccacccccaaagacctgcctgtgtgctccggagatgaatatgagctcattagtaaaaatgacttcacccacgcatatacataaagtatccatgcatgtgcatatagacacatctataattttacacacacacctctcaagacggagatgcatggcctctaagagtgcccgtgtcggttcttcctggaagttgactttccttagacccgccaggtcaagttagccgcgtgacggacatccaggcgtgggacgtggtcagggcagggctcattcattgcccactaggatcccactggcgaagatggtctccatatcagctctctgcagaagggaggaagactttatcatgttcctaaaaatctgtggcaagcacccatcgtattatccaaattttgttgcaaatgtgattaatttggttgtcaagttttgggggtgggctgtggggagattgcttttgttttcctgctggtaatatcgggaaagattttaatgaaaccagggtagaattgtttggcaatgcactgaagcgtgtttctttcccaaaatgtgcctcccttccgctgcgggcccagctgagtctatgtaggtgatgtttccagctgccaagtgctctttgttactgtccaccctcatttctgccagcgcatgtgtcctttcaaggggaaaatgtgaagctgaaccccctccagacacccagaatgtagcatctgagaaggccctgtgccctaaaggacacccctcgcccccatcttcatggagggggtcatttcagagccctcggagccaatgaacagctcctcctcttggagctgagatgagccccacgtggagctcgggacggatagtagacagcaataactcggtgtgtggccgcctggcaggtggaacttcctcccgttgcggggtggagtgaggttagttctgtgtgtctggtgggtggagtcaggcttctcttgctacctgtgagcatccttcccagcagacatcctcatcgggctttgtccctcccccgcttcctccctctgcggggaggacccgggaccacagctgctggccagggtagacttggagctgtcctccagaggggtcacgtgtaggagtgagaagaaggaagatcttgagagctgctgagggaccttggagagctcaggatggctcagacgaggacactcgcttgccgggcctgggcctcctgggaaggagggagctgctcagaatgccgcatgacaactgaaggcaacctggaaggttcaggggccgctcttcccccatgtgcctgtcacgctctggtgcagtcaaaggaacgccttcccctcagttgtttctaagagcagagtctcccgctgcaatctgggtggtaactgccagccttggaggatcgtggccaacgtggacctgcctacggagggtgggctctgacccaagtggggcctccttgtccaggtctcactgctttgcaccgtggtcagagggactgtcagctgagcttgagctcccctggagccagcagggctgtgatgggcgagtcccggagccccacccagacctgaatgcttctgagagcaaagggaaggactgacgagagatgtatatttaattttttaactgctgcaaacattgtacatccaaattaaaggaaaaaaat

SEQ ID NO: 13986 - DNA, 8013 bp, Homo sapiens
  source 1..8013: mol_type = unassigned DNA
gcccctgactcggctcctcgcggcgacatggatcggatggccagctccatgaagcaggtgcccaacccactgcccaaggtgctgagccggcgcggggtcggcgctgggctggaggcggcggagcgcgagagcttcgagcggactcagactgtcagcatcaataaggccattaatacgcaggaagtggctgtaaaggaaaaacacgccagaacgtgcatactgggcacccaccatgagaaaggggcacagaccttctggtctgttgtcaaccgcctgcctctgtctagcaacgcagtgctctgctggaagttctgccatgtgttccacaaactcctccgagatggacacccgaacgtcctgaaggactctctgagatacagaaatgaattgagtgacatgagcaggatgtggggccacctgagcgaggggtatggccagctgtgcagcatctacctgaaactgctaagaaccaagatggagtaccacaccaaaaatcccaggttcccaggcaacctgcagatgagtgaccgccagctggacgaggctggagaaagtgacgtgaacaactttttccagttaacagtggagatgtttgactacctggagtgtgaactcaacctcttccaaacagtattcaactccctggacatgtcccgctctgtgtccgtgacggcagcagggcagtgccgcctcgccccgctgatccaggtcatcttggactgcagccacctttatgactacactgtcaagcttctcttcaaactccactcctgcctcccagctgacaccctgcaaggccaccgggaccgcttcatggagcagtttacaaagttgaaagatctgttctaccgctccagcaacctgcagtacttcaagcggctcattcagatcccccagctgcctgagaacccacccaacttcctgcgagcctcagccctgtcagaacatatcagccctgtggtggtgatccctgcagaggcctcatcccccgacagcgagccagtcctagagaaggatgacctcatggacatggatgcctctcagcagaatttatttgacaacaagtttgatgacatctttggcagttcattcagcagtgatcccttcaatttcaacagtcaaaatggtgtgaacaaggatgagaaggaccacttaattgagcgactatacagagagatcagtggattgaaggcacagctagaaaacatgaagactgagagccagcgggttgtgctgcagctgaagggccacgtcagcgagctggaagcagatctggccgagcagcagcacctgcggcagcaggcggccgacgactgtgaattcctgcgggcagaactggacgagctcaggaggcagcgggaggacaccgagaaggctcagcggagcctgtctgagatagaaaggaaagctcaagccaatgaacagcgatatagcaagctaaaggagaagtacagcgagctggttcagaaccacgctgacctgctgcggaagaatgcagaggtgaccaaacaggtgtccatggccagacaagcccaggtagatttggaacgagagaaaaaagagctggaggattcgttggagcgcatcagtgaccagggccagcggaagactcaagaacagctggaagttctagagagcttgaagcaggaacttgccacaagccaacgggagcttcaggttctgcaaggcagcctggaaacttctgcccagtcagaagcaaactgggcagccgagttcgccgagctagagaaggagcgggacagcctggtgagtggcgcagctcatagggaggaggaattatctgctcttcggaaagaactgcaggacactcagctcaaactggccagcacagaggaatctatgtgccagcttgccaaagaccaacgaaaaatgcttctggtggggtccaggaaggctgcggagcaggtgatacaagacgccctgaaccagcttgaagaacctcctctcatcagctgcgctgggtctgcagatcacctcctctccacggtcacatccatttccagctgcatcgagcaactggagaaaagctggagccagtatctggcctgcccagaagacatcagtggacttctccattccataaccctgctggcccacttgaccagcgacgccattgctcatggtgccaccacctgcctcagagccccacctgagcctgccgactcactgaccgaggcctgtaagcagtatggcagggaaaccctcgcctacctggcctccctggaggaagagggaagccttgagaatgccgacagcacagccatgaggaactgcctgagcaagatcaaggccatcggcgaggagctcctgcccaggggactggacatcaagcaggaggagctgggggacctggtggacaaggagatggcggccacttcagctgctattgaaactgccacggccagaatagaggagatgctcagcaaatcccgagcaggagacacaggagtcaaattggaggtgaatgaaaggatccttggttgctgtaccagcctcatgcaagctattcaggtgctcatcgtggcctctaaggacctccagagagagattgtggagagcggcaggggtacagcatcccctaaagagttttatgccaagaactctcgatggacagaaggacttatctcagcctccaaggctgtgggctggggagccactgtcatggtggatgcagctgatctggtggtacaaggcagagggaaatttgaggagctaatggtgtgttctcatgaaattgctgctagcacagcccagcttgtggctgcatccaaggtgaaagctgataaggacagccccaacctagcccagctgcagcaggcctctcggggagtgaaccaggccactgccggcgttgtggcctcaaccatttccggcaaatcacagatcgaagagacagacaacatggacttctcaagcatgacgctgacacagatcaaacgccaagagatggattctcaggttagggtgctagagctagaaaatgaattgcagaaggagcgtcaaaaactgggagagcttcggaaaaagcactacgagcttgctggtgttgctgagggctgggaagaaggaacagaggcatctccacctacactgcaagaagtggtaaccgaaaaagaatagagccaaaccaacaccccatatgtcagtgtaaatccttgttacctatctcgtgtgtgttatttccccagccacaggccaaatccttggagtcccaggggcagccacaccactgccattacccagtgccgaggacatgcatgacacttccaaagactccctccatagcgacaccctttctgtttggacccatggtcatctctgttcttttcccgcctccctagttagcatccaggctggccagtgctgcccatgagcaagcctaggtacgaagaggggtggtggggggcagggccactcaacagagaggaccaacatccagtcctgctgactatttgacccccacaacaatgggtatccttaatagaggagctgcttgttgtttgttgacagcttggaaagggaagatcttatgccttttcttttctgttttcttctcagtcttttcagtttcatcatttgcacaaacttgtgagcatcagagggctgatggattccaaaccaggacactaccctgagatctgcacagtcagaaggacggcaggagtgtcctggctgtgaatgccaaagccattctccccctctttgggcagtgccatggatttccactgcttcttatggtggttggttgggttttttggttttgtttttttttttaagtttcactcacatagccaactctcccaaagggcacacccctggggctgagtctccagggccccccaactgtggtagctccagcgatggtgctgcccaggcctctcggtgctccatctccgcctccacactgaccaagtgctggcccacccagtccatgctccagggtcaggcggagctgctgagtgacagctttcctcaaaaagcagaaggagagtgagtgcctttccctcctaaagctgaatcccggcggaaagcctctgtccgcctttacaagggagaagacaacagaaagagggacaagagggttcacacagcccagttcccgtgacgaggctcaaaaacttgatcacatgcttgaatggagctggtgagatcaacaacactacttccctgccggaatgaactgtccgtgaatggtctctgtcaagcgggccgtctcccttggcccagagacggagtgtgggagtgattcccaactcctttctgcagacgtctgccttggcatcctcttgaataggaagatcgttccaccttctacgcaattgacaaacccggaagatcagatgcaattgctcccatcagggaagaaccctatacttggtttgctacccttagtatttattactaacctcccttaagcagcaacagcctacaaagagatgcttggagcaatcagaacttcaggtgtgactctagcaaggctcatctttctgcccggctacatcagccttcaagaatcagaagaaaggccaaggtgctggactgttactgacttggatcccaaagcaaggagatcatttggagctcttgggtcagagaaaatgagaaaggacagagccagcggctccaactcctttcagccacatgccccaggctctcgctgccctgtggacaggatgaggacagagggcacatgaacagcttgccagggatgggcagcccaacagcacttttcctcttctagatggaccccagcatttaagtgaccttctgatcttggaaaaacagcgtcttccttctttatctatagcaactcattggtggtagccatcaagcacttcccaggatctgctccaacagaatattgctaggttttgctacatgacgggttgtgagacttctgtttgatcactgtgaaccaacccccatctccctagcccacccccctccccaactccctctctgtgcattttctaagtgggacattcaaaaaactctctcccaggacctcggatgaccatactcagacgtgtgacctccatactgggctaaggaagtatcagcactagaaattgggcagtcttaatgttgaatgctgctttctgcttagtatttttttgattcaaggctcagaaggaatggtgcgtggcttccctgtcccagttgtggcaactaaaccaatcggtgtgttcttgatgcgggtcaacatttccaaaagtggctagtcctcacttctagatctcagccattctaactcatatgttcccaattaccaaggggtggccgggcacagtggctcacgcctgtaatcccagcactttgagaggctgaggtggtaggatcacctgaggtcaggagttcaagaccagcctgtccaacatggtgaaacccccatctctactaaaaataccaaaaattagccgagcgtagtgacgggtgcccgtaatcccagctactcaggaggctgagacaggagaatcacctgaaccccagaggcagaggttgcagtgagctgagatcacgccattgtactccagcctgggcaacaagagcaaaactccgtctcaaaaaaaaaaaaaaattacaaatggggcaaacagtctagtgtaatggatcaaattaagattctctgcccagccgggcacagtggcgcatgcctgtaatcccagaactttgggaggccaagacgggatgattgcttgagctcaggagtttgagaccaggctgggcatcatagcaagacctcatctctactaaaattcaaaaacaaaattagccgggcatgatggtgcatgcctgtagtctcagctagttggggagctaaggtgggagaattgcttgagcttgggaagtcgaggctgcagtcagccctgattgtgccagtgcactccggcctgggtgacagagtgagaccctgtctcaaaaaaaaaaagattctgtgtcagagcccagcccaggagtttgaggctgcaatgagccatgatttcccactgcactccagcctgagtgacagagcgagactccatctctttaaaaacaaacaaaaaattatctgaatgatcctgtctctaaaaagaagccacagaaatgtttaaaaacttcatcgacttagcctgagtcataacggttaagaaagcacttaaacagaagcagaggctaattcagtgtcacatgaggaagtagctgtcagatgtcacataattactttcgtaatagctcagattagaatggctaccccattctctagacaaaatcaaattgtcctattgtgactcttctaaaaatgaagatgaagagctatttaatgacacaccttggattaaaacgggaatcacatcttaaagctaaaaatgaacctgcaagccttctaaatgagtcactgagcatcactagtgacaagtctcgggtgagcgtaaatgggtcatgacaagatgggacagcaacaaaatcatggcttaggatcgacaagaagttaaaaaacagctgcatctgttacttaagtttgtaagacagtgccctgagacctctagagaaaagatgtttgtttacataagagaaagaggccagacatggtgtctcacacgtttaatcccagcactttgggaggcaggggcgggtggatcacctgaggtcaggagttcaagactagcctggccaacatggtgaaaccccgtctctactaaaaatacaaaaattagccgggcatggtggcaggcgcctataatcccagctactggggaggctgaggcaggagaatcacttgaacccgggggacagaggttgtagtgagccaagatcgcaccactgcactccagcctgggtcacagagtgagactccatctcaaaaaaaaaaaagagagagagagagaaagaaatagaagagaagagccatcttggcagggttattttatatctgagcaaggagtttaaatgagactagtttagattgtctgctgatgcagccgtccatagcagtacccctaaaatcccaccagaatacgggtccctctaacccagtggctggaagaaccactgtctagagcaacttttcttggaactgtcccagctaccaagtcagacaccaaggtttatgccaccaggtaacacgggaatcacaggtacatgtcgctccggtcagattagttggctttggcccctcgaccctgtgcaggagctagttctcagcttgcagctggaagttccctcttagctccttagtctagaggggtctcctggctccatttgaccctggtctttaataaccggtcagcatcttgctaccttctaccacctttccaaatctctggaaatcctgccagggaaagcctccagttccaacattggctttccaagcaaactggctttgccctctctctgccatccttgtcctccagagactgcaccacctgtagcatagaaaaccaccaccacggacctgccagccattggcgcagcaaaccagccagctgtttgctgccaaattccttcctctcccaggtccagaccaaatacaagatcagcaccacaccgtggtgttgtcaggagccaaagcaacaggaaacaattcaatgctgttgggttcgattctgagagtagatttttccagacatgtctttcaggtgaccctcaactacctcaggtttgaaggccctaaatgaaactgattaccactcatagggacaaaccgagggggttcggttacatcttggtgataatgcagttgtctcaaacttataacagactctttcacatttcagtttgcagggatagggttgggtttgtttttcttctgtttttaacctttcccctgggtttccattagggtagttccttgaaatgaatttcatttttcactgagtgcctaccttcccagggcaggtggccactggcttctgtttccctccaacaatacttttattatggtattaagacctttctttgtataatacattgcatctgtgttttcaatttttcaaataaatatttccgcctggc

SEQ ID NO: 13987 - DNA, 7066 bp, Homo sapiens
  source 1..7066: mol_type = unassigned DNA
gactcggctcctcgcggcgacatggatcggatggccagctccatgaagcaggtgcccaacccactgcccaaggtgctgagccggcgcggggtcggcgctgggctggaggcggcggagcgcgagagcttcgagcggactcagactgtcagcatcaataaggccattaatacgcaggaagtggctgtaaaggaaaaacacgccagaacgtgcatactgggcacccaccatgagaaaggggcacagaccttctggtctgttgtcaaccgcctgcctctgtctagcaacgcagtgctctgctggaagttctgccatgtgttccacaaactcctccgagatggacacccgaacgtcctgaaggactctctgagatacagaaatgaattgagtgacatgagcaggatgtggggccacctgagcgaggggtatggccagctgtgcagcatctacctgaaactgctaagaaccaagatggagtaccacaccaaaaatcccaggttcccaggcaacctgcagatgagtgaccgccagctggacgaggctggagaaagtgacgtgaacaactttttccagttaacagtggagatgtttgactacctggagtgtgaactcaacctcttccaaacagtattcaactccctggacatgtcccgctctgtgtccgtgacggcagcagggcagtgccgcctcgccccgctgatccaggtcatcttggactgcagccacctttatgactacactgtcaagcttctcttcaaactccactcctgcctcccagctgacaccctgcaaggccaccgggaccgcttcatggagcagtttacaaagttgaaagatctgttctaccgctccagcaacctgcagtacttcaagcggctcattcagatcccccagctgcctgagaacccacccaacttcctgcgagcctcagccctgtcagaacatatcagccctgtggtggtgatccctgcagaggcctcatcccccgacagcgagccagtcctagagaaggatgacctcatggacatggatgcctctcagcagaatttatttgacaacaagtttgatgacatctttggcagttcattcagcagtgatcccttcaatttcaacagtcaaaatggtgtgaacaaggatgagaaggaccacttaattgagcgactatacagagagatcagtggattgaaggcacagctagaaaacatgaagactgagagccagcgggttgtgctgcagctgaagggccacgtcagcgagctggaagcagatctggccgagcagcagcacctgcggcagcaggcggccgacgactgtgaattcctgcgggcagaactggacgagctcaggaggcagcgggaggacaccgagaaggctcagcggagcctgtctgagatagaaaggaaagctcaagccaatgaacagcgatatagcaagctaaaggagaagtacagcgagctggttcagaaccacgctgacctgctgcggaagaatgcagaggtgaccaaacaggtgtccatggccagacaagcccaggtagatttggaacgagagaaaaaagagctggaggattcgttggagcgcatcagtgaccagggccagcggaagactcaagaacagctggaagttctagagagcttgaagcaggaacttgccacaagccaacgggagcttcaggttctgcaaggcagcctggaaacttctgcccagtcagaagcaaactgggcagccgagttcgccgagctagagaaggagcgggacagcctggtgagtggcgcagctcatagggaggaggaattatctgctcttcggaaagaactgcaggacactcagctcaaactggccagcacagaggaatctatgtgccagcttgccaaagaccaacgaaaaatgcttctggtggggtccaggaaggctgcggagcaggtgatacaagacgccctgaaccagcttgaagaacctcctctcatcagctgcgctgggtctgcagatcacctcctctccacggtcacatccatttccagctgcatcgagcaactggagaaaagctggagccagtatctggcctgcccagaagacatcagtggacttctccattccataaccctgctggcccacttgaccagcgacgccattgctcatggtgccaccacctgcctcagagccccacctgagcctgccgactcactgaccgaggcctgtaagcagtatggcagggaaaccctcgcctacctggcctccctggaggaagagggaagccttgagaatgccgacagcacagccatgaggaactgcctgagcaagatcaaggccatcggcgaggagctcctgcccaggggactggacatcaagcaggaggagctgggggacctggtggacaaggagatggcggccacttcagctgctattgaaactgccacggccagaatagagggtacagcatcccctaaagagttttatgccaagaactctcgatggacagaaggacttatctcagcctccaaggctgtgggctggggagccactgtcatggtggatgcagctgatctggtggtacaaggcagagggaaatttgaggagctaatggtgtgttctcatgaaattgctgctagcacagcccagcttgtggctgcatccaaggtgaaagctgataaggacagccccaacctagcccagctgcagcaggcctctcggggagtgaaccaggccactgccggcgttgtggcctcaaccatttccggcaaatcacagatcgaagagacagacaacatggacttctcaagcatgacgctgacacagatcaaacgccaagagatggattctcaggttagggtgctagagctagaaaatgaattgcagaaggagcgtcaaaaactgggagagcttcggaaaaagcactacgagcttgctggtgttgctgagggctgggaagaaggaacagaggcatctccacctacactgcaagaagtggtaaccgaaaaagaatagagccaaaccaacaccccatatgtcagtgtaaatccttgttacctatctcgtgtgtgttatttccccagccacaggccaaatccttggagtcccaggggcagccacaccactgccattacccagtgccgaggacatgcatgacacttccaaagactccctccatagcgacaccctttctgtttggacccatggtcatctctgttcttttcccgcctccctagttagcatccaggctggccagtgctgcccatgagcaagcctaggtacgaagaggggtggtggggggcagggccactcaacagagaggaccaacatccagtcctgctgactatttgacccccacaacaatgggtatccttaatagaggagctgcttgttgtttgttgacagcttggaaagggaagatcttatgccttttcttttctgttttcttctcagtcttttcagtttcatcatttgcacaaacttgtgagcatcagagggctgatggattccaaaccaggacactaccctgagatctgcacagtcagaaggacggcaggagtgtcctggctgtgaatgccaaagccattctccccctctttgggcagtgccatggatttccactgcttcttatggtggttggttgggttttttggttttgtttttttttttaagtttcactcacatagccaactctcccaaagggcacacccctggggctgagtctccagggccccccaactgtggtagctccagcgatggtgctgcccaggcctctcggtgctccatctccgcctccacactgaccaagtgctggcccacccagtccatgctccagggtcaggcggagctgctgagtgacagctttcctcaaaaagcagaaggagagtgagtgcctttccctcctaaagctgaatcccggcggaaagcctctgtccgcctttacaagggagaagacaacagaaagagggacaagagggttcacacagcccagttcccgtgacgaggctcaaaaacttgatcacatgcttgaatggagctggtgagatcaacaacactacttccctgccggaatgaactgtccgtgaatggtctctgtcaagcgggccgtctcccttggcccagagacggagtgtgggagtgattcccaactcctttctgcagacgtctgccttggcatcctcttgaataggaagatcgttccaccttctacgcaattgacaaacccggaagatcagatgcaattgctcccatcagggaagaaccctatacttggtttgctacccttagtatttattactaacctcccttaagcagcaacagcctacaaagagatgcttggagcaatcagaacttcaggtgtgactctagcaaggctcatctttctgcccggctacatcagccttcaagaatcagaagaaaggccaaggtgctggactgttactgacttggatcccaaagcaaggagatcatttggagctcttgggtcagagaaaatgagaaaggacagagccagcggctccaactcctttcagccacatgccccaggctctcgctgccctgtggacaggatgaggacagagggcacatgaacagcttgccagggatgggcagcccaacagcacttttcctcttctagatggaccccagcatttaagtgaccttctgatcttggaaaaacagcgtcttccttctttatctatagcaactcattggtggtagccatcaagcacttcccaggatctgctccaacagaatattgctaggttttgctacatgacgggttgtgagacttctgtttgatcactgtgaaccaacccccatctccctagcccacccccctccccaactccctctctgtgcattttctaagtgggacattcaaaaaactctctcccaggacctcggatgaccatactcagacgtgtgacctccatactgggctaaggaagtatcagcactagaaattgggcagtcttaatgttgaatgctgctttctgcttagtatttttttgattcaaggctcagaaggaatggtgcgtggcttccctgtcccagttgtggcaactaaaccaatcggtgtgttcttgatgcgggtcaacatttccaaaagtggctagtcctcacttctagatctcagccattctaactcatatgttcccaattaccaaggggtggccgggcacagtggctcacgcctgtaatcccagcactttgagaggctgaggtggtaggatcacctgaggtcaggagttcaagaccagcctgtccaacatggtgaaacccccatctctactaaaaataccaaaaattagccgagcgtagtgacgggtgcccgtaatcccagctactcaggaggctgagacaggagaatcacctgaaccccagaggcagaggttgcagtgagctgagatcacgccattgtactccagcctgggcaacaagagcaaaactccgtctcaaaaaaaaaaaaaaattacaaatggggcaaacagtctagtgtaatggatcaaattaagattctctgcccagccgggcacagtggcgcatgcctgtaatcccagaactttgggaggccaagacgggatgattgcttgagctcaggagtttgagaccaggctgggcatcatagcaagacctcatctctactaaaattcaaaaacaaaattagccgggcatgatggtgcatgcctgtagtctcagctagttggggagctaaggtgggagaattgcttgagcttgggaagtcgaggctgcagtcagccctgattgtgccagtgcactccggcctgggtgacagagtgagaccctgtctcaaaaaaaaaaagattctgtgtcagagcccagcccaggagtttgaggctgcaatgagccatgatttcccactgcactccagcctgagtgacagagcgagactccatctctttaaaaacaaacaaaaaattatctgaatgatcctgtctctaaaaagaagccacagaaatgtttaaaaacttcatcgacttagcctgagtcataacggttaagaaagcacttaaacagaagcagaggctaattcagtgtcacatgaggaagtagctgtcagatgtcacataattactttcgtaatagctcagattagaatggctaccccattctctagacaaaatcaaattgtcctattgtgactcttctaaaaatgaagatgaagagctatttaatgacacaccttggattaaaacgggaatcacatcttaaagctaaaaatgaacctgcaagccttctaaatgagtcactgagcatcactagtgacaagtctcgggtgagcgtaaatgggtcatgacaagatgggacagcaacaaaatcatggcttaggatcgacaagaagttaaaaaacagctgcatctgttacttaagtttgtaagacagtgccctgagacctctagagaaaagatgtttgtttacataagagaaagaggccagacatggtgtctcacacgtttaatcccagcactttgggaggcaggggcgggtggatcacctgaggtcaggagttcaagactagcctggccaacatggtgaaaccccgtctctactaaaaatacaaaaattagccgggcatggtggcaggcgcctataatcccagctactggggaggctgaggcaggagaatcacttgaacccgggggacagaggttgtagtgagccaagatcgcaccactgcactccagcctgggtcacagagtgagactccatctcaaaaaaaaaaaagagagagagagagaaagaaatagaagagaagagccatcttggcagggttattttatatctgagcaaggagtttaaatgagactagtttagattgtctgctgatgcagccgtccatagcagtacccctaaaatcccaccagaatacgggtccctctaacccagtggctggaagaaccactgtctagagcaacttttcttggaactgtcccagctaccaagtcagacaccaaggtttatgccaccaggtaacacgggaatcacaggtacatgtcgctccggtcagattagttggctttggcccctcgaccctgtgcaggagctagttctcagcttgcagctggaagttccctct

SEQ ID NO: 13988 - DNA, 4539 bp, Homo sapiens
  source 1..4539: mol_type = unassigned DNA
ctcctccccggcgggcgggcccgggcgcggcgcggtggcctcgcggtgcctaggctggggctgccggaccgtgaggctgtgagtcgcgcggacggagccggacaaaagcgggcggcggcggcaggatgaacagcatcaagaacgtgccggcgcgggtgctgagccgcaggccgggccacagcctggaggccgagcgcgagcagttcgacaagacccaggccatcagcatcagcaaagccatcaacacccaggaggcccccgtgaaggagaagcacgcccggcgcatcattctgggcacacaccacgagaagggggctttcaccttctggtcctacgccattgggctgccgctgcccagcagctccattctcagctggaagttctgccacgtcctccacaaggtccttcgagacgggcaccccaatgtgctgcatgactgccagcggtaccgcagcaacatccgggagattggagacctgtggggacatttgcatgaccgctacggacagctggtgaatgtctacaccaagctgctgctgaccaagatctccttccacctcaagcatccccagtttcccgcgggcctggaggtgacagatgaggtactggagaaggcagctgggaccgatgtcaacaacatcttccagctcactgtggagatgtttgattacatggattgtgagctgaagctttctgaatcagttttccgacagctcaacacggccatcgccgtatcccagatgtcctcaggccagtgccgcctggcccccctcatccaggtcatccaggactgcagccacctctaccactacacggtcaagctcctgttcaagctacactcttgtctccctgcggacaccctgcaaggccacagggaccggttccacgagcagtttcacagcctcaggaacttcttccgcagagcctccgacatgctgtacttcaagcggctcatccagatcccccggctgcccgagggaccccctaacttcctgcgggcctcagccctggctgagcacatcaagccggtggtggtgatccccgaggaggccccggaagatgaggagccggagaatctcattgagatcagcacagggccccccgcgggggagccagtggtggtggctgacctcttcgatcagacgtttggaccccccaatgggtctgtgaaggacgacagggacctccagattgagagcttgaagagagaggtggaaatgctccgctctgaactggagaagatcaagctggaggcccagcggtacatcgcgcagctgaagagccaggtgaatgcactggagggtgagctggaggagcagcggaagcagaagcagaaggccctggtggataatgagcagctccgccacgagctggcccagctgagggctgcccagctggagggcgagcggagccagggcctgcgtgaggaggctgagaggaaggccagtgccacggaggcgcgctacaacaagctgaaggaaaagcacagtgagctcgtccatgtgcacgcggagctgctcagaaagaacgcggacacagccaagcagctgacggtgacgcagcaaagccaggaggaggtggcgcgggtgaaggagcagctggccttccaggtggagcaggtgaagcgggagtcggagttgaagctagaggagaagagcgaccagctggagaagctcaagagggagctggaggccaaggccggagagctggcccgcgcgcaggaggccctgagccacacagagcagagcaagtcggagctgagctcacggctggacacgctgagtgcggagaaggatgctctgagtggagctgtgcggcagcgggaggcagacctgctggcggcgcagagcctggtgcgcgagacagaggcggcgctgagccgggagcagcagcgcagctcccaggagcagggcgagttgcagggccggctggcagagagggagtctcaggagcaggggctgcggcagaggctgctggacgagcagttcgcagtgttgcggggcgctgctgccgaggccgcgggcatcctgcaggatgccgtgagcaagctggacgaccccctgcacctgcgctgtaccagctccccagactacctggtgagcagggcccaggaggccttggatgccgtgagcaccctggaggagggccacgcccagtacctgacctccttggcagacgcctccgccctggtggcagctctgacccgcttctcccacctggctgcggataccatcatcaatggcggtgccacctcgcacctggctcccaccgaccctgccgaccgcctcatagacacctgcagggagtgcggggcccgggctctggagctcatggggcagctgcaggaccagcaggctctgcggcacatgcaggccagcctggtgcggacacccctgcagggcatccttcagctgggccaggaactgaaacccaagagcctagatgtgcggcaggaggagctgggggccgtggtcgacaaggagatggcggccacatccgcagccattgaagatgctgtgcggaggattgaggacatgatgaaccaggcacgccacgccagctcgggggtgaagctggaggtgaacgagaggatcctcaactcctgcacagacctgatgaaggctatccggctcctggtgacgacatccactagcctgcagaaggagatcgtggagagcggcaggggggcagccacgcagcaggaattttacgccaagaactcgcgctggaccgaaggcctcatctcggcctccaaggctgtgggctggggagccacacagctggtggaggcagctgacaaggtggtgcttcacacgggcaagtatgaggagctcatcgtctgctcccacgagatcgcagccagcacggcccagctggtggcggcctccaaggtgaaggccaacaagcacagcccccacctgagccgcctgcaggaatgttctcgcacagtcaatgagagggctgccaatgtggtggcctccaccaagtcaggccaggagcagattgaggacagagacaccatggatttctccggcctgtccctcatcaagctgaagaagcaggagatggagacccaggtgcgtgtcctggagctggagaagacgctggaggctgaacgcatgcggctgggggagttgcggaagcaacactacgtgctggctggggcatcaggcagccctggagaggaggtggccatccggcccagcactgccccccgaagtgtaaccaccaagaaaccacccctggcccagaagcccagcgtggcccccagacaggaccaccagcttgacaaaaaggatggcatctacccagctcaactcgtgaactactaggccccccaggggtccagcagggtggctggtgacaggcctgggcctctgcaactgccctgacaggaccgagaggccttgcccctccacctggtgcccaagcctcccgccccaccgtctggatcaatgtcctcaaggcccctggcccttactgagcctgcagggtcctgggccatgtgggtggtgcttctggatgtgagtctcttatttatctgcagaaggaactttggggtgcagccaggacccggtaggcctgagcctcaactcttcagaaaatagtgtttttaatattcctcttcagaaaatagtgtttttaatattccgagctagagctcttcttcctacgtttgtagtcagcacactgggaaaccgggccagcgtggggctccctgccttctggactcctgaaggtcgtggatggatggaaggcacacagcccgtgccggctgatgggacgagggtcaggcatcctgtctgtggccttctggggcaccgattctaccaggccctccagctgcgtggtctccgcagaccaggctctgtgtgggctagaggaatgtcgcccattactcctcaggcctggccctcgggcctccgtgatgggagccccccaggaggggtcagatgctggaaggggccgctttctggggagtgaggtgagacatagcggcccgggcgctgccttcactcctggagtgagtttccatttccagctggaatctgcagccacccccatttcctgttttccattcccccgttctggccgcgccccactgcccacctgaaggggtggtttccagccctccggagagtgggcttggccctaggccctccagctcagccagaaaaagcccagaaacccaggtgctggaccagggccctcagggaggggaccctgcggctagagtgggctaggccctggctttgcccgtcagatttgaacgaatgtgtgtcccttgagcccaaggagagcggcaggaggggtgggaccaggctgggaggacagagccagcagctgccatgccctcctgctccccccaccccagccctagccctttagcctttcaccctgtgctctggaaaggctaccaaatactggccaaggtcaggaggagcaaaaatgagccagcaccagcgccttggctttgtgttagcatttcctcctgaagtgttctgttggcaataaaatgcactttgactgtttgttgtc

SEQ ID NO: 13989 - DNA, 753 bp, Homo sapiens
  source 1..753: mol_type = unassigned DNA
atggcacatgttgggacatcgagggtgggatctgtcctctccatgagtctttccattcaccttcttgtcccaactatgactaaaggggagacggggaagccagggcatcacgaagctcctagaacacttcaggcatttccgtggacgtgggcacgggcttccccaggcgtttctgtggacatgagcgctgggcttcctcagtctctgctgtgctggccgggtgctcccctcctcccaacccctccactgccctctgccacctatgtgggccacagcctgggtctgccaagagcagggtccagcgtggggccctggttcagtggccgctgggttgggggggccctggttcagtggccgctgggtggggggggccctggttcggtggccgctgggttggggggccccctggttcggtggctgctgggtgggggggccctggttcggtggccgctgggtggggggggccctggttcggtggccgctgggtggggggggccctggttcggtggccgctgggtgggggggccccctggttcggtggctgctgggtgggggggccctgttcggtggccgctgggtggggggggccctggttcggtggccactgggtggggggggccctggttcggtggccgctgggtgggggggccccctggttcggtggccgctgggtgtgggggggccctggttcagtggccgctgggtgggggttctctccacagcatccccagtttcccgcgggcctggaggtga

SEQ ID NO: 13990 - DNA, 4087 bp, Homo sapiens
  source 1..4087: mol_type = unassigned DNA
cagactcgagatgcgcccgaagaggttgggccggtgctgcgcggggagccggctcggacccggggacccagcagcactcacctgtgcaccttcgccctcagccagtcccgctccggagccctctgcgcagccgcaggcacggggcactggacagagagtaggatcccgagccacctctggatcccagttcctctcggaagcccgcaccggagctcgcccggcctcggaggctggagccaaggcaggagcccggcgcccgtccgcattctcggccatccaaggggatgtccggtctatgcccgacaattcggacgcgccgtggacccgcttcgtattccaagggccgtttggttcccgggccactggccgggggactggaaaggcagcgggcatctggaagacgccagccgcctacgttggccggcgacccggggtgtccggccctgagcgcgccgcctttattcgggagctggaggaagcactgtgtcctaacctacctccgccagtcaaaaagatcacccaggaagacgtcaaagtgatgttatatttgctggaggagcttctcccacctgtctgggagagcgttacctatgggatggtcctgcagagagagagggacctgaacactgcagctcgcatcggccagtccctggtgaaacagaacagtgttttgatggaggagaacagcaagctggaagccctgctgggctcagccaaggaggagattttatacctcagacaccaggtgaacttgcgggatgagctcctccagctctactcagattctgatgaggaggatgaggatgaagaagaggaggaggaagaaaaggaggcagaagaggaacaggaagaagaagaagcagaggaagacctgcagtgtgctcatccctgtgatgcccctaagctgatttcgcaggaggcattgctgcaccagcaccactgcccacagctggaagccttgcaggagaagctgaggctgctggaggaggagaatcatcagctgagagaagaggcctctcaactcgacactcttgaggatgaggaacagatgctcattctggagtgtgtggagcagttttcggaggccagccaacagatggctgagctgtcggaggtgctggtgctcaggctggaaaactatgaacggcagcagcaggaggtcgctcggctgcaggcccaggtgctgaagctgcagcagcgctgccggatgtatggggctgagactgaaaagttgcagaagcagctggcttcggagaaggaaatccagatgcagctccaggaagagagcgtgtgggtgggttcccagctgcaggacctgcgggagaagtacatggattgtgggggcatgctgattgagatgcaggaggaggtgaagaccctccgccagcaacccccagtgtccactgggtctgccacccattacccatacagcgtgcctctggagactcttcctggtttccaggagacgctggctgaggagctcagaacgtctctaaggaggatgatctcagaccctgtgtattttatggagaggaattatgagatgcccagaggggacacatccagcctaaggtatgattttcgctacagtgaggatcgagagcaggtgcgggggtttgaggctgaggaagggttgatgctggcagcggatatcatgcggggggaagatttcacgcctgcggaggagttcgtgccccaggaggagctgggggctgccaagaaggtgccggctgaggaaggggtgatggaagaggcagagctggtgtcagaggagaccgagggctgggaggaggtggaactggagctggatgaggcaacgcggatgaacgtggtgacatcagccctggaggccagcggcttgggcccttcacacctggacatgaattatgtcctccagcagctggccaactggcaagatgcccattacaggcggcagctgaggtggaagatgctccagaaaggtgagtgcccccacggggccctccctgccgccagccggacaagctgcagatcgtcgtgccgatgaaaagagagggtggataagctccccgagtgctcacctgccccagcctggctctacctgctgtgcttatttgcatggactttgcatatcatttgcatagacacctctgatccccttcagtgggaaccgtagtgtcagtgctcatttatgtggcatttgcttaggattccagatctccatccacttttctcctgggggctgggctgggggttagggctgggactgtgcccccacactgcgcctcagcttcccatctctgcccgcttgcttcccctgcccccaacccctgcctcctctatcccccaggctctccaactctgcagcagtggcagcagcagtcaaaacaaacacggggggcggtgggtgggatggtggagcagcccgggggctgacccaggctggaggacagggccagccaccctcccacggcctgggaggaagagaggccttctgggactgcccaggctatggggacaaaggccttcaccagcaagggccacagttggaacagtcccctgggtgtcagaaggtgggctagggcctcctgcagggttgtggggtggaacagggtctcctctccccagccagaaaccccaaagtctgggagctgcaccttccgagtgcaggccatgtgagccctgcctctttaaggagccgcaggacatgaaagatgaccttgtgacactcatgcacagcagccattgcacgtgcatcagctcccatcagcctcattccgtggcaggtgatgtgtccccattggttaggtgaggagggtgaggctcagagagctaaggacacttgtttggggccacacagccggggtagatctgagcccgtcctctctactcctgtgctgtagcaccttcactggcccatccctcccctctagtgctgtcctggtacccgtcccagcctgtccccattctcatggccctttggtcactgccgggtggaatagcactggcttcagcaggcgtgtcatgtaagcttgtgcaggttataaactgaaccatgacctttatggcgcatgcagggggcaacctgcataattatcaatggcgactttccgtgtccttctgatacagttgatcagacccctgcccaccgcccaggccaggcctgtggtcatcaatgccccagttcacatccacctgcttctcttccaggctttgctgttccccagcagcctgcagaggccccacagacagcttgaggcccctccttctgctgcctggccaagccccacacccgcagaccctccttcccatcctctgaaatgggaccctgtgtctgtcaccagcccaccctctgtgttcatgaacctgggctggagcttggggacccctccctgcccctggcttcctcttccatgttctgccctttcccacatgttggaggcttttccaacgtcttcagggacaggcggtaggaaccccggccctcgctctgcagctggtgcaaaagctgtggctgccaggtctgggccacatggcagcccagggggcaggagaagcccgggagaggcccactggctaccagactcagccctgagcagggaacagggcccagcttccaccggcagggagttgtgagcgccttcccaacaatgtgcccctcaccccttgatgcccatgctaatggtagccaccctggttcttgttgacttgagggacctggctgtcttccctgttcttcatcctttcttctcagtccctacctactgtttgtaaccacaagtgtctctgtgtgtgggtgggtgagggcccctctgcccagtggtgtgtctcctctccctccctccctcttctgccagtggcctgggggtgtccaggctcccatccgtggcccagcccctctcccctctgtcttgatccccccctccctgcccctggcttcctcttccatgttctgccctttcccacacctttgttcctcaatagctgggggctgggactgaggcctcctgcaggtacctgccccccttcacacagcacctctcaatctcctattgcttgtcagcctgtgtgcgtgtggtgcaggaaataaaggatctataccctcctg

SEQ ID NO: 13991 - DNA, 3880 bp, Homo sapiens
  source 1..3880: mol_type = unassigned DNA
cagactcgagatgcgcccgaagaggttgggccggtgctgcgcggggagccggctcggacccggggacccagcagcactcacctgtgcaccttcgccctcagccagtcccgctccggagccctctgcgcagccgcaggcacggggcactggacagagagtaggatcccgagccacctctggatcccagttcctctcggaagcccgcaccggagctcgcccggcctcggaggctggagccaaggcaggagcccggcgcccgtccgcattctcggccatccaaggggatgtccggtctatgcccgacaattcggacgcgccgtggacccgcttcgtattccaagggccgtttggttcccgggccactggccgggggactggaaaggcagcgggcatctggaagacgccagccgcctacgttggccggcgacccggggtgtccggccctgagcgcgccgcctttattcgggagctggaggaagcactgtgtcctaacctacctccgccagtcaaaaagatcacccaggaagacgtcaaagtgatgttatatttgctggaggaggtgtgtactgccttcctgatccagcttctcccacctgtctgggagagcgttacctatgggatggtcctgcagagagagagggacctgaacactgcagctcgcatcggccagtccctggtgaaacagaacagtgttttgatggaggagaacagcaagctggaagccctgctgggctcagccaaggaggagattttatacctcagacaccaggtgaacttgcgggatgagctcctccagctctactcagattctgatgaggaggatgaggatgaagaagaggaggaggaagaaaaggaggcagaagaggaacaggaagaagaagaagcagaggaagacctgcagtgtgctcatccctgtgatgcccctaagctgatttcgcaggaggcattgctgcaccagcaccactgcccacagctggaagccttgcaggagaagctgaggctgctggaggaggagaatcatcagctgagagaagaggcctctcaactcgacactcttgaggatgaggaacagatgctcattctggagtgtgtggagcagttttcggaggccagccaacagatggctgagctgtcggaggtgctggtgctcaggctggaaaactatgaacggcagcagcaggaggtcgctcggctgcaggcccaggtgctgaagctgcagcagcgctgccggatggagactcttcctggtttccaggagacgctggctgaggagctcagaacgtctctaaggaggatgatctcagaccctgtgtattttatggagaggaattatgagatgcccagaggggacacatccagcctaaggtatgattttcgctacagtgaggatcgagagcaggtgcgggggtttgaggctgaggaagggttgatgctggcagcggatatcatgcggggggaagatttcacgcctgcggaggagttcgtgccccaggaggagctgggggctgccaagaaggtgccggctgaggaaggggtgatggaagaggcagagctggtgtcagaggagaccgagggctgggaggaggtggaactggagctggatgaggcaacgcggatgaacgtggtgacatcagccctggaggccagcggcttgggcccttcacacctggacatgaattatgtcctccagcagctggccaactggcaagatgcccattacaggcggcagctgaggtggaagatgctccagaaaggtgagtgcccccacggggccctccctgccgccagccggacaagctgcagatcgtcgtgccgatgaaaagagagggtggataagctccccgagtgctcacctgccccagcctggctctacctgctgtgcttatttgcatggactttgcatatcatttgcatagacacctctgatccccttcagtgggaaccgtagtgtcagtgctcatttatgtggcatttgcttaggattccagatctccatccacttttctcctgggggctgggctgggggttagggctgggactgtgcccccacactgcgcctcagcttcccatctctgcccgcttgcttcccctgcccccaacccctgcctcctctatcccccaggctctccaactctgcagcagtggcagcagcagtcaaaacaaacacggggggcggtgggtgggatggtggagcagcccgggggctgacccaggctggaggacagggccagccaccctcccacggcctgggaggaagagaggccttctgggactgcccaggctatggggacaaaggccttcaccagcaagggccacagttggaacagtcccctgggtgtcagaaggtgggctagggcctcctgcagggttgtggggtggaacagggtctcctctccccagccagaaaccccaaagtctgggagctgcaccttccgagtgcaggccatgtgagccctgcctctttaaggagccgcaggacatgaaagatgaccttgtgacactcatgcacagcagccattgcacgtgcatcagctcccatcagcctcattccgtggcaggtgatgtgtccccattggttaggtgaggagggtgaggctcagagagctaaggacacttgtttggggccacacagccggggtagatctgagcccgtcctctctactcctgtgctgtagcaccttcactggcccatccctcccctctagtgctgtcctggtacccgtcccagcctgtccccattctcatggccctttggtcactgccgggtggaatagcactggcttcagcaggcgtgtcatgtaagcttgtgcaggttataaactgaaccatgacctttatggcgcatgcagggggcaacctgcataattatcaatggcgactttccgtgtccttctgatacagttgatcagacccctgcccaccgcccaggccaggcctgtggtcatcaatgccccagttcacatccacctgcttctcttccaggctttgctgttccccagcagcctgcagaggccccacagacagcttgaggcccctccttctgctgcctggccaagccccacacccgcagaccctccttcccatcctctgaaatgggaccctgtgtctgtcaccagcccaccctctgtgttcatgaacctgggctggagcttggggacccctccctgcccctggcttcctcttccatgttctgccctttcccacatgttggaggcttttccaacgtcttcagggacaggcggtaggaaccccggccctcgctctgcagctggtgcaaaagctgtggctgccaggtctgggccacatggcagcccagggggcaggagaagcccgggagaggcccactggctaccagactcagccctgagcagggaacagggcccagcttccaccggcagggagttgtgagcgccttcccaacaatgtgcccctcaccccttgatgcccatgctaatggtagccaccctggttcttgttgacttgagggacctggctgtcttccctgttcttcatcctttcttctcagtccctacctactgtttgtaaccacaagtgtctctgtgtgtgggtgggtgagggcccctctgcccagtggtgtgtctcctctccctccctccctcttctgccagtggcctgggggtgtccaggctcccatccgtggcccagcccctctcccctctgtcttgatccccccctccctgcccctggcttcctcttccatgttctgccctttcccacacctttgttcctcaatagctgggggctgggactgaggcctcctgcaggtacctgccccccttcacacagcacctctcaatctcctattgcttgtcagcctgtgtgcgtgtggtgcaggaaataaaggatctataccctcctg

SEQ ID NO: 13992 - DNA, 3931 bp, Homo sapiens
  source 1..3931: mol_type = unassigned DNA
cagactcgagatgcgcccgaagaggttgggccggtgctgcgcggggagccggctcggacccggggacccagcagcactcacctgtgcaccttcgccctcagccagtcccgctccggagccctctgcgcagccgcaggcacggggcactggacagagagtaggatcccgagccacctctggatcccagttcctctcggaagcccgcaccggagctcgcccggcctcggaggctggagccaaggcaggagcccggcgcccgtccgcattctcggccatccaaggggatgtccggtctatgcccgacaattcggacgcgccgtggacccgcttcgtattccaagggccgtttggttcccgggccactggccgggggactggaaaggcagcgggcatctggaagacgccagccgcctacgttggccggcgacccggggtgtccggccctgagcgcgccgcctttattcgggagctggaggaagcactgtgtcctaacctacctccgccagtcaaaaagatcacccaggaagacgtcaaagtgatgttatatttgctggaggagcttctcccacctgtctgggagagcgttacctatgggatggtcctgcagagagagagggacctgaacactgcagctcgcatcggccagtccctggtgaaacagaacagtgttttgatggaggagaacagcaagctggaagccctgctgggctcagccaaggaggagattttatacctcagacaccaggtgaacttgcgggatgagctcctccagctctactcagattctgatgaggaggatgaggatgaagaagaggaggaggaagaaaaggaggcagaagaggaacaggaagaagaagaagcagaggaagacctgcagtgtgctcatccctgtgatgcccctaagctgatttcgcaggaggcattgctgcaccagcaccactgcccacagctggaagccttgcaggagaagctgaggctgctggaggaggagaatcatcagctgagagaagaggcctctcaactcgacactcttgaggatgaggaacagatgctcattctggagtgtgtggagcagttttcggaggccagccaacagatggctgagctgtcggaggtgctggtgctcaggctggaaaactatgaacggcagcagcaggaggtcgctcggctgcaggcccaggtgctgaagctgcagcagcgctgccggatgtatggggctgagactgaaaagttgcagaagcagctggcttcggagaaggaaatccagatgcagctccaggaagaggagactcttcctggtttccaggagacgctggctgaggagctcagaacgtctctaaggaggatgatctcagaccctgtgtattttatggagaggaattatgagatgcccagaggggacacatccagcctaaggtatgattttcgctacagtgaggatcgagagcaggtgcgggggtttgaggctgaggaagggttgatgctggcagcggatatcatgcggggggaagatttcacgcctgcggaggagttcgtgccccaggaggagctgggggctgccaagaaggtgccggctgaggaaggggtgatggaagaggcagagctggtgtcagaggagaccgagggctgggaggaggtggaactggagctggatgaggcaacgcggatgaacgtggtgacatcagccctggaggccagcggcttgggcccttcacacctggacatgaattatgtcctccagcagctggccaactggcaagatgcccattacaggcggcagctgaggtggaagatgctccagaaaggtgagtgcccccacggggccctccctgccgccagccggacaagctgcagatcgtcgtgccgatgaaaagagagggtggataagctccccgagtgctcacctgccccagcctggctctacctgctgtgcttatttgcatggactttgcatatcatttgcatagacacctctgatccccttcagtgggaaccgtagtgtcagtgctcatttatgtggcatttgcttaggattccagatctccatccacttttctcctgggggctgggctgggggttagggctgggactgtgcccccacactgcgcctcagcttcccatctctgcccgcttgcttcccctgcccccaacccctgcctcctctatcccccaggctctccaactctgcagcagtggcagcagcagtcaaaacaaacacggggggcggtgggtgggatggtggagcagcccgggggctgacccaggctggaggacagggccagccaccctcccacggcctgggaggaagagaggccttctgggactgcccaggctatggggacaaaggccttcaccagcaagggccacagttggaacagtcccctgggtgtcagaaggtgggctagggcctcctgcagggttgtggggtggaacagggtctcctctccccagccagaaaccccaaagtctgggagctgcaccttccgagtgcaggccatgtgagccctgcctctttaaggagccgcaggacatgaaagatgaccttgtgacactcatgcacagcagccattgcacgtgcatcagctcccatcagcctcattccgtggcaggtgatgtgtccccattggttaggtgaggagggtgaggctcagagagctaaggacacttgtttggggccacacagccggggtagatctgagcccgtcctctctactcctgtgctgtagcaccttcactggcccatccctcccctctagtgctgtcctggtacccgtcccagcctgtccccattctcatggccctttggtcactgccgggtggaatagcactggcttcagcaggcgtgtcatgtaagcttgtgcaggttataaactgaaccatgacctttatggcgcatgcagggggcaacctgcataattatcaatggcgactttccgtgtccttctgatacagttgatcagacccctgcccaccgcccaggccaggcctgtggtcatcaatgccccagttcacatccacctgcttctcttccaggctttgctgttccccagcagcctgcagaggccccacagacagcttgaggcccctccttctgctgcctggccaagccccacacccgcagaccctccttcccatcctctgaaatgggaccctgtgtctgtcaccagcccaccctctgtgttcatgaacctgggctggagcttggggacccctccctgcccctggcttcctcttccatgttctgccctttcccacatgttggaggcttttccaacgtcttcagggacaggcggtaggaaccccggccctcgctctgcagctggtgcaaaagctgtggctgccaggtctgggccacatggcagcccagggggcaggagaagcccgggagaggcccactggctaccagactcagccctgagcagggaacagggcccagcttccaccggcagggagttgtgagcgccttcccaacaatgtgcccctcaccccttgatgcccatgctaatggtagccaccctggttcttgttgacttgagggacctggctgtcttccctgttcttcatcctttcttctcagtccctacctactgtttgtaaccacaagtgtctctgtgtgtgggtgggtgagggcccctctgcccagtggtgtgtctcctctccctccctccctcttctgccagtggcctgggggtgtccaggctcccatccgtggcccagcccctctcccctctgtcttgatccccccctccctgcccctggcttcctcttccatgttctgccctttcccacacctttgttcctcaatagctgggggctgggactgaggcctcctgcaggtacctgccccccttcacacagcacctctcaatctcctattgcttgtcagcctgtgtgcgtgtggtgcaggaaataaaggatctataccctcctg

SEQ ID NO: 13993 - DNA, 5683 bp, Homo sapiens
  source 1..5683: mol_type = unassigned DNA
cagactcgagatgcgcccgaagaggttgggccggtgctgcgcggggagccggctcggacccggggacccagcagcactcacctgtgcaccttcgccctcagccagtcccgctccggagccctctgcgcagccgcaggcacggggcactggacagagagtaggatcccgagccacctctggatcccagttcctctcggaagcccgcaccggagctcgcccggcctcggaggctggagccaaggcaggagcccggcgcccgtccgcattctcggccatccaaggggatgtccggtctatgcccgacaattcggacgcgccgtggacccgcttcgtattccaagggccgtttggttcccgggccactggccgggggactggaaaggcagcgggcatctggaagacgccagccgcctacgttggccggcgacccggggtgtccggccctgagcgcgccgcctttattcgggagctggaggaagcactgtgtcctaacctacctccgccagtcaaaaagatcacccaggaagacgtcaaagtgatgttatatttgctggaggagcttctcccacctgtctgggagagcgttacctatgggatggtcctgcagagagagagggacctgaacactgcagctcgcatcggccagtccctggtgaaacagaacagtgttttgatggaggagaacagcaagctggaagccctgctgggctcagccaaggaggagattttatacctcagacaccaggtgaacttgcgggatgagctcctccagctctactcagattctgatgaggaggatgaggatgaagaagaggaggaggaagaaaaggaggcagaagaggaacaggaagaagaagaagcagaggaagacctgcagtgtgctcatccctgtgatgcccctaagctgatttcgcaggaggcattgctgcaccagcaccactgcccacagctggaagccttgcaggagaagctgaggctgctggaggaggagaatcatcagctgagagaagaggcctctcaactcgacactcttgaggatgaggaacagatgctcattctggagtgtgtggagcagttttcggaggccagccaacagatggctgagctgtcggaggtgctggtgctcaggctggaaaactatgaacggcagcagcaggaggtcgctcggctgcaggcccaggtgctgaagctgcagcagcgctgccggatggagactcttcctggtttccaggagacgctggctgaggagctcagaacgtctctaaggaggatgatctcagaccctgtgtattttatggagaggaattatgagatgcccagaggggacacatccagcctaaggtatgattttcgctacagtgaggatcgagagcaggtgcgggggtttgaggctgaggaagggttgatgctggcagcggatatcatgcggggggaagatttcacgcctgcggaggagttcgtgccccaggaggagctgggggctgccaagaaggtgccggctgaggaaggggtgatggaagaggcagagctggtgtcagaggagaccgagggctgggaggaggtggaactggagctggatgaggcaacgcggatgaacgtggtgacatcagccctggaggccagcggcttgggcccttcacacctggacatgaattatgtcctccagcagctggccaactggcaagatgcccattacaggcggcagctgaggtggaagatgctccagaaaggtgagtgcccccacggggccctccctgccgccagccggacaagctgcagatcgtcgtgccgatgaaaagagagggtggataagctccccgagtgctcacctgccccagcctggctctacctgctgtgcttatttgcatggactttgcatatcatttgcatagacacctctgatccccttcagtgggaaccgtagtgtcagtgctcatttatgtggcatttgcttaggattccagatctccatccacttttctcctgggggctgggctgggggttagggctgggactgtgcccccacactgcgcctcagcttcccatctctgcccgcttgcttcccctgcccccaacccctgcctcctctatcccccaggctctccaactctgcagcagtggcagcagcagtcaaaacaaacacggggggcggtgggtgggatggtggagcagcccgggggctgacccaggctggaggacagggccagccaccctcccacggcctgggaggaagagaggccttctgggactgcccaggctatggggacaaaggccttcaccagcaagggccacagttggaacagtcccctgggtgtcagaaggtgggctagggcctcctgcagggttgtggggtggaacagggtctcctctccccagccagaaaccccaaagtctgggagctgcaccttccgagtgcaggccatgtgagccctgcctctttaaggagccgcaggacatgaaagatgaccttgtgacactcatgcacagcagccattgcacgtgcatcagctcccatcagcctcattccgtggcaggtgatgtgtccccattggttaggtgaggagggtgaggctcagagagctaaggacacttgtttggggccacacagccggggtagatctgagcccgtcctctctactcctgtgctgtagcaccttcactggcccatccctcccctctagtgctgtcctggtacccgtcccagcctgtccccattctcatggccctttggtcactgccgggtggaatagcactggcttcagcaggcgtgtcatgtaagcttgtgcaggttataaactgaaccatgacctttatggcgcatgcagggggcaacctgcataattatcaatggcgactttccgtgtccttctgatacagttgatcagacccctgcccaccgcccaggccaggcctgtggtcatcaatgccccagttcacatccacctgcttctcttccaggctttgctgttccccagcagcctgcagaggccccacagacagcttgaggcccctccttctgctgcctggccaagccccacacccgcagaccctccttcccatcctctgaaatgggaccctgtgtctgtcaccagcccaccctctgtgttcatgaacctgggctggagcttggggacccctccctgcccctggcttcctcttccatgttctgccctttcccacatgttggaggcttttccaacgtcttcagggacaggcggtaggaaccccggccctcgctctgcagctggtgcaaaagctgtggctgccaggtctgggccacatggcagcccagggggcaggagaagcccgggagaggcccactggctaccagactcagccctgagcagggaacagggcccagcttccaccggcagggagttgtgagcgccttcccaacaatgtgcccctcaccccttgatgcccatgctaatggtagccaccctggttcttgttgacttgagggacctggctgtcttccctgttcttcatcctttcttctcagtccctacctactgtttgtaaccacaagtgtctctgtgtgtgggtgggtgagggcccctctgcccagtggtgtgtctcctctccctccctccctcttctgccagtggcctgggggtgtccaggctcccatccgtggcccagcccctctcccctctgtcttgatccccccctccctgcccctggcttcctcttccatgttctgccctttcccacacctttgttcctcaatagctgggggctgggactgaggcctcctgcaggtacctgccccccttcacacagcacctctcaatctcctattgcttgtcagcctgtgtgcgtgtggtgcaggaaataaaggatctataccctcctggcccagcctccagctgtctctctagggagtgtgtgtgtgcacttggcagggcgaagttgtagagaaagggtggatgctaatattgaagtatgtgccgaggactcctattaaatacgccgtttaatcatagcagcagctcctagagggcggtgggtgatgtcataagtgtctgttggatggagaaactcaggccagagtaggttaagtgatgccctcaccagcagatcatggctagtgtggagctgggatttgagctcatgcttccctgatcctttcaccccagagactgactcagtggcctggctgtgaaagataggatgggagagagtcacccactgtcttagggtgaagtccccagagcagacctggaacagggtttaggaacaagtatagtcgccctccgtatcctcaggctctgcatccgtggagtcaactaaccacagatagaaaatatttgggggaggctgggtgcagtggctcatgcctgtaatcctagcactttgggaggccgaggtgggtggatcatttgaggtcaggagttcgagaccagcctggccaacatggtgaaaccccgtctccactaaaaatacaaaaattagctgggcgtggtggtgggtgcctgtaatcccagctacttgggaggctgaggcaggaggatcacttgaacccaggaggcagaggttgcagtgagcggagatcatgccactgcactccagtctgggcaacaacagcgagactccatttgaaaacacaagaaaatatctgggggaggccaggcgcggtggctcatgcctgtaatcccagcactttgggaggctgaggtgggtggatcacttgaggtcaggagttcgagaccagcctggtcaacatggtgaaaccccgtctctactaaaaatacaaaaaaaattagctgggcatggtggcagcccctgtaatcccagctacttgggaggctgaggtgagaggatcacttgagcttggaaggttgaggttgcagtgagctgaggttgcaccactgtactccaacctgggtgacagagtaagaccctgtctcaaaaaaagagaaaagaaaatgacagacaaaccagacatgggggaaattgccagctttgataaagctttgaaggaaacggagatgcaggagaacaccttgtggaccagagaccactgagcaggagaagcagtgaaatttcctaaaatctggaggattccctgcccctgttatcttcaagtccccagtggtgatgtggaagaaaagcaacctgcaaggtggatgcaagccacaagctgctctgtgaacctgggcacctcacacagatgccactggcctgtgggtctctgaggggacccgcaaatgggactgccaaattctctggtttgctccaggatattatagaaaattatttatatgaatagtaaaaataaaacacactttgtggcccccctgccaaaagaatatcattgagaagattattgctgtggctaaccgggtctcagtcctgctgggaactctgggggacagtagaatatatctcagagtagcctgggtgaggtggctcacacctgtaatcccagcacattgggagggcgaggcaggtggatcacctgaggtcaggagttcgagaccagcctgaccaatggagaaaccccgtctccactaaagatacaaaattaactgggcatggtggcacacatgcctgtaatcccagctactcgggaggctgagacaggagaatcgcttgaatccaggaggtggaggttgcggtgagctgagattgcaccattacaccccagcctgggcaataagagtgaaactccgtctcaagg

SEQ ID NO: 13994 - DNA, 1025 bp, Homo sapiens
  source 1..1025: mol_type = unassigned DNA
ctgccttccctgtggcatcatgaagtttcgcgccaagatcaccggcaaaggctgtctagagctgttcattcacgtcagcggcaccgtcgcgaggctagcgaaggtctgcgtgctccgcgtgcgccctgacagcctgtgcttcggccccgcgggttccggcggcctccacgaggccaggctgtggtgcgaggtgcggcagggggccttccagcagtttcgcatggaaggtgtctcggaagatctcgatgagatccacctggagctgacggcggagcacctgtcccgggcggcgagaagcgcagcgggcgcgtcctccctgaagctgcagctgacccacaagcgccgcccctccctcacggtggcggtggagctggtctcgtccctgggccgcgctcgcagcgtggtgcacgatctgcccgtgcgggtgcttcccaggagagtgtggcgggactgcctgccgcccagcctgcgcgcctccgacgcgagcatccgcctgccgcgctggaggacgctgaggagcatcgtggagaggatggcgaacgtgggcagtcacgtgctggtggaagcaaacctcagtggcaggatgaccctgagtatagagacggaggtggtgtccattcaaagttattttaaaaatcttggaaaccctccccagtcggctgtgggtgtgcctgaaaacagagacctggagagcatggtgcaagtgcgggtggacaatcggaagcttctgcagtttttggagggacagcaaatacatcctacgacggccctgtgcaatatttgggacaatactcttcttcagcttgttttggttcaagaagatgtctctcttcagtatttcattcctgccttgtaaaaattcagccagcttagattttttttttaaggttttgatcttttcaaaactaaaacagaccctgagttaattgggttgaaaatttggaccttcactgacttatgcagggcgtatattttgttgagcccttcctcctttgcaaaatttatattaaagcattggtaaaaca

SEQ ID NO: 13995 - DNA, 5607 bp, Homo sapiens
  source 1..5607: mol_type = unassigned DNA
atccaaggatacaatagcagttgtttgttaagagaaatttaaactcaacaccaatactgagtccagtaaaccagaaaatatgcttctggtgatttgggtggaaggccatctccagtttaagaagctttatgtgccactatcatcattgtctgttatccttgatctcctttggtgaggggaaggcgggaaagagaggacctctccgacccttggatttttcttttaagcagaggctaataaaacaaagcgcaaactgactgtcctgaggagtctgctcacaccgctgccccgcagatcattccacagaccccttgtcccatcccttctggacagacccaggactgatgagggttcgggttcgggaggtgtggtgtggtgggggcttgtgtggctgtagcggccggctttcctaaaccccagagcgggatactcgggatctgagcagaggggaaagtcatctaagaggctgctgctttacaaggtctgggcacagagctgcccctcccttcctccctgaagtttgcatgaagtgcacattaggctgtaattaggggatttgggaggagaactttcctggtgacgctttgcttttcttctgctcttggtgagaaagtgcctccttcttcccaggatcaggacctctgccatccagcgccacaaagagacattctgcacacacactcacacacgcacacacacacacactctcacactcgcccagagacaaacttaaggtgaggagaaagagcgctagcttcacttgatctccagcttccaacttaagcagaacttgagagcatccgaactcctggatttcaggacaagtgaagaagattctttgggctataaagatgaagagtctacttcttctggtgctgatttcaatctgctgggctgatcatctttcagacaactatactctggatcatgacagagctattcacatccaagcagaaaatggcccccatctacttgtggaagcagagcaagccaaggtgttttcacacagaggtggcaatgttacactgccatgtaaattttatcgagaccctacagcatttggctcaggaatccataaaatccgaattaagtggaccaagctaacttcggattacctcaaggaagtggatgtttttgtttccatgggataccacaaaaaaacctatggaggctaccagggtagagtgtttctgaagggaggcagtgatagtgatgcttctctggtcatcacagacctcactctggaagattatgggagatataagtgtgaggtgattgaaggattagaagatgatactgttgtggtagcactggacttacaaggtgtggtattcccttactttccacgactggggcgctacaatctcaattttcacgaggcgcagcaggcgtgtctggaccaggatgctgtgatcgcctccttcgaccagctgtacgacgcctggcggggcgggctggactggtgcaatgccggctggctcagtgatggctctgtgcaatatcccatcacaaagcccagagagccctgtggggggcagaacacagtgcccggagtcaggaactacggattttgggataaagataaaagcagatatgatgttttctgttttacatccaatttcaatggccgtttttactatctgatccaccccaccaaactgacctatgatgaagcggtgcaagcttgtctcaatgatggtgctcagattgcaaaagtgggccagatatttgctgcctggaaaattctcggatatgaccgctgtgatgcgggctggttggcggatggcagcgtccgctaccccatctctaggccaagaaggcgctgcagtcctactgaggctgcagtgcgcttcgtgggtttcccagataaaaagcataagctgtatggtgtctactgcttcagagcatacaactgaatgtgcccttagagcgcatcagttttaaagtcattaagaacatgtgaaaggtgttttttttttccaatatgaactcatgcaagttaccaaaactgtgataacccttttttacttactgtaaagagtcattttcataaagatcaattcattgatttgttttttgtaaagctatcattcaatatatattataaattaatataaatttaagggaagctctatgtaaggagacttagagccaaactgtttaagctgtatcatcccaacaaagtatcctttcatgaacggggcatgcaatagcttaagaattgctaggattaaattaaggaaagtaaagctactcagagcagcaggttccacaagcacaaactttacacatttgtacaattttgaaatgcactacaataaacaaattagagcaacacatttgaaatacaggcttctttacataaactgagaggttatacaaaactcagtttcacaagggaacaatctatacctttctaaaagttaatatttcaagtctctaataggcagaatattttactctttaaaatcctgcctttctgaccaaaaaaaaaaaaaaaaattcatatggattccaatccatagtaacaagcacagttaaaactcctcaataatcccatttatatgaagcatgacacataaataagcagataatatttaaccaatgaaaaagacttctaccttcttataattaaaattacacatgtctaagaggaattgttttatcttttgagtagctttaccgagttgtatttaaattctaagggccatttgctaagcagcatttagcatctactcagggcagttatatagataaactgctggacagaaaaattgtaaaatttagcagcttgattttctgttagcctatgaaatgttattgtcctataaaaataactttaaactgatttaatatttcatatttacattatatgaaaatcaattacattataaaaggaatccctaatgcagaaacaaagatgcaactttcaaaattcttattattcctatttgtatatacacgagagaacccaaccagtgcctgtgtttggggggaaaagtcaacagtgtagttctaaaccttatcccaaacagaaaatgtggttaatgatgtcactttccttgctggtcatcattaggcttaaattaaatgctgaagctgtcatcaaagagtttacactaaaatcttcagggctttaaataaaaggttaagtccagcttccaaacacaattttccacattagcagctccaatcttcttaaataaagctctgttttcctatatttttatgactgctgagaccccacagggaccaatatttgtattcaaattacatttcatggtttcccattgtttcacaatgagttctaataaatgggatttactataataatccaagtatgacatagccggtatgctttcatgaatgtttttatgtagattttcctcccatgaacatgagtaaataaatctgtttcctgaatggattgtggttgcatttaaagctctgtaataattctaataaatttactctatagagttctgtgtgtggaaggtatagaacaattggaagtccatgaaaccataactataatcatatattattcagacaaaatattgtaataaaagtaggtcctttctttcatcaaaaacatatctgaaaattttcagatgctttaatattaaaagatgacaatgttatgtatgcacatttttaagttaggttggatatgcaaactgtacaaaactataaatccaaagagtttgtaaagtttaaactcaaacactggtggtataaatagaacttgcacttctaaattaaggaagatacctaaatggtctaggatgagatgatatattatttaaagaggggactatctcccaaataacaactttaacacctcaaatatgggggctagctcattgaaagaagtccatacttgaactattattatgtatgttccgataattttgttgaaaatacaagtgggaacaaatttctattgaagcaaacatctaattttcagttatgtccagaactctactttataatgttaaatgtagtagtatttcttaacttttaaatacttactactataggaattggtgctgatcaaaatctctggagtgactgttagctgattaaaatctataccacttacacatcatttttccattcgtgtaaaaaacaaaaaatcttaacacagtgaatactgctgagcagaattttttcttctcattttgctcaaaggaccagaatttccatgccctttatactcatacttgaatgagtctttttaatgttctcattttgctgtttttccaccaaatgtctattttcctacttcattccccaagatgtctcactgagcaggtctgaaaaagaaaggttattctaatacaattcctaacagaaagttggtacaacactggctaattcagaaatcgctcctcagacttagattccaagagtatcaaagagattagatgggaggctgggccaggaacccttgttttaatgtatttgtccataattaacactggtgaccatataaggaacaaagtatatctgcacatttcactgagacatctacattggaaaacccaaacaaaaagaagcaattcaaataaaaagacaacataagaacgaaaataagttggtcacattaacactggaagccatctttaagtgagtgctgtcatattgtgtcacagtaatttttagccaaatatggcgtttgtaaatttaaactttctctcatggaaagggggctggtacctgtcaaagtgttattttatgcaacaatatagtcactttttattttggcaattagaagtagactcaaaggagattacaatttggttgctggcagccattctgggtttcttgattttagtactccaaagaatatggtggtctcatggagtagctgaccactaaggaggggaggattaaaagggaatcacttatcagtttttagcataggatgcattaagaaatatcaacggataactgacatcgttttgttaagaagttaactgtatcgtagctcactactgccagagcggcaatggatgtacaacgaaagagatgaaaaatacaaaagttattaagccacctgattaaaagaaaaccaatatttaaaggcatttaatagatatcaagtataactttgaggagaagaatcaatctgtattaccaaaaaaaaaatgttttgattttctgtaagatacaatgaactggtacattaaaagtcaattttgtgttactgcagtatcttttaattcttctgagttgtagaatcttagctatttttctttgtgtcaaactctgtcaatacattatttccaagaaaggcatttaattcattcttgttctgatacatttgacttcaaattgtaaatacgtacaattttcatttcctagtactcttgcaaagtcaaaaaaaaaaaaagagcatttatatggtgtcgctaaatcaactatagtattatcccaaaatatattgacttttttctctttgtatatgactcaaagcataattaattttgcccaccagttcagcaatcccagaaatctattgtgttgttgattagattaacacattttaaatgctttataacttaatcatgagtgctgaattaaaaaaaggtttttcttttcata

SEQ ID NO: 13996 - DNA, 568 bp, Homo sapiens
  source 1..568: mol_type = unassigned DNA
aagattctttgggctataaagatgaagagtctacttcttctggtgctgatttcaatctgctgggctgatcatctttcagacaactatactctggatcatgacagagctattcacatccaagaaaatggcccccatctacttgtggaagcagagcaagccaaggtgttttcacacagaggtggcaatgttacactgccatgtaaattttatcgagaccctacagcatttggctcaggaatccataaaatccgaattaagtggaccaagctaacttcggattacctcaaggaagtggatgtttttgtttccatgggataccacaaaaaaacctatggaggctaccagggtagagtgtttctgaagggaggcagtgatagtgatgcttctctggtcatcacagacctcactctggaagattatgggagatataagtgtgaggtgattgaaggattagaagatgatactgttgtggtagcactggacttacaaggtgtggtattcccttactttccacgactggggcgctacaatctcaattttcacgaggcgcagcaggcgtgtctggacc

SEQ ID NO: 13997 - DNA, 788 bp, Homo sapiens
  source 1..788: mol_type = unassigned DNA
aataagtgaattaggttctggagtagaggctctcctacaaggacctccaggaacagactcagagctctttaataagtatcccagggagtcaggctttcttggaaaaaacaaattagtgtgagaagccagtactgtgcaatttcagttttaaaaatagccggtattgtcaaggctgctgtgtgcatgagagaaatagaaggtccttgttaattttcgtgtcagcttccacattaaaaccaagaagctccactgaaatccttgcctggcaaatactgcaaaggttataagtgaagaagattctttgggctataaagatgaagagtctacttcttctggtgctgatttcaatctgctgggctgatcatctttcagacaactatactctggatcatgacagagctattcacatccaagcagaaaatggcccccatctacttgtggaagcagagcaagccaaggtgttttcacacagaggtggcaatgttacactgccatgtaaattttatcgagaccctacagcatttggctcaggaatccataaaatccgaattaagtggaccaagctaacttcggattacctcaaggaagtggatgtttttgtttccatgggataccacaaaaaaacctatggaggctaccagggtagagtgtttctgaagggaggcagtgatagtgatgcttctctggtcatcacagacctcactctggaagattatgggagatataagtgtgaggtgattgaaggattagaagatgatactgttgtggtagcactggacttacaaggt

SEQ ID NO: 13998 - DNA, 799 bp, Homo sapiens
  source 1..799: mol_type = unassigned DNA
gtggatccgctgactgcagagaccctacctggcactctaagttggtgcgtcagcattttaggttgaaatgaatgaaaaatcaatcaggatgactgcagtggtagcgtgcacaactctaacctagtttgttcataattttcaactattcaccgtagacccaagcagtatgtaagatgtgaagaagattctttgggctataaagatgaagagtctacttcttctggtgctgatttcaatctgctgggctgatcatctttcagacaactatactctggatcatgacagagctattcacatccaagcagaaaatggcccccatctacttgtggaagcagagcaagccaaggtgttttcacacagaggtggcaatgttacactgccatgtaaattttatcgagaccctacagcatttggctcaggaatccataaaatccgaattaagtggaccaagctaacttcggattacctcaaggaagtggatgtttttgtttccatgggataccacaaaaaaacctatggaggctaccagggtagagtgtttctgaagggaggcagtgatagtgatgcttctctggtcatcacagacctcactctggaagattatgggagatataagtgtgaggtgattgaaggattagaagatgatactgttgtggtagcactggacttacaaggtgtggtattcccttactttccacgactggggcgctacaatctcaattttcacgaggcgcagcaggcgtgtctggaccaggatgctgtgatcgcctccttcgaccagctgtacgacgcctggcgg

SEQ ID NO: 13999 - DNA, 989 bp, Homo sapiens
  source 1..989: mol_type = unassigned DNA
ggtagcaggaattgttcaaagctgccgtcttcggctcttaaaggcagctacagtaactttctgaacagattgggttaaatatttttacagacccattctatgatgataaggcggtaataagttgtgcagtgcaacactccaaagggttccaaatctcacaagcctctttgtatgtgatgctctcgcagtgaagaagattctttgggctataaagatgaagagtctacttcttctggtgctgatttcaatctgctgggctgatcatctttcagacaactatactctggatcatgacagagctattcacatccaagcagaaaatggcccccatctacttgtggaagcagagcaagccaaggtgttttcacacagaggtggcaatgttacactgccatgtaaattttatcgagaccctacagcatttggctcaggaatccataaaatccgaattaagtggaccaagctaacttcggattacctcaaggaagtggatgtttttgtttccatgggataccacaaaaaaacctatggaggctaccagggtagagtgtttctgaagggaggcagtgatagtgatgcttctctggtcatcacagacctcactctggaagattatgggagatataagtgtgaggtgattgaaggattagaagatgatactgttgtggtagcactggacttacaaggtgtggtattcccttactttccacgactggggcgctacaatctcaattttcacgaggcgcagcaggcgtgtctggaccaggatgctgtgatcgcctccttcgaccagctgtacgacgcctggcggggcgggctggactggtgcaatgccggctggctcagtgatggctctgtgcaatatcccatcacaaagcccagagagccctgtggggggcagaacacagtgcccggagtcaggaactacggattttgggataaagataaaagcagatatgatgttttctgttttacatccaatttcaatg

SEQ ID NO: 14000 - DNA, 560 bp, Homo sapiens
  source 1..560: mol_type = unassigned DNA
ccgaactcctggatttcaggacaagcgccccttctctgattcctgtaaacaagcagagagcacatcacaactctgtgaagaagattctttgggctataaagatgaagagtctacttcttctggtgctgatttcaatctgctgggctgatcatctttcagacaactatactctggatcatgacagagctattcacatccaagcagaaaatggcccccatctacttgtggaagcagagcaagccaaggtgttttcacacagaggtggcaatgttacactgccatgtaaattttatcgagaccctacagcatttggctcaggaatccataaaatccgaattaagtggaccaagctaacttcggattacctcaaggaagtggatgtttttgtttccatgggataccacaaaaaaacctatggaggctaccagggtagagtgtttctgaagggaggcagtgatagtgatgcttctctggtcatcacagacctcactctggaagattatgggagatataagtgtgaggtgattgaaggattagaagatgatactgttgtggtagca

SEQ ID NO: 14001 - DNA, 3009 bp, Homo sapiens
  source 1..3009: mol_type = unassigned DNA
cctgaatccttggagactgacatttttcccccctaaaggcatagacaacaaaagaaattttattgagaggaaaacacaagtccttaaactgcaaagatgtttgccaggatgtctgatctccatgttctgctgttaatggctctggtgggaaagacagcctgtgggttctccctgatgtctttattggaaagcctggacccagactggacccctgaccagtatgattacagctacgaggattataatcaggaagagaacaccagtagcacacttacccacgctgagaatcctgactggtactacactgaggaccaagctgatccatgccagcccaacccctgtgaacacggtggggactgcctcgtccatgggagcaccttcacatgcagctgcctggctcctttctctgggaataagtgtcagaaagtgcaaaatacgtgcaaggacaacccatgtggccggggccaatgtctcattacccagagtcctccctactaccgctgtgtctgtaaacacccttacacaggtcccagctgctcccaagtggttcctgtatgcaggccaaacccctgccagaatggggctacctgctcccggcataagcggagatccaagttcacctgtgcctgtcccgaccagttcaaggggaaattctgtgaaataggttctgatgactgctatgttggcgatggctactcttaccgagggaaaatgaataggacagtcaaccagcatgcgtgcctttactggaactcccacctcctcttgcaggagaattacaacatgtttatggaggatgctgaaacccatgggattggggaacacaatttctgcagaaacccagatgcggacgaaaagccctggtgctttattaaagttaccaatgacaaggtgaaatgggaatactgtgatgtctcagcctgctcagcccaggacgttgcctacccagaggaaagccccactgagccatcaaccaagcttccggggtttgactcctgtggaaagactgagatagcagagaggaagatcaagagaatctatggaggctttaagagcacggcgggcaagcacccatggcaggcgtccctccagtcctcgctgcctctgaccatctccatgccccagggccacttctgtggtggggcgctgatccacccctgctgggtgctcactgctgcccactgcaccgacataaaaaccagacatctaaaggtggtgctaggggaccaggacctgaagaaagaagaatttcatgagcagagctttagggtggagaagatattcaagtacagccactacaatgaaagagatgagattccccacaatgatattgcattgctcaagttaaagccagtggatggtcactgtgctctagaatccaaatacgtgaagactgtgtgcttgcctgatgggtcctttccctctgggagtgagtgccacatctctggctggggtgttacagaaacaggaaaagggtcccgccagctcctggatgccaaagtcaagctgattgccaacactttgtgcaactcccgccaactctatgaccacatgattgatgacagtatgatctgtgcaggaaatcttcagaaacctgggcaagacacctgccagggtgactctggaggccccctgacctgtgagaaggacggcacctactacgtctatgggatagtgagctggggcctggagtgtgggaagaggccaggggtctacacccaagttaccaaattcctgaattggatcaaagccaccatcaaaagtgaaagtggcttctaaggtactgtcttctggacctcagagcccactctccttggcaccctgacaccgggaggcctcatggccaacaatggacacctccagagcctccaggggaccacacagtagactatccctactctaagcagagacaactgccacccagcctgggccttcccagaccagcatttgcacaatatcaccaggcttcttctgcctcccttggtaacccaaggaatgatggaatcaacacaacatagtatgtttgctttccttacccaattgtaccttctagaaaatcagtgttcacagagactgcctccaccacaggcatcctgcaaatgcagactccagaatccccagcatcagcgggaaccaccatcacatctttattcctcagcccagacactcgaggcactcaacagaatcagccatccacgtctaggtatcagagaggaccacaaatacaacattctccatctgctttcagagttattattttaataaaggaagatctgggatgggctggtgggccattccagcttgccgaaatcaaagccatctgaagcctgtctctggtgaacaaacttcctctctggcctctcaggaatcagggtggacatggctcacaacagcagggccttcttctttttgacgtgcagaatctcagtggcatctgggttcacctccccactctgatgatctccagcctccactgcttctgccccccgctgctgaaatcaaacataccccaagttaaaatgaagctcccccacccccactcccggccccggttcccacaggacacgctaagaagcacagggagcatttaacaggctcaccctccctttccttttcccctcttctaccctccccaagaaaaagggccttcaaggcaggaatgagaaagcaaagccaatctctcatttagacctggcttctttcttctgaacaaagtagggttcaaaatgcagactgtcatatccagcgagtccctgaccctttctgcgaatgtaacgagcaagcagtcagcacagcctgggctgccctggcccgggattgatgtagccccggtaggtttgcctctgcagaactaatggctgtgacttcagagaaagccctgcaggaagtttaacctgcgtgtcatctgcctggtcatctcagacccatgaaattaggcgccttgtttgagctgcgtttcacacttctttagagctagctgacctttggccaaaaataaactttgaaaag

SEQ ID NO: 14002 - DNA, 868 bp, Homo sapiens
  source 1..868: mol_type = unassigned DNA
atagacaacaaaagaaattttattgagaggaaaacacaagtccttaaactgcaaagatgtttgccaggatgtctgatctccatgttctgctgttaatggctctggtgggaaagacagcctgtgggttctccctgatgtctttattggaaagcctggacccagatggaggaaaactttatttgctccaggaagacaatggccttatcttcaacctggatcctcagccctaaaaagactggacccctgaccagtatgattacagctacgaggattataatcaggaagagaacaccagtagcacacttacccacgctgagaatcctgactggtactacactgaggaccaagctgatccatgccagcccaacccctgtgaacacggtggggactgcctcgtccatgggagcaccttcacatgcagctgcctggctcctttctctgggaataagtgtcagaaagtgcaaaatacgtgcaaggacaacccatgtggccggggccaatgtctcattacccagagtcctccctactaccgctgtgtctgtaaacacccttacacaggtcccagctgctcccaagtggttcctgtatgcaggccaaacccctgccagaatggggctacctgctcccggcataagcggagatccaagttcacctgtgcctgtcccgaccagttcaaggggaaattctgtgaaataggttctgatgactgctatgttggcgatggctactcttaccgagggaaaatgaataggacagtcaaccagcatgcgtgcctttactggaactcccacctcctcttgcaggagaattacaacatgtttatggaggatgctgaaacccatgggattggggaacacaatttctgcag

SEQ ID NO: 14003 - DNA, 1042 bp, Homo sapiens
  source 1..1042: mol_type = unassigned DNA
aacaaaagaaattttattgagaggaaaacacaagtccttaaactgcaaagatgtttgccaggatgtctgatctccatgttctgctgttaatggctctggtgggaaagacagcctgtgggttctccctgatgtctttattggaaagcctggacccagactggacccctgaccagtatgattacagctacgaggattataatcaggaagagaacaccagtagcacacttacccacgctgagaatcctgactggtactacactgaggaccaagctgatccatgccagcccaacccctgtgaacacggtggggactgcctcgtccatgggagcaccttcacatgcagctgcctggctcctttctctgggaataagtgtcagaaagtgcaaaatacgtgcaaggacaacccatgtggccggggccaatgtctcattacccagagtcctccctactaccgctgtgtctgtaaacacccttacacaggtcccagctgctcccaagtggttcctgtatgcaggccaaacccctgccagaatggggctacctgctcccggcataagcggagatccaagttcacctgtgcctgtcccgaccagttcaaggggaaattctgtgaaataggttctgatgactgctatgttggcgatggctactcttaccgagggaaaatgaataggacagtcaaccagcatgcgtgcctttactggaactcccacctcctcttgcaggagaattacaacatgtttatggaggatgctgaaacccatgggattggggaacacaatttctgcagaaacccagatgcggacgaaaagccctggtgctttattaaagttaccaatgacaaggtgaaatgggaatactgtgatgtctcagcctgctcagcccaggcataaaaaccagacatctaaaggtggtgctaggggaccaggacctgaagaaagaagaatttcatgagcagagctttagggtggagaagatattcaagtacagccactacaatgaaagagatgagattccccacaatgatattggcaagttcctc

SEQ ID NO: 14004 - DNA, 2972 bp, Homo sapiens
  source 1..2972: mol_type = unassigned DNA
catagaaaccactaacgaaaattaactgtttactttttcactgtctgcccatctcctcctcaaccagttcacatctgcctccttcatccccacatcaccaatgcctggctcacagcagagcttctttctccctgatgtctttattggaaagcctggacccagactggacccctgaccagtatgattacagctacgaggattataatcaggaagagaacaccagtagcacacttacccacgctgagaatcctgactggtactacactgaggaccaagctgatccatgccagcccaacccctgtgaacacggtggggactgcctcgtccatgggagcaccttcacatgcagctgcctggctcctttctctgggaataagtgtcagaaagtgcaaaatacgtgcaaggacaacccatgtggccggggccaatgtctcattacccagagtcctccctactaccgctgtgtctgtaaacacccttacacaggtcccagctgctcccaagtggttcctgtatgcaggccaaacccctgccagaatggggctacctgctcccggcataagcggagatccaagttcacctgtgcctgtcccgaccagttcaaggggaaattctgtgaaataggttctgatgactgctatgttggcgatggctactcttaccgagggaaaatgaataggacagtcaaccagcatgcgtgcctttactggaactcccacctcctcttgcaggagaattacaacatgtttatggaggatgctgaaacccatgggattggggaacacaatttctgcagaaacccagatgcggacgaaaagccctggtgctttattaaagttaccaatgacaaggtgaaatgggaatactgtgatgtctcagcctgctcagcccaggacgttgcctacccagaggaaagccccactgagccatcaaccaagcttccggggtttgactcctgtggaaagactgagatagcagagaggaagatcaagagaatctatggaggctttaagagcacggcgggcaagcacccatggcaggcgtccctccagtcctcgctgcctctgaccatctccatgccccagggccacttctgtggtggggcgctgatccacccctgctgggtgctcactgctgcccactgcaccgacataaaaaccagacatctaaaggtggtgctaggggaccaggacctgaagaaagaagaatttcatgagcagagctttagggtggagaagatattcaagtacagccactacaatgaaagagatgagattccccacaatgatattgcattgctcaagttaaagccagtggatggtcactgtgctctagaatccaaatacgtgaagactgtgtgcttgcctgatgggtcctttccctctgggagtgagtgccacatctctggctggggtgttacagaaacaggaaaagggtcccgccagctcctggatgccaaagtcaagctgattgccaacactttgtgcaactcccgccaactctatgaccacatgattgatgacagtatgatctgtgcaggaaatcttcagaaacctgggcaagacacctgccagggtgactctggaggccccctgacctgtgagaaggacggcacctactacgtctatgggatagtgagctggggcctggagtgtgggaagaggccaggggtctacacccaagttaccaaattcctgaattggatcaaagccaccatcaaaagtgaaagtggcttctaaggtactgtcttctggacctcagagcccactctccttggcaccctgacaccgggaggcctcatggccaacaatggacacctccagagcctccaggggaccacacagtagactatccctactctaagcagagacaactgccacccagcctgggccttcccagaccagcatttgcacaatatcaccaggcttcttctgcctcccttggtaacccaaggaatgatggaatcaacacaacatagtatgtttgctttccttacccaattgtaccttctagaaaatcagtgttcacagagactgcctccaccacaggcatcctgcaaatgcagactccagaatccccagcatcagcgggaaccaccatcacatctttattcctcagcccagacactcgaggcactcaacagaatcagccatccacgtctaggtatcagagaggaccacaaatacaacattctccatctgctttcagagttattattttaataaaggaagatctgggatgggctggtgggccattccagcttgccgaaatcaaagccatctgaagcctgtctctggtgaacaaacttcctctctggcctctcaggaatcagggtggacatggctcacaacagcagggccttcttctttttgacgtgcagaatctcagtggcatctgggttcacctccccactctgatgatctccagcctccactgcttctgccccccgctgctgaaatcaaacataccccaagttaaaatgaagctcccccacccccactcccggccccggttcccacaggacacgctaagaagcacagggagcatttaacaggctcaccctccctttccttttcccctcttctaccctccccaagaaaaagggccttcaaggcaggaatgagaaagcaaagccaatctctcatttagacctggcttctttcttctgaacaaagtagggttcaaaatgcagactgtcatatccagcgagtccctgaccctttctgcgaatgtaacgagcaagcagtcagcacagcctgggctgccctggcccgggattgatgtagccccggtaggtttgcctctgcagaactaatggctgtgacttcagagaaagccctgcaggaagtttaacctgcgtgtcatctgcctggtcatctcagacccatgaaattaggcgccttgtttgagctgcgtttcacacttctttagagctagctgacctttggccaaaaataaactttgaaaagaaa

SEQ ID NO: 14005 - DNA, 2087 bp, Homo sapiens
  source 1..2087: mol_type = unassigned DNA
cggagagaagagagagcccggccagacccactgcgatgagacagcaggacgcgcccaagcccactcctgcagcctgccgctgctccggcctggcccggagggtgctgaccatcgccttcgccctgctcatcctgggcctcatgacctgggcctacgccgccggggtgccgctggcctccgatcgctacggcctcctggccttcggcctctacggggccttcctttcagcgcacctggtggcgcagagcctcttcgcgtacctggagcaccggcgggtggcggcggcggcgcgggggccgctggatgcagccaccgcgcgcagtgtggcgctgaccatctccgcctaccaggaggaccccgcgtacctgcgccagtgcctggcgtccgcccgcgccctgctgtacccgcgcgcgcggctgcgcgtcctcatggtggtggatggcaaccgcgccgaggacctctacatggtcgacatgttccgcgaggtcttcgctgacgaggaccccgccacgtacgtgtgggacggcaactaccaccagccctgggaacccgcggcggcgggcgcggtgggcgccggagcctatcgggaggtggaggcggaggatcctgggcggctggcagtggaggcgctggtgaggactcgcaggtgcgtgtgcgtggcgcagcgctggggcggcaagcgcgaggtcatgtacacagccttcaaggcgctcggagattcggtggactacgtgcaggtctgtgactcggacacaaggttggaccccatggcactgctggagctcgtgcgggtactggacgaggacccccgggtaggggctgttggtggggacgtgcggatccttaaccctctggactcctgggtcagcttcctaagcagcctgcgatactgggtagccttcaatgtggagcgggcttgtcagagctacttccactgtgtatcctgcatcagcggtcctctaggcctatataggaataacctcttgcagcagtttcttgaggcctggtacaaccagaagttcctgggtacccactgtacttttggggatgaccggcacctcaccaaccgcatgctcagcatgggttatgctaccaagtacacctccaggtcccgctgctactcagagacgccctcgtccttcctgcggtggctgagccagcagacacgctggtccaagtcgtacttccgtgagtggctgtacaacgcgctctggtggcaccggcaccatgcgtggatgacctacgaggcggtggtctccggcctgttccccttcttcgtggcggccactgtgctgcgtctgttctacgcgggccgcccttgggcgctgctgtgggtgctgctgtgcgtgcagggcgtggcactggccaaggcggccttcgcggcctggctgcggggctgcctgcgcatggtgcttctgtcgctctacgcgcccctctacatgtgtggcctcctgcctgccaagttcctggcgctagtcaccatgaaccagagtggctggggcacctcgggccggcggaagctggccgctaactacgtccctctgctgcccctggcgctctgggcgctgctgctgcttgggggcctggtccgcagcgtagcacacgaggccagggccgactggagcggcccttcccgcgcagccgaggcctaccacttggccgcgggggccggcgcctacgtgggctactgggtggccatgttgacgctgtactgggtgggcgtgcggaggctttgccggcggcggaccgggggctaccgcgtccaggtgtgagtccagccacgcggatgccgcctcaagggtcttcaggggaggccagaggagagctgctgggccccgagccacgaacttgctgggtggttctctgggcctcagtttccctcctctgcaaaacgagggggtcagcccaagattcttcagtctggactatattgggactgggacttctgggtctccagggagggtatttattggtcagggtgtgggatctgaggagtggagggaaagggtcctgctttctcctcgttcttatttaatctccatttctactgtgtgatcaggatgtaataaagaattttatttattttc

SEQ ID NO: 14006 - DNA, 1948 bp, Homo sapiens
  source 1..1948: mol_type = unassigned DNA
ggctgggagagcaagccggagagaagagagagcccggccagacccactgcgatgagacaggacgcgcccaagcccactcctgcagcctgccgctgctccggcctggcccggagggtgctgaccatcgccttcgccctgctcatcctgggcctcatgacctgggcctacgccgccggggtgccgctggcctccgatcgctacggcctcctggccttcggcctctacggggccttcctttcagcgcacctggtggcgcagagcctcttcgcgtacctggagcaccggcgggtggcggcggcggcgcgggggccgctggatgcagccaccgcgcgcagtgtggcgctgaccatctccgcctaccaggaggaccccgcgtacctgcgccagtgcctggcgtccgcccgcgccctgctgtacccgcgcgcgcggctgcgcgtcctcatggtggtggatggcaaccgcgccgaggacctctacatggtcgacatgttccgcgaggtcttcgctgacgaggaccccgccacgtacgtgtgggacggcaactaccaccagccctgggaacccgcggcggcgggcgcggtgggcgccggagcctatcgggaggtggaggcggaggatcctgggcggctggcagtggaggcgctggtgaggactcgcaggtgcgtgtgcgtggcgcagcgctggggcggcaagcgcgaggtcatgtacacagccttcaaggcgctcggagattcggtggactacgtgcagttttgcagggtctgtgactcggacacaaggttggaccccatggcactgctggagctcgtgcgggtactggacgaggacccccgggtaggggctgttggtggggacgtgcggatccttaaccctctggactcctgggtcagcttcctaagcagcctgcgatactgggtagccttcaatgtggagcgggcttgtcagagctacttccactgtgtatcctgcatcagcggtcctctaggtacacctccaggtcccgctgctactcagagacgccctcgtccttcctgcggtggctgagccagcagacacgctggtccaagtcgtacttccgtgagtggctgtacaacgcgctctggtggcaccggcaccatgcgtggatgacctacgaggcggtggtctccggcctgttccccttcttcgtggcggccactgtgctgcgtctgttctacgcgggccgcccttgggcgctgctgtgggtgctgctgtgcgtgcagggcgtggcactggccaaggcggccttcgcggcctggctgcggggctgcctgcgcatggtgcttctgtcgctctacgcgcccctctacatgtgtggcctcctgcctgccaagttcctggcgctagtcaccatgaaccagagtggctggggcacctcgggccggcggaagctggccgctaactacgtccctctgctgcccctggcgctctgggcgctgctgctgcttgggggcctggtccgcagcgtagcacacgaggccagggccgactggagcggcccttcccgcgcagccgaggcctaccacttggccgcgggggccggcgcctacgtgggctactgggtggccatgttgacgctgtactgggtgggcgtgcggaggctttgccggcggcggaccgggggctaccgcgtccaggtgtgagtccagccacgcggatgccgcctcaagggtcttcaggggaggccagaggagagctgctgggccccgagccacgaacttgctgggtggttctctgggcctcagtttccctcctctgcaaaacgagggggtcagcccaagattcttcagtctggactatattgggactgggacttctgggtctccagggagggtatttattggtcagggtgtgggatctgaggagtggagggaaagggtcctgctttctcctcgttcttatttaatctccatttctactgtgtgatcag

SEQ ID NO: 14007 - DNA, 1131 bp, Homo sapiens
  source 1..1131: mol_type = unassigned DNA
ggctgggagagcaagccggagagaagagagagcccggccagacccactgcgatgagacaggacgcgcccaagcccactcctgcagcctgccgctgctccggcctggcccggagggtgctgaccatcgccttcgccctgctcatcctgggcctcatgacctgggcctacgccgccggggtgccgctggcctccgatcgctacggcctcctggccttcggcctctacggggccttcctttcagcgcacctggtggcgcagagcctcttcgcgtacctggagcaccggcgggtggcggcggcggcgcgggggccgctggatgcagccaccgcgcgcagtgtggcgctgaccatctccgcctaccaggaggaccccgcgtacctgcgccagtgcctggcgtccgcccgcgccctgctgtacccgcgcgcgcggctgcgcgtcctcatggtggtggatggcaaccgcgccgaggacctctacatggtcgacatgttccgcgaggtcttcgctgacgaggaccccgccacgtacgtgtgggacggcaactaccaccagccctgggaacccgcggcggcgggcgcggtgggcgccggagcctatcgggaggtggaggcggaggatcctgggcggctggcagtggaggcgctggtgaggactcgcaggtgcgtgtgcgtggcgcagcgctggggcggcaagcgcgaggtcatgtacacagccttcaaggcgctcggagattcggtggactacgtgcaggtctgtgactcggacacaaggttggaccccatggcactgctggagctcgtgcgggtactggacgaggacccccgggtaggggctgttggtggggacgtgcggatccttaaccctctggactcctgggtcagcttcctaagcagcctgcgatactgggtagccttcaatgtggagcgggcttgtcagagctacttccactgtgtatcctgcatcagcggtcctctagaatcctgcccaggccccagggagcacgcgatgatgccctcattcctcgcccccgtgcaggtacacctccaggtcccgctgctactcagagacgccctcgtccttcctgcggtggctgagccagcagacacgctggtccaagtcgtacttccgtga

SEQ ID NO: 14008 - DNA, 2090 bp, Homo sapiens
  source 1..2090: mol_type = unassigned DNA
gcaagccggagagaagagagagcccggccagacccactgcgatgagacaggacgcgcccaagcccactcctgcagcctgccgctgctccggcctggcccggagggtgctgaccatcgccttcgccctgctcatcctgggcctcatgacctgggcctacgccgccggggtgccgctggcctccgatcgctacggcctcctggccttcggcctctacggggccttcctttcagcgcacctggtggcgcagagcctcttcgcgtacctggagcaccggcgggtggcggcggcggcgcgggggccgctggatgcagccaccgcgcgcagtgtggcgctgaccatctccgcctaccaggaggaccccgcgtacctgcgccagtgcctggcgtccgcccgcgccctgctgtacccgcgcgcgcggctgcgcgtcctcatggtggtggatggcaaccgcgccgaggacctctacatggtcgacatgttccgcgaggtcttcgctgacgaggaccccgccacgtacgtgtgggacggcaactaccaccagccctgggaacccgcggcggcgggcgcggtgggcgccggagcctatcgggaggtggaggcggaggatcctgggcggctggcagtggaggcgctggtgaggactcgcaggtgcgtgtgcgtggcgcagcgctggggcggcaagcgcgaggtcatgtacacagccttcaaggcgctcggagattcggtggactacgtgcaggtctgtgactcggacacaaggttggaccccatggcactgctggagctcgtgcgggtactggacgaggacccccgggtaggggctgttggtggggacgtgcggatccttaaccctctggactcctgggtcagcttcctaagcagcctgcgatactgggtagccttcaatgtggagcgggcttgtcagagctacttccactgtgtatcctgcatcagcggtcctctaggcctatataggaataacctcttgcagcagtttcttgaggcctggtacaaccagaagttcctgggtacccactgtacttttggggatgaccggcacctcaccaaccgcatgctcagcatgggttatgctaccaagtacacctccaggtcccgctgctactcagagacgccctcgtccttcctgcggtggctgagccagcagacacgctggtccaagtcgtacttccgtgagtggctgtacaacgcgctctggtggcaccggcaccatgcgtggatgacctacgaggcggtggtctccggcctgttccccttcttcgtggcggccactgtgctgcgtctgttctacgcgggccgcccttgggcgctgctgtgggtgctgctgtgcgtgcagggcgtggcactggccaaggcggccttcgcggcctggctgcggggctgcctgcgcatggtgcttctgtcgctctacgcgcccctctacatgtgtggcctcctgcctgccaagttcctggcgctagtcaccatgaaccagagtggctggggcacctcgggccggcggaagctggccgctaactacgtccctctgctgcccctggcgctctgggcgctgctgctgcttgggggcctggtccgcagcgtagcacacgaggccagggccgactggagcggcccttcccgcgcagccgaggcctaccacttggccgcgggggccggcgcctacgtgggctactgggtggccatgttgacgctgtactgggtgggcgtgcggaggctttgccggcggcggaccgggggctaccgcgtccaggtgtgagtccagccacgcggatgccgcctcaagggtcttcaggggaggccagaggagagctgctgggccccgagccacgaacttgctgggtggttctctgggcctcagtttccctcctctgcaaaacgagggggtcagcccaagattcttcagtctggactatattgggactgggacttctgggtctccagggagggtatttattggtcagggtgtgggatctgaggagtggagggaaagggtcctgctttctcctcgttcttatttaatctccatttctactgtgtgatcaggatgtaataaagaattttatttattttc

SEQ ID NO: 14009 - DNA, 4190 bp, Homo sapiens
  source 1..4190: mol_type = unassigned DNA
gaagtcaagacgtctggaaagaattacccagtcctggcttcgagcagcccattgaaccagagacttgaaacagccccagccaaagacttttctcccaattctgcgcttcctgggttctgctgagtcttccacaggctttttttttttttttttttttttttaagacgaaaaagagattttctgttatcgggggcagaaagactgaagcccaaaaaaaaaaaaaaaaaaaaaagaaaagaaaagaaaaaagaaaagttaatttatttttaaagcataatttttttaagaattagactgaagtgcaacggaaacataaagagaatattagtgaaattattttttaaagtggggaagaatcaaacatttaagactcccctatcctttttaaatgttgtttttaaatttcttattttttttggccggtcgtctcaaattcatctgatctcttattacctcaattttggaaactgcccgccaccgaccctccgggaccacacagacaggctgaggacgactttatgaccaagagctgaacaagatgcattgtgagaggtttctatgtatcctgagaataattggaaccacactctttggagtctctctcctccttggaatcacagctgcttatattgttggctaccagtttatccaaacggataattactatttctcttttggactgtatggtgcctttttggcatcacacctcatcatccaaagcctgtttgcctttttggagcaccgaaaaatgaaaaaatccctagaaacccccataaagttgaacaaaacagttgccctttgcatcgctgcctatcaagaagatccagactacttaaggaaatgtttgcaatctgtgaaaaggctaacctaccctgggattaaagttgtcatggtcatagatgggaactcagaagatgacctttacatgatggacatcttcagtgaagtcatgggcagagacaaatcagccacttatatctggaagaacaacttccacgaaaagggtcccggtgagacagatgagtcacataaagaaagctcgcaacacgtaacgcaattggtcttgtccaacaaaagtatctgcatcatgcaaaaatggggtggaaaaagagaagtcatgtacacagccttcagagcactgggacgaagtgtggattatgtacaggtttgtgattcagacactatgcttgacccagcctcatctgtggagatggtaaaagttttagaagaagatcccatggttggaggtgttgggggagatgtccagattttaaacaagtacgattcctggatctcattcctcagcagtgtaagatattggatggcttttaatatagaaagggcctgtcagtcttattttgggtgtgttcagtgcattagtggacctctgggaatgtacagaaactccttgttgcatgagtttgtggaagattggtacaatcaagaatttatgggcaaccaatgtagctttggtgatgacaggcatctcacgaaccgggtgctgagcctgggctatgcaacaaaatacacagctcgatctaagtgccttactgaaacacctatagaatatctcagatggctaaaccagcagacccgttggagcaagtcctacttccgagaatggctgtacaatgcaatgtggtttcacaaacatcacttgtggatgacctacgaagcgattatcactggattctttcctttctttctcattgccacagtaatccagctcttctaccggggtaaaatttggaacattctcctcttcttgttaactgtccagctagtaggtctcataaaatcatcttttgccagctgccttagaggaaatatcgtcatggtcttcatgtctctctactcagtgttatacatgtcgagtttacttcccgccaagatgtttgcaattgcaacaataaacaaagctgggtggggcacatcaggaaggaaaaccattgttgttaatttcataggactcattccagtatcagtttggtttacaatcctcctgggtggtgtgattttcaccatttataaggagtctaaaaggccattttcagaatccaaacagacagttctaattgttggaacgttgctctatgcatgctattgggtcatgcttttgacgctgtatgtagttctcatcaataagtgtggcaggcggaagaagggacaacaatatgacatggtgcttgatgtatgatcttccatgttttgacgtttgcagtcacacacaacaccttagttcctctaggggctgtacagtattgtggcatcagataatgccaccaaaggagacatatcactgctgctgggacttgaacaaagacatttatatgggtttattttcattctgccaaagtaaaacaatacatcaacaagaagaaactcagatttaacctgttatttctatgaaaatgggatgaattctttgtttatgcactttttccttactgtgcatccgcctgaaagtgttttgccctatatacctcactagccatgctttatgtgggttatcatggaagaaaaggattttggaaactcaaggaaaagttctttcaacctatacaacctaacttatggactgttttgatagatgataattttttttttttaggaaggattttctttttaactttaccaaatgaaatgccaaaggaagttttaaaggccgttggctgtgctgtattttgatataattgtactgtgtttttaaattttgtatgccaatcttaaagacaaattttgcatattctctattttacttttctgccaaaataaacctgttcttccttttttaaaataaaataagttcttaaaaaatttatacttaaaaaatcctgcccaaaatgtgaagcttggttgactgatgttcatgatagaaagaataaaatgtttctctctctctaccttttaaaattgaatagtttatttctgtgaaagaagtatttaaactttcaatattttaactttttgtttttatttcttttagaaaaggccaatatacctatcacactttggaagtaaaaatacacactttcgtgtgtacctaaaaaaaaaatcgttgaaaatcaaggccaaaggtagtgcaattttttcattaagatttaaaaaaaagggaatgatagtctttgaaagaaaacagtaggcatccagcactggacaaaacatgggtatcaaagatgaataatctttggagattctggcagtgttttcccagaacaagtcaagtggaaagtggagaaattatctgtataattttggacacatacaatgcagtttatcaaaggttttgttctgtggcctgaatttactgggtcctacctacacattgaacatgttttgcctgtcttttttttttttttcaacttgccagttcactttacatgttagtataatgtttacacgggtgagttggataaattataaaacatataaattcaaaattggcagatagaatcaccaagtatctatcctcttttactttcaaatgaggaattttgtttttctgaattacacagatcatcacttcctatttcctgttctggacctgtataaaaatgtctacacagtagaagtgacatcaaggtttaataagtatatcaatgattggcacatataaaaattgttgaaccacatactctgaacttggctaatttagttactgcaaggcctccattatccagttttattttttacacgattgaccttgccttgtagctggtgctgtgtagacctgtgttgaaaacacaatcggaatatatgaataattgaataaacagcattatggtgaggcagagacacatggagaagtgttaaaaaaaaaatgggcttcctgcctttctgcctcttttttatgcagtcatctatgttacatctatcctgcctaagaaaaagctgcacatcctaccttcagagtacaaaaaggtacatctgagactcaagactctcactgattggagagcttgtggaaaacaaaacacaccatgccaataaatgagatgaaaacttgagtttgcctttttaactatttatgttctaagttaagctttgataacattcaaatgtcaaattctctcattcttataaaaagttgaattaattgcctgtatttattttagcaattattcaatgtatttccagtataggatgtatagtataattaattttttgtaaataaaatatttttgataaga

SEQ ID NO: 14010 - DNA, 1706 bp, Homo sapiens
  source 1..1706: mol_type = unassigned DNA
agacccccttaagttggaggaggcagaagggcaacaacggcggggaaggagaagtcaagacgtctggaaagaattacccagtcctggcttcgagcagcccattgaaccagagacttgaaacagccccagccaaagacttttctcccaattctgcgcttcctgggttctgctgagtcttccacaggctttttttttttttttttttttttttaagacgaaaaagagattttctgttatcgggggcagaaagactgaagcccaaaaaaaaaaaaaaaaaaaaaagaaaagaaaagaaaaaagaaaagttaatttatttttaaagcataatttttttaagaattagactgaagtgcaacggaaacataaagagaatattagtgaaattattttttaaagtggggaagaatcaaacatttaagactcccctatcctttttaaatgttgtttttaaatttcttattttttttggccggtcgtctcaaattcatctgatctcttattacctcaattttggaaactgcccgccaccgaccctccgggaccacacagacaggctgaggacgactttatgaccaagagctgaacaagatgcattgtgagaggtttctatgtatcctgagaataattggaaccacactctttggagtctctctcctccttggaatcacagctgcttatattgttggctaccagtttatccaaacggataattactatttctcttttggactgtatggtgcctttttggcatcacacctcatcatccaaagcctgtttgcctttttggagcaccgaaaaatgaaaaaatccctagaaacccccataaagttgaacaaaacagttgccctttgcatcgctgcctatcaagaagatccagactacttaaggaaatgtttgcaatctgtgaaaaggctaacctaccctgggattaaagttgtcatggtcatagatgggaactcagaagatgacctttacatgatggacatcttcagtgaagtcatgggcagagacaaatcagccacttatatctggaagaacaacttccacgaaaagggtcccggtgagacagatgagtcacataaagaaagctcgcaacacgtaacgcaattggtcttgtccaacaaaagtatctgcatcatgcaaaaatggggtggaaaaagagaagtcatgtacacagccttcagagcactgggacgaagtgtggattatgtacaggtttgtgattcagacactatgcttgacccagcctcatctgtggagatggtaaaagttttagaagaagatcccatggttggaggtgttgggggagatgtccagattttaaacaagtacgattcctggatctcattcctcagcagtgtaagatattggatggcttttaatatagaaagggcctgtcagtcttattttgggtgtgttcagtgcattagtggacctctgggaatgtacagaaactccttgttgcatgttttgacgtttgcagtcacacacaacaccttagttcctctaggggctgtacagtattgtggcatcagataatgccaccaaaggagacatatcactgctgctgggacttgaacaaagacatttatatgggtttattttcattctgccaaagtaaaacaatacatcaacaagaagaaactcagatttaacctgttatttctatgaaaatgggatgaattctttgtttatgcactttttcc

SEQ ID NO: 14011 - DNA, 1163 bp, Homo sapiens
  source 1..1163: mol_type = unassigned DNA
ggaggggcatggagccgccgcgggcctgctgagctccggagcgcggcagccggcggcacgatgccggtgcagctgacgacagccctgcgtgtggtgggcaccagcctgtttgccctggcagtgctgggtggcatcctggcagcctatgtgacgggctaccagttcatccacacggaaaagcactacctgtccttcggcctgtacggcgccatcctgggcctgcacctgctcattcagagcctttttgccttcctggagcaccggcgcatgcgacgtgccggccaggccctgaagctgccctccccgcggcggggctcggtggcactgtgcattgccgcataccaggaggaccctgactacttgcgcaagtgcctgcgctcggcccagcgcatctccttccctgacctcaaggtggtcatggtggtggatggcaaccgccaggaggacgcctacatgctggacatcttccacgaggtgctgggcggcaccgagcaggccggcttctttgtgtggcgcagcaacttccatgaggcaggcgagggtgagacggaggccagcctgcaggagggcatggaccgtgtgcgggatgtggtgcgggccagcaccttctcgtgcatcatgcagaagtggggaggcaagcgcgaggtcatgtacacggccttcaaggccctcggcgattcggtggactacatccaggtgtgcgactctgacactgtgctggatccagcctgcaccatcgagatgcttcgagtcctggaggaggatccccaagtagggggagtcgggggagatgtccagcccccagggaaaggtatggcagtagaggatgaccaggtccaagctgcccaggtcagagctacggaagcatggtccgttcaccaacgccacgtttctagagagcagtgagctgattctccaatggtgagcaggggactacatgtgaactgggacctgcaggccaatgtatccctgaggaaaagtccacaagaacaattcaagaaactagtaagaaacaatgggcagaaagctgtgggacgaaagcacagcaggcttctgggaggctggagatcctttctctcaagggcaggattattcccacctgccacagttcacatgccacaaataacatctcaccttcagtcaagaaaaacgcaaaggaaaaa

SEQ ID NO: 14012 - DNA, 4220 bp, Homo sapiens
  source 1..4220: mol_type = unassigned DNA
gagtgcgttcgcggctgctttgacctggtgggcgccgcctccggcactgcaccgaggcggggcgccagcgcccaggttgctgggctggccttggcgcccccttcccctacccagagcgcaggcaggcaggggggtcccgccgcgccccttcagcatatgccggtgcagctgacgacagccctgcgtgtggtgggcaccagcctgtttgccctggcagtgctgggtggcatcctggcagcctatgtgacgggctaccagttcatccacacggaaaagcactacctgtccttcggcctgtacggcgccatcctgggcctgcacctgctcattcagagcctttttgccttcctggagcaccggcgcatgcgacgtgccggccaggccctgaagctgccctccccgcggcggggctcggtggcactgtgcattgccgcataccaggaggaccctgactacttgcgcaagtgcctgcgctcggcccagcgcatctccttccctgacctcaaggtggtcatggtggtggatggcaaccgccaggaggacgcctacatgctggacatcttccacgaggtgctgggcggcaccgagcaggccggcttctttgtgtggcgcagcaacttccatgaggcaggcgagggtgagacggaggccagcctgcaggagggcatggaccgtgtgcgggatgtggtgcgggccagcaccttctcgtgcatcatgcagaagtggggaggcaagcgcgaggtcatgtacacggccttcaaggccctcggcgattcggtggactacatccaggtgtgcgactctgacactgtgctggatccagcctgcaccatcgagatgcttcgagtcctggaggaggatccccaagtagggggagtcgggggagatgtccagatcctcaacaagtacgactcatggatttccttcctgagcagcgtgcggtactggatggccttcaacgtggagcgggcctgccagtcctactttggctgtgtgcagtgtattagtgggcccttgggcatgtaccgcaacagcctcctccagcagttcctggaggactggtaccatcagaagttcctaggcagcaagtgcagcttcggggatgaccggcacctcaccaaccgagtcctgagccttggctaccgaactaagtataccgcgcgctccaagtgcctcacagagacccccactaagtacctccggtggctcaaccagcaaacccgctggagcaagtcttacttccgggagtggctctacaactctctgtggttccataagcaccacctctggatgacctacgagtcagtggtcacgggtttcttccccttcttcctcattgccacggttatacagcttttctaccggggccgcatctggaacattctcctcttcctgctgacggtgcagctggtgggcattatcaaggccacctacgcctgcttccttcggggcaatgcagagatgatcttcatgtccctctactccctcctctatatgtccagccttctgccggccaagatctttgccattgctaccatcaacaaatctggctggggcacctctggccgaaaaaccattgtggtgaacttcattggcctcattcctgtgtccatctgggtggcagttctcctgggagggctggcctacacagcttattgccaggacctgttcagtgagacagagctagccttccttgtctctggggctatactgtatggctgctactgggtggccctcctcatgctatatctggccatcatcgcccggcgatgtgggaagaagccggagcagtacagcttggcttttgctgaggtgtgacatggcccccaagcagagcgggtaaagtgcaatgggtaagggagggaaggggaatggaagagaaaagacagggtgggagggaggagggagtgctgtgttttagtctcttaatggtccaaaggacaaatctaaaatgcaaagaacggtgatgtagtatggcctgacagctctgtttagaggaggcaacactgatcccccagatgcagggctgcaggggattctgtgttttcagactgcctgtctgcttgcatctgcacataggcagtagcctcctcctgggctccagagggcactcagaagttgtgctaaaccaagttaagtcccattcagtggcaacttgtgataggtacctgagtgacggcaacctgcggaaggaggttctcccagcccatctgaacacaaccagaggtggcaggagaatttctactgagcgagctgggccggttagtgtatgtcacccccaccccacccctaagtagtcatcaatgcaataagattgcgcctgagatacaaggcccagaagcctgatctttgggcatcagaaaacagggtccaggaatggtgctttatgtgagataccccactccacatcaacattccagggatgagccaaaccagcagggagttagcactgaactgcttttaaaagtgcacattaaaaaggaaagtttgccaggaggaacaaagagattgtggtggtgctaaaggaggccataagctacacagaggccttgggtgttccacctggaaactgctcagacgtctagatgggttcttagcttgtctgtgatctctgctggggagataaaaagattaagccccaacatgttcagaaaagaagtgaagtcttgggtattttaacctgtatactcttgaattcctctcaaattcagctctgatctgaggctaagacacactccccacttcactttcttcaaagccacattttttgaggtatcactgcagtcacctcttctaccctcatcatcataggtaaggttttcaaggtggcaattggggcggagccccggctcttatagaagcttcagcaggaggcaagcgtgttctcagcacatatgggaactatgaggagcctctgatcaaattggctacaatcttggagctgcttggacggattccttggcagccgggttagcatgtgtgactttcaggctactgttcttgacaatcatctccaatggaaagcttttcagtgttcccaaagtgaactctcaaatccaaaatggttatctttgagaccatccattctcctcagtggcttctccagggaattcttacagccaagttgtgacagtcactgcatttgcctgcttctttccagaaaccaaactaggagatgaaactggttcctacatcctaaggttcttgctttctctctcatgcctcctgaggctgtttttggctgttttccctctgctgcttttggggaatgaggggaagccattttccagtgacttgcaatccaggctgttctcagcgttttgagtttaaaacctgggatcctgactaagcctttgacttaagggttgcttgcttgccctccaaatgtcctttctcagaggggccagctaacccgtgcagaaccagcactaaggtggacagcagacaagagggcaagcctctagtgtaccaagtgcttcctacaaagacgcaaggtgtgctctgagccacagatgggcaaaccctggtgctttccttcatctcccacgaactcaagggttttccaggtgtagctaacagttgccacatcacacagacctcgagtttctggtaagactgctggttgacatcagacccaacccatgaaggctggaaggcagcaggcatttgctaaggcagctgatccaggcaatcgttctgctggccaagaagttaaactattttgagcattagaatggaggaaatccggtcagccaagtgcagagttcagacttcgctaagggcttgtttttcttcagcatttacttgaagattaatgtaggatgacaggctctcctggctgtcctaccatcagctctgccttgcactgtggtcgtcaactttcctcaaatcaaaaacaggcaggtacaggtagtgggctcacaacgtttgacctcgactggtttttctaagttattttgtacatttttcagcagcaaaaccaaactgggtcttcagctttatccccgtttcttgcaagggaagagcctttatacaattggacgcattttggtttttcctcattgagaattcaaatcctcttttgtattgtttctacaataatttgtaaacatatttatttttacctgcttttttttttttttttaattttcaggtcaagttttttatactgcacttatttgtcaaaataaagattctcacatatgccggttatctcgaaa

SEQ ID NO: 14013 - DNA, 2517 bp, Homo sapiens
  source 1..2517: mol_type = unassigned DNA
ttcctccaggagtctctggtgcagctggggtggaatctggccaggccctgcttaggcccccatcctggggtcaggaaatttggaggataaggcccttcagccccaaggtcagcagggacgagcgggcagactggcgggtgtacaggagggctgggttgacctgtccttggtcactgaggccattggatcttcctccagtggctgccaggatttctggtggaagagacaggaaggcctcccccccttggtcgggtcagcctgggggctgagggcctggctgtcagccactcttcccagaacatatgtcatggcctcagtggctcatggggaagcaggggtgggcgagcttaggctagagcaagtcctgtgggagatggcagaggcctggtctgagaggcaactcggatgtgccctccagtggccatgctcccctccatgcgtctcccctgccctcctggagccctgcaggtcaatgtttaacagaaaccagagcagcggtggattaatgcgcaagggctcagccccccagccctgagcagtgggggaatcggagactttgcaacctgttctcagctctgcctcccctggccaggttgtcctcgaccagtcccgtgccatggcagcccacctgcttcccatctgcgccctcttcctgaccttactcgatatggcccaaggctttaggggccccttgctacccaaccggcccttcaccaccgtctggaatgcaaacacccagtggtgcctggagaggcacggtgtggacgtggatgtcagtgtcttcgatgtggtagccaacccagggcagaccttccgcggccctgacatgacaattttctatagctcccagctgggcacctacccctactacacgcccactggggagcctgtgtttggtggtctgccccagaatgccagcctgattgcccacctggcccgcacattccaggacatcctggctgccatacctgctcctgacttctcagggctggcagtcatcgactgggaggcatggcgcccacgctgggccttcaactgggacaccaaggacatttaccggcagcgctcacgggcactggtacaggcacagcaccctgattggccagctcctcaggtggaggcagtagcccaggaccagttccagggagctgcacgggcctggatggcaggcaccctccagctggggcgggcactgcgtcctcgcggcctctggggcttctatggcttccctgactgctacaactatgactttctaagccccaactacaccggccagtgcccatcaggcatccgtgcccaaaatgaccagctagggtggctgtggggccagagccgtgccctctatcccagcatctacatgcccgcagtgctggagggcacagggaagtcacagatgtatgtgcaacaccgtgtggccgaggcattccgtgtggctgtggctgctggtgaccccaatctgccggtgctgccctatgtccagatcttctatgacacgacaaaccactttctgcccctggatgagctggagcacagcctgggggagagtgcggcccagggggcagctggagtggtgctctgggtgagctgggaaaatacaagaaccaaggaatcatgtcaggccatcaaggagtatatggacactacactggggcccttcatcctgaacgtgaccagtggggcccttctctgcagtcaagccctgtgctccggccatggccgctgtgtccgccgcaccagccaccccaaagccctcctcctccttaaccctgccagtttctccatccagctcacgcctggtggtgggcccctgagcctgcggggtgccctctcacttgaagatcaggcacagatggctgtggagttcaaatgtcgatgctaccctggctggcaggcaccgtggtgtgagcggaagagcatgtggtgattggccacacactgagttgcacatattgagaacctaatgcactctgggtctggccagggcttcctcaaatacatgcacagtcatacaagtcatggtcacagtaaagagtacactcagccactgtcacaggcatattccctgcacacacatgcatacttacagactggaatagtggcataaggagttagaaccacagcagacaccattcattccatgtccatatgcatctacttggcaaggtcatagacaattcctccagagacactgagccagtctttgaactgcagcaatcacaaaggctgacattcactgagtgcctactctttgccaatccccgtgctaagcgttttatgtggacttattcattcctcacaatgaggctatgaggaaactgagtcactcacattgagagtaagcacgttgcccaaggttgcacagcaagaaaagggagaagttgagattcaaacccaggctgtctagctccgggggtacagcccttgcactcctactgagtttgtggtaaccagccctgcacgacccctgaatctgctgagaggcaccagtccagcaaataaagcagtcatgatttactt

SEQ ID NO: 14014 - DNA, 2324 bp, Homo sapiens
  source 1..2324: mol_type = unassigned DNA
agatgtggggagcgcctctgccctgtcgccccgtccgggatgtgaggagcgtctctccctggccgccccgtctgagaagtgaggagcccctccgcccagcagccgccctgtctgagaagctagtcttgaattcctgacctcaggtgatcctcccgcgttggcctcccaaagtgctgggattacaggcatgagccaccactcctggccccagaaagtgacattctttacttaccacaggaggaaaagatccacgaaagtaaagtgcctagggcccatcaatgtcagatgcagccacgtggacaaagaacactccctgagcacaagacacgaaagaacccggtctccagtgtcacaaacaggcctgcccagcagggtctgcccctgcccacctcctccagcctaggttgtcctcgaccagtcccgtgccatggcagcccacctgcttcccatctgcgccctcttcctgaccttactcgatatggcccaaggctttaggggccccttgctacccaaccggcccttcaccaccgtctggaatgcaaacacccagtggtgcctggagaggcacggtgtggacgtggatgtcagtgtcttcgatgtggtagccaacccagggcagaccttccgcggccctgacatgacaattttctatagctcccagctgggcacctacccctactacacgcccactggggagcctgtgtttggtggtctgccccagaatgccagcctgattgcccacctggcccgcacattccaggacatcctggctgccatacctgctcctgacttctcagggctggcagtcatcgactgggaggcatggcgcccacgctgggccttcaactgggacaccaaggacatttaccggcagcgctcacgggcactggtacaggcacagcaccctgattggccagctcctcaggtggaggcagtagcccaggaccagttccagggagctgcacgggcctggatggcaggcaccctccagctggggcgggcactgcgtcctcgcggcctctggggcttctatggcttccctgactgctacaactatgactttctaagccccaactacaccggccagtgcccatcaggcatccgtgcccaaaatgaccagctagggtggctgtggggccagagccgtgccctctatcccagcatctacatgcccgcagtgctggagggcacagggaagtcacagatgtatgtgcaacaccgtgtggccgaggcattccgtgtggctgtggctgctggtgaccccaatctgccggtgctgccctatgtccagatcttctatgacacgacaaaccactttctgcccctggatgagctggagcacagcctgggggagagtgcggcccagggggcagctggagtggtgctctgggtgagctgggaaaatacaagaaccaaggaatcatgtcaggccatcaaggagtatatggacactacactggggcccttcatcctgaacgtgaccagtggggcccttctctgcagtcaagccctgtgctccggccatggccgctgtgtccgccgcaccagccaccccaaagccctcctcctccttaaccctgccagtttctccatccagctcacgcctggtggtgggcccctgagcctgcggggtgccctctcacttgaagatcaggcacagatggctgtggagttcaaatgtcgatgctaccctggctggcaggcaccgtggtgtgagcggaagagcatgtggtgattggccacacactgagttgcacatattgagaacctaatgcactctgggtctggccagggcttcctcaaatacatgcacagtcatacaagtcatggtcacagtaaagagtacactcagccactgtcacaggcatattccctgcacacacatgcatacttacagactggaatagtggcataaggagttagaaccacagcagacaccattcattccatgtccatatgcatctacttggcaaggtcatagacaattcctccagagacactgagccagtctttgaactgcagcaatcacaaaggctgacattcactgagtgcctactctttgccaatccccgtgctaagcgttttatgtggacttattcattcctcacaatgaggctatgaggaaactgagtcactcacattgagagtaagcacgttgcccaaggttgcacagcaagaaaagggagaagttgagattcaaacccaggctgtctagctccgggggtacagcccttgcactcctactgagtttgtggtaaccagccctgcacgacccctgaatctgctgagaggcaccagtccagcaaataaagcagtcatgattt

SEQ ID NO: 14015 - DNA, 1522 bp, Homo sapiens
  source 1..1522: mol_type = unassigned DNA
cttcctccaggagtctctggtgcagctggggtggaatctggccaggccctgcttaggcccccatcctggggtcaggaaatttggaggataaggcccttcagccccaaggttgtcctcgaccagtcccgtgccatggcagcccacctgcttcccatctgcgccctcttcctgaccttactcgatatggcccaaggctttaggggccccttgctacccaaccggcccttcaccaccgtctggaatgcaaacacccagtggtgcctggagaggcacggtgtggacgtggatgtcagtgtcttcgatgtggtagccaacccagggcagaccttccgcggccctgacatgacaattttctatagctcccagctgggcacctacccctactacacgcccactggggagcctgtgtttggtggtctgccccagaatgccagcctgattgcccacctggcccgcacattccaggacatcctggctgccatacctgctcctgacttctcagggctggcagtcatcgactgggaggcatggcgcccacgctgggccttcaactgggacaccaaggacatttaccggcagcgctcacgggcactggtacaggcacagcaccctgattggccagctcctcaggtggaggcagtagcccaggaccagttccagggagctgcacgggcctggatggcaggcaccctccagctggggcgggcactgcgtcctcgcggcctctggggcttctatggcttccctgactgctacaactatgactttctaagccccaactacaccggccagtgcccatcaggcatccgtgcccaaaatgaccagctagggtggctgtggggccagagccgtgccctctatcccagcatctacatgcccgcagtgctggagggcacagggaagtcacagatgtatgtgcaacaccgtgtggccgaggcattccgtgtggctgtggctgctggtgaccccaatctgccggtgctgccctatgtccagatcttctatgacacgacaaaccactttctgcccctggaatcatgtcaggccatcaaggagtatatggacactacactggggcccttcatcctgaacgtgaccagtggggcccttctctgcagtcaagccctgtgctccggccatggccgctgtgtccgccgcaccagccaccccaaagccctcctcctccttaaccctgccagtttctccatccagctcacgcctggtggtgggcccctgagcctgcggggtgccctctcacttgaagatcaggcacagatggctgtggagttcaaatgtcgatgctaccctggctggcaggcaccgtggtgtgagcggaagagcatgtggtgattggccacacactgagttgcacatattgagaacctaatgcactctgggtctggccagggcttcctcaaatacatgcacagtcatacaagtcatggtcacagtaaagagtacactcagccactgtcacaggcatattccctgcacacacatgcatacttacagactggaatag

SEQ ID NO: 14016 - DNA, 2081 bp, Homo sapiens
  source 1..2081: mol_type = unassigned DNA
gggtggggtgaccccctacaaaagctcagaatttccagcagcggctccttcctccaggagtctctggtgcagctggggtggaatctggccaggccctgcttaggcccccatcctggggtcaggaaatttggaggataaggcccttcagccccaaggttgtcctcgaccagtcccgtgccatggcagcccacctgcttcccatctgcgccctcttcctgaccttactcgatatggcccaaggctttaggggccccttgctacccaaccggcccttcaccaccgtctggaatgcaaacacccagtggtgcctggagaggcacggtgtggacgtggatgtcagtgtcttcgatgtggtagccaacccagggcagaccttccgcggccctgacatgacaattttctatagctcccagctgggcacctacccctactacacgcccactggggagcctgtgtttggtggtctgccccagaatgccagcctgattgcccacctggcccgcacattccaggacatcctggctgccatacctgctcctgacttctcagggctggcagtcatcgactgggaggcatggcgcccacgctgggccttcaactgggacaccaaggacatttaccggcagcgctcacgggcactggtacaggcacagcaccctgattggccagctcctcaggtggaggcagtagcccaggaccagttccagggagctgcacgggcctggatggcaggcaccctccagctggggcgggcactgcgtcctcgcggcctctggggcttctatggcttccctgactgctacaactatgactttctaagccccaactacaccggccagtgcccatcaggcatccgtgcccaaaatgaccagctagggtggctgtggggccagagccgtgccctctatcccagcatctacatgcccgcagtgctggagggcacagggaagtcacagatgtatgtgcaacaccgtgtggccgaggcattccgtgtggctgtggctgctggtgaccccaatctgccggtgctgccctatgtccagatcttctatgacacgacaaaccactttctgcccctggatgagctggagcacagcctgggggagagtgcggcccagggggcagctggagtggtgctctgggtgagctgggaaaatacaagaaccaaggaatcatgtcaggccatcaaggagtatatggacactacactggggcccttcatcctgaacgtgaccagtggggcccttctctgcagtcaagccctgtgctccggccatggccgctgtgtccgccgcaccagccaccccaaagccctcctcctccttaaccctgccagtttctccatccagctcacgcctggtggtgggcccctgagcctgcggggtgccctctcacttgaagatcaggcacagatggctgtggagttcaaatgtcgatgctaccctggctggcaggcaccgtggtgtgagcggaagagcatgtggtgattggccacacactgagttgcacatattgagaacctaatgcactctgggtctggccagggcttcctcaaatacatgcacagtcatacaagtcatggtcacagtaaagagtacactcagccactgtcacaggcatattccctgcacacacatgcatacttacagactggaatagtggcataaggagttagaaccacagcagacaccattcattccatgtccatatgcatctacttggcaaggtcatagacaattcctccagagacactgagccagtctttgaactgcagcaatcacaaaggctgacattcactgagtgcctactctttgccaatccccgtgctaagcgttttatgtggacttattcattcctcacaatgaggctatgaggaaactgagtcactcacattgagagtaagcacgttgcccaaggttgcacagcaagaaaagggagaagttgagattcaaacccaggctgtctagctccgggggtacagcccttgcactcctactgagtttgtggtaaccagccctgcacgacccctgaatctgctgagaggcaccagtccagcaaataaagcagtcatgatttactta

SEQ ID NO: 14017 - DNA, 567 bp, Homo sapiens
  source 1..567: mol_type = unassigned DNA
ccttcctccaggagtctctggtgcagctggggtggaatctggccaggccctgcttaggcccccatcctggggtcaggaaatttggaggataaggcccttcagccccaaggtcaatgtttaacagaaaccagagcagcggtggattaatgcgcaagggctcagccccccagccctgagcagtgggggaatcggagactttgcaacctgttctcagctctgcctcccctggccaggttgtcctcgaccagtcccgtgccatggcagcccacctgcttcccatctgcgccctcttcctgaccttactcgatatggcccaaggctttaggggccccttgctacccaaccggcccttcaccaccgtctggaatgcaaacacccagtggtgcctggagaggcacggtgtggacgtggatgtcagtgtcttcgatgtggtagccaacccagggcagaccttccgcggccctgacatgacaattttctatagctcccagctgggcacctacccctactacacgcccactggggagcctgtgtttggtggtctgccccagaatgccagcctgattg

SEQ ID NO: 14018 - DNA, 666 bp, Homo sapiens
  source 1..666: mol_type = unassigned DNA
cttcctccaggagtctctggtgcagctggggtggaatctggccaggccctgcttaggcccccatcctggggtcaggaaatttggaggataaggcccttcagccccaagtgctggagggcacagggaagtcacagatgtatgtgcaacaccgtgtggccgaggcattccgtgtggctgtggctgctggtgaccccaatctgccggtgctgccctatgtccagatcttctatgacacgacaaaccactttctgcccctggatgagctggagcacagcctgggggagagtgcggcccagggggcagctggagtggtgctctgggtgagctgggaaaatacaagaaccaaggaatcatgtcaggccatcaaggagtatatggacactacactggggcccttcatcctgaacgtgaccagtggggcccttctctgcagtcaagccctgtgctccggccatggccgctgtgtccgccgcaccagccaccccaaagccctcctcctccttaaccctgccagtttctccatccagctcacgcctggtggtgggcccctgagcctgcggggtgccctctcacttgaagatcaggcacagatggctgtggagttcaaatgtcgatgctaccctggctggcaggcaccgtggtgtgagcggaagagcatgtggtgat

SEQ ID NO: 14019 - DNA, 561 bp, Homo sapiens
  source 1..561: mol_type = unassigned DNA
tttttgtatttttagtagagaaggggtttcaccatgttagccgggatggtctcgatctcctgacctcgtgatctgccacctcggcttcccaaagtgctaggattataggcgtgagcctccgcacctggcatgcctggccatattttaaaatattttttttaaggaggaaaagatccacgaaagtaaagtgcctagggcccatcaatgtcagatgcagccacgtggacaaagaacactccctgagcacaagacacgaaagaacccggtctccagtgtcacaaacaggcctgcccagcagggtctgcccctgcccacctcctccagcctaggttgtcctcgaccagtcccgtgccatggcagcccacctgcttcccatctgcgccctcttcctgaccttactcgatatggcccaaggctttaggggccccttgctacccaaccggcccttcaccaccgtctggaatgcaaacacccagtggtgcctggagaggcacggtgtggacgtggatgtcagtgtcttcgatgtggtagccaacccagggcagaccttccgcggccctg

SEQ ID NO: 14020 - DNA, 1084 bp, Homo sapiens
  source 1..1084: mol_type = unassigned DNA
cttcctccaggagtctctggtgcagctggggtggaatctggccaggccctgcttaggcccccatcctggggtcaggaaatttggaggataaggcccttcagccccaaggacatcctggctgccatacctgctcctgacttctcagggctggcagtcatcgactgggaggcatggcgcccacgctgggccttcaactgggacaccaaggacatttaccggcagcgctcacgggcactggtacaggcacagcaccctgattggccagctcctcaggtggaggcagtagcccaggaccagttccagggagctgcacgggcctggatggcaggcaccctccagctggggcgggcactgcgtcctcgcggcctctggggcttctatggcttccctgactgctacaactatgactttctaagccccaactacaccggccagtgcccatcaggcatccgtgcccaaaatgaccagctagggtggctgtggggccagagccgtgccctctatcccagcatctacatgcccgcagtgctggagggcacagggaagtcacagatgtatgtgcaacaccgtgtggccgaggcattccgtgtggctgtggctgctggtgaccccaatctgccggtgctgccctatgtccagatcttctatgacacgacaaaccactttctgcccctggatgagctggagcacagcctgggggagagtgcggcccagggggcagctggagtggtgctctgggtgagctgggaaaatacaagaaccaaggaatcatgtcaggccatcaaggagtatatggacactacactggggcccttcatcctgaacgtgaccagtggggcccttctctgcagtcaagccctgtgctccggccatggccgctgtgtccgccgcaccagccaccccaaagccctcctcctccttaaccctgccagtttctccatccagctcacgcctggtggtgggcccctgagcctgcggggtgccctctcacttgaagatcaggcacagatggctgtggagttcaaatgtcgatgctaccctggctggcaggcaccgtggtgtgagcggaagagcatgtggtgat

SEQ ID NO: 14021 - DNA, 2055 bp, Homo sapiens
  source 1..2055: mol_type = unassigned DNA
attctggagggaaacagggtcaaggcgatctcctcccccacgcctgttcctggccctttcctctcagggggcagcaggaagtgaggagaaagggctgggatgggaggcgggagcggatgggagggaatggggtttatcaagtcctcggcgagctgcccaacgggcagcagctggcgcaagtagcctagctggagaggctcaccccaggaaggagggaggccaccgacctactgggccgacggactcccacacagttcctgagctggtgccaggcaggtgacacctcctgcagcccccagcatgcgggcaggcccaggccccaccgttacattggccctggtgctggcggtgtcatgggccatggagctcaagcccacagcaccacccatcttcactggccggccctttgtggtagcgtgggacgtgcccacacaggactgtggcccacgcctcaaggtgccactggacctgaatgcctttgatgtgcaggcctcacctaatgagggttttgtgaaccagaatattaccatcttctaccgcgaccgtctaggcctgtatccacgcttcgattctgccggaaggtctgtgcatggtggtgtgccacagaatgtcagcctttgggcacaccggaagatgctgcagaaacgtgtggagcactacattcggacacaggagtctgcggggctggcggtcatcgactgggaggactggcgacctgtgtgggtgcgcaactggcaggacaaagatgtgtatcgccggttatcacgccagctagtggccagtcgtcaccctgactggcctccagaccgcatagtcaaacaggcacaatatgagtttgagttcgcagcacagcagttcatgctggagacactgcgttatgtcaaggcagtgcggccccggcacctctggggcttctacctctttcctgactgctacaatcatgattatgtgcagaactgggagagctacacaggccgctgccctgatgttgaggtggcccgcaatgaccagctggcctggctgtgggctgagagcacggccctcttcccgtctgtctacctggacgagacacttgcttcctcccgccatggccgcaactttgtgagcttccgtgttcaggaggcccttcgtgtggctcgcacccaccatgccaaccatgcactcccagtctacgtcttcacacgacccacctacagccgcaggctcacggggcttagtgagatggacctcatctctaccattggcgagagtgcggccctgggcgcagctggtgtcatcctctggggtgacgcggggtacaccacaagcacggagacctgccagtacctcaaagattacctgacacggctgctggtcccctacgtggtcaatgtgtcctgggccacccaatattgcagccgggcccagtgccatggccatgggcgctgtgtgcgccgcaaccccagtgccagtaccttcctgcatctcagcaccaacagtttccgcctagtgcctggccatgcacctggtgaaccccagctgcgacctgtgggggagctcagttgggccgacattgaccacctgcagacacacttccgctgccagtgctacttgggctggagtggtgagcaatgccagtgggaccataggcaggcagctggaggtgccagcgaggcctgggctgggtcccacctcaccagtctgctggctctggcagccctggcctttacctggaccttgtaggggtctcctgcctagctgcctagcaagctggcctctaccacaagggctctcttaggcatgtaggaccctgcagggggtggacaaactggagtctggagtgggcagagcccccaggaagcccaggagggcatccataccagctcgcacccccctgttctaagggggaggggaagtccctgggaggccccttctctccctgccagaggggaaggagggtacagctgggctggggaggacctgaccctactcccttgccctagatagtttattattattattattttggggtctcttttgtaaattaaacataaaacaattgcttctctgcttgga

SEQ ID NO: 14022 - DNA, 2136 bp, Homo sapiens
  source 1..2136: mol_type = unassigned DNA
atttcaggctgactggcgctcgtggctgagactcccatagaaagcccggctcagaggggcattagggtcctaaatgggcggccacgtccctctgcagaggacctggggctcttcgagcccgaaacgaggcaccggcaccgagaaaggtggaccacaccttcccgccccgtccgcaagtccaatcccgggcccacctccgcactggagtcttaaagggccagcgtgcctgggggcggagccagcagaggcgctgagccgggccgcgcctgggcgaacggccggagcgggctgggctgggcccgggatggcggtggccctggcgccggtcccggtggcgccccgcgcgagttcctgagctggtgccaggcaggtgacacctcctgcagcccccagcatgcgggcaggcccaggccccaccgttacattggccctggtgctggcggtgtcatgggccatggagctcaagcccacagcaccacccatcttcactggccggccctttgtggtagcgtgggacgtgcccacacaggactgtggcccacgcctcaaggtgccactggacctgaatgcctttgatgtgcaggcctcacctaatgagggttttgtgaaccagaatattaccatcttctaccgcgaccgtctaggcctgtatccacgcttcgattctgccggaaggtctgtgcatggtggtgtgccacagaatgtcagcctttgggcacaccggaagatgctgcagaaacgtgtggagcactacattcggacacaggagtctgcggggctggcggtcatcgactgggaggactggcgacctgtgtgggtgcgcaactggcaggacaaagatgtgtatcgccggttatcacgccagctagtggccagtcgtcaccctgactggcctccagaccgcatagtcaaacaggcacaatatgagtttgagttcgcagcacagcagttcatgctggagacactgcgttatgtcaaggcagtgcggccccggcacctctggggcttctacctctttcctgactgctacaatcatgattatgtgcagaactgggagagctacacaggccgctgccctgatgttgaggtggcccgcaatgaccagctggcctggctgtgggctgagagcacggccctcttcccgtctgtctacctggacgagacacttgcttcctcccgccatggccgcaactttgtgagcttccgtgttcaggaggcccttcgtgtggctcgcacccaccatgccaaccatgcactcccagtctacgtcttcacacgacccacctacagccgcaggctcacggggcttagtgagatggacctcatctctaccattggcgagagtgcggccctgggcgcagctggtgtcatcctctggggtgacgcggggtacaccacaagcacggagacctgccagtacctcaaagattacctgacacggctgctggtcccctacgtggtcaatgtgtcctgggccacccaatattgcagccgggcccagtgccatggccatgggcgctgtgtgcgccgcaaccccagtgccagtaccttcctgcatctcagcaccaacagtttccgcctagtgcctggccatgcacctggtgaaccccagctgcgacctgtgggggagctcagttgggccgacattgaccacctgcagacacacttccgctgccagtgctacttgggctggagtggtgagcaatgccagtgggaccataggcaggcagctggaggtgccagcgaggcctgggctgggtcccacctcaccagtctgctggctctggcagccctggcctttacctggaccttgtaggggtctcctgcctagctgcctagcaagctggcctctaccacaagggctctcttaggcatgtaggaccctgcagggggtggacaaactggagtctggagtgggcagagcccccaggaagcccaggagggcatccataccagctcgcacccccctgttctaagggggaggggaagtccctgggaggccccttctctccctgccagaggggaaggagggtacagctgggctggggaggacctgaccctactcccttgccctagatagtttattattattattattttggggtctcttttgtaaattaaacataaaacaattgc

SEQ ID NO: 14023 - DNA, 301 bp, Homo sapiens
  source 1..301: mol_type = unassigned DNA
ggtggcggtggagggaagggccgggcggccggcgccgccgtgggaggtccgctgcccctttgtccctacggggcctcctccaagccgggagagtgtcagcgctcgagagaaattcctgagctggtgccaggcaggtgacacctcctgcagcccccagcatgcgggcaggcccaggccccaccgttacattggccctggtgctggcggtgtcatgggccatggagctcaagcccacagcaccacccatcttcactggccggccctttgtggtagcgtgggacgtgcccacacaggactgtgg

SEQ ID NO: 14024 - DNA, 550 bp, Homo sapiens
  source 1..550: mol_type = unassigned DNA
ctcccggcagcgttccttccagtttcgtagcctcttgacgagctgttccctgctttacccaaatgctgtcgtttctctggatcaagggttcttcacggtgtacagggtgggcatcagctgttcagggttctctgaaaccatgtactggatgttcctgagctggtgccaggcaggtgacacctcctgcagcccccagcatgcgggcaggcccaggccccaccgttacattggccctggtgctggcggtgtcatgggccatggagctcaagcccacagcaccacccatcttcactggccggccctttgtggtagcgtgggacgtgcccacacaggactgtggcccacgcctcaaggtgccactggacctgaatgcctttgatgtgcaggcctcacctaatgagggttttgtgaaccagaatattaccatcttctaccgcgaccgtctaggcctgtatccacgcttcgattctgccggaaggtctgtgcatggtggtgtgccacagaatgtcagcctttgggcacaccggaagatgctgcagaaacgtgtgga

SEQ ID NO: 14025 - DNA, 357 bp, Homo sapiens
  source 1..357: mol_type = unassigned DNA
gagctgttccctgctttacccaaatgctgtcgtttctctggatcaagggttcttcacggtgtacaggttcctgagctggtgccaggcaggtgacacctcctgcagcccccagcatgcgggcaggcccaggccccaccgttacattggccctggtgctggcggtgtcatgggccatggagctcaagcccacagcaccacccatcttcactggccggccctttgtggtagcgtgggacgtgcccacacaggactgtggcccacgcctcaaggtgccactggacctgaatgcctttgatgtgcaggcctcacctaatgagggttttgtgaaccagaatattaccatcttctaccgcgacc

SEQ ID NO: 14026 - DNA, 571 bp, Homo sapiens
  source 1..571: mol_type = unassigned DNA
agcagctggcgcaagtagcctagctggagaggctcaccccaggaaggagggaggccaccgacctactgggccgacggactcccacacagggctggcggcgccgcggagctgggaggactgaaccaccggcctcgggctgcaggggaaacatttcaggctgactggcgctcgtggctgagactcccatagaaagcccggctcagaggggcattagggtcctaaatgggcggccacgtccctctgcagaggacctggggctcttcgagcccgaaacgaggcaccggcaccgagaaagttcctgagctggtgccaggcaggtgacacctcctgcagcccccagcatgcgggcaggcccaggccccaccgttacattggccctggtgctggcggtgtcatgggccatggagctcaagcccacagcaccacccatcttcactggccggccctttgtggtagcgtgggacgtgcccacacaggactgtggcccacgcctcaaggtgccactggacctgaatgcctttgatgtgcaggcctcacctaatgagggttttgtgaaccagaatattaccat

SEQ ID NO: 14027 - DNA, 2318 bp, Homo sapiens
  source 1..2318: mol_type = unassigned DNA
gggtttatcaagtcctcggcgagctgcccaacgggcagcagctggcgcaagtagcctagctggagaggctcaccccaggaaggagggaggccaccgacctactgggccgacggactcccacacagggctggcggcgccgcggagctgggaggactgaaccaccggcctcgggctgcaggggaaacatttcaggctgactggcgctcgtggctgagactcccatagaaagcccggctcagaggggcattagggtcctaaatgggcggccacgtccctctgcagaggacctggggctcttcgagcccgaaacgaggcaccggcaccgagaaaggtggaccacaccttcccgccccgtccgcaagtccaatcccgggcccacctccgcactggagtcttaaagggccagcgtgcctgggggcggagccagcagaggcgctgagccgggccgcgcctgggcgaacggccggagcgggctgggctgggcccgggatggcggtggccctggcgccggtcccggtggcgccccgcgcgagttcctgagctggtgccaggcaggtgacacctcctgcagcccccagcatgcgggcaggcccaggccccaccgttacattggccctggtgctggcggtgtcatgggccatggagctcaagcccacagcaccacccatcttcactggccggccctttgtggtagcgtgggacgtgcccacacaggactgtggcccacgcctcaaggtgccactggacctgaatgcctttgatgtgcaggcctcacctaatgagggttttgtgaaccagaatattaccatcttctaccgcgaccgtctaggcctgtatccacgcttcgattctgccggaaggtctgtgcatggtggtgtgccacagaatgtcagcctttgggcacaccggaagatgctgcagaaacgtgtggagcactacattcggacacaggagtctgcggggctggcggtcatcgactgggaggactggcgacctgtgtgggtgcgcaactggcaggacaaagatgtgtatcgccggttatcacgccagctagtggccagtcgtcaccctgactggcctccagaccgcatagtcaaacaggcacaatatgagtttgagttcgcagcacagcagttcatgctggagacactgcgttatgtcaaggcagtgcggccccggcacctctggggcttctacctctttcctgactgctacaatcatgattatgtgcagaactgggagagctacacaggccgctgccctgatgttgaggtggcccgcaatgaccagctggcctggctgtgggctgagagcacggccctcttcccgtctgtctacctggacgagacacttgcttcctcccgccatggccgcaactttgtgagcttccgtgttcaggaggcccttcgtgtggctcgcacccaccatgccaaccatgcactcccagtctacgtcttcacacgacccacctacagccgcaggctcacggggcttagtgagatggacctcatctctaccattggcgagagtgcggccctgggcgcagctggtgtcatcctctggggtgacgcggggtacaccacaagcacggagacctgccagtacctcaaagattacctgacacggctgctggtcccctacgtggtcaatgtgtcctgggccacccaatattgcagccgggcccagtgccatggccatgggcgctgtgtgcgccgcaaccccagtgccagtaccttcctgcatctcagcaccaacagtttccgcctagtgcctggccatgcacctggtgaaccccagctgcgacctgtgggggagctcagttgggccgacattgaccacctgcagacacacttccgctgccagtgctacttgggctggagtggtgagcaatgccagtgggaccataggcaggcagctggaggtgccagcgaggcctgggctgggtcccacctcaccagtctgctggctctggcagccctggcctttacctggaccttgtaggggtctcctgcctagctgcctagcaagctggcctctaccacaagggctctcttaggcatgtaggaccctgcagggggtggacaaactggagtctggagtgggcagagcccccaggaagcccaggagggcatccataccagctcgcacccccctgttctaagggggaggggaagtccctgggaggccccttctctccctgccagaggggaaggagggtacagctgggctggggaggacctgaccctactcccttgccctagatagtttattattattattattttggggtctcttttgtaaattaaacataaaacaat

SEQ ID NO: 14028 - DNA, 4054 bp, Homo sapiens
  source 1..4054: mol_type = unassigned DNA
gaatggggtttatcaagtcctcggcgagctgcccaacgggcagcagctggcgcaagtagcctagctggagaggctcaccccaggaaggagggaggccaccgacctactgggccgacggactcccacacaggtgagcccagagcagacggctggtctgcacccccacagatgcgctcgcagttgcactccctccctctcctggcgcccgggagggttaggggctggtggtgcagacgcgggcccttttgggagttgagtctcgcacaagggagcggacctaggaagagccgaggtggtttcgcacggggctcgccagggtctaagcctgccccccaccgggagaggcctgtggagcgtagggggcgctggatacgggatggaggccctgggagacccctcttgctggctttctcggaggtccagccagaaactgctgcaaggaatggaggcctcctcggggttgagagggagccgggctcccaaaggacctcagagactgggcagaaaaggacgggatctcagggatgactgtcccgccctgatgcgagtcagggagaggggcggccaacctcctagacccctctgagcttccctgaccccaaccctgcggccacgccgcgacccagagccgggctgccaggataacgactgcctcggcccttcctgggccggctaagaagcggtgcttggccccttccctcagtctggcagggggcggggcctccctttagacggcggaccagagaagggggcccctgattcgtgggaggcggggcactactctccaggagaccagaggtcgcctcaggtcaaagtccctttttccacacaaaggggacccacggctggcgtctacgttagggggtgcagagccagatctggtgctgccccctgccaacctcggagtaccacagcacctcctgatggccgaacggggcaacgcctcctcctattcccccccccccccttcccgtccccctgccttgtccctcacactgtctctttaaagggctggcggcgccgcggagctgggaggactgaaccaccggcctcgggctgcaggggaaacatttcaggctgactggcgctcgtggctgagactcccatagaaagcccggctcagaggggcattagggtcctaaatgggcggccacgtccctctgcagaggacctggggctcttcgagcccgaaacgaggcaccggcaccgagaaaggtggaccacaccttcccgccccgtccgcaagtccaatcccgggcccacctccgcactggagtcttaaagggccagcgtgcctgggggcggagccagcagaggcgctgagccgggccgcgcctgggcgaacggccggagcgggctgggctgggcccgggatggcggtggccctggcgccggtcccggtggcgccccgcgcgaggtgagggcgggcggtgcaaacctggcggctctctccccttgggctggggtctgaatccccgggggtgctcgcggagaggcgtcccagaaaccccacccccacccgaccgggcgcaggccccacgtgtggggcgggggcggggtcccgcacaaagacccggcggagcgcgctctagccctgagcggccgggcgggggaggcgagcgcgcgcattcccggtggcggtggagggaagggccgggcggccggcgccgccgtgggaggtccgctgcccctttgtccctacggggcctcctccaagccgggagagtgtcagcgctcgagagaaagtccggagagcctcactcttctgccgggcgagtgttacacggatagaagcctcccggcagcgttccttccagtttcgtagcctcttgacgagctgttccctgctttacccaaatgctgtcgtttctctggatcaagggttcttcacggtgtacagggtgggcatcagctgttcagggttctctgaaaccatgtactggatggtatgcaggcatatatgtgactctggtgagcccaaattatctagttcttagaagggtcacagacctaatagagatttgtgccgagccacaggctacctgctccagaaaagagccctgtgcttctggcagtgagttcccagggtgccttgtctgccctgcagtggcctgtggtctctcaaacctattacagccatgagcacagtgcccccacacagcatgggctttgggagcatagatgggcttgaggtgggcacttccagtattccctagactgacttgttctccccaacccttcttccagttcctgagctggtgccaggcaggtgacacctcctgcagcccccagcatgcgggcaggcccaggccccaccgttacattggccctggtgctggcggtgtcatgggccatggagctcaagcccacagcaccacccatcttcactggccggccctttgtggtagcgtgggacgtgcccacacaggactgtggcccacgcctcaaggtgccactggacctgaatgcctttgatgtgcaggcctcacctaatgagggttttgtgaaccagaatattaccatcttctaccgcgaccgtctaggcctgtatccacgcttcgattctgccggaaggtctgtgcatggtggtgtgccacagaatgtcagcctttgggcacaccggaagatgctgcagaaacgtgtggagcactacattcggacacaggagtctgcggggctggcggtcatcgactgggaggactggcgacctgtgtgggtgcgcaactggcaggacaaagatgtgtatcgccggttatcacgccagctagtggccagtcgtcaccctgactggcctccagaccgcatagtcaaacaggcacaatatgagtttgagttcgcagcacagcagttcatgctggagacactgcgttatgtcaaggcagtgcggccccggcacctctggggcttctacctctttcctgactgctacaatcatgattatgtgcagaactgggagagctacacaggccgctgccctgatgttgaggtggcccgcaatgaccagctggcctggctgtgggctgagagcacggccctcttcccgtctgtctacctggacgagacacttgcttcctcccgccatggccgcaactttgtgagcttccgtgttcaggaggcccttcgtgtggctcgcacccaccatgccaaccatgcactcccagtctacgtcttcacacgacccacctacagccgcaggctcacggggcttagtgagatggacctcatctctaccattggcgagagtgcggccctgggcgcagctggtgtcatcctctggggtgacgcggggtacaccacaagcacggagacctgccagtacctcaaagattacctgacacggctgctggtcccctacgtggtcaatgtgtcctgggccacccaatattgcagccgggcccagtgccatggccatgggcgctgtgtgcgccgcaaccccagtgccagtaccttcctgcatctcagcaccaacagtttccgcctagtgcctggccatgcacctggtgaaccccagctgcgacctgtgggggagctcagttgggccgacattgaccacctgcagacacacttccgctgccagtgctacttgggctggagtggtgagcaatgccagtgggaccataggcaggcagctggaggtgccagcgaggcctgggctgggtcccacctcaccagtctgctggctctggcagccctggcctttacctggaccttgtaggggtctcctgcctagctgcctagcaagctggcctctaccacaagggctctcttaggcatgtaggaccctgcagggggtggacaaactggagtctggagtgggcagagcccccaggaagcccaggagggcatccataccagctcgcacccccctgttctaagggggaggggaagtccctgggaggccccttctctccctgccagaggggaaggagggtacagctgggctggggaggacctgaccctactcccttgccctagatagtttattattattattattttggggtctcttttgtaaattaaacataaaacaattgcttctctgcttggattttgt

SEQ ID NO: 14029 - DNA, 745 bp, Homo sapiens
  source 1..745: mol_type = unassigned DNA
acaaagacccggcggagcgcgctctagccctgagcggccgggcgggggaggcgagcgcgcgcattcccggtggcggtggagggaagggccgggcggccggcgccgccgtgggaggtccgctgcccctttgtccctacggggcctcctccaagccgggagagtgtcagcgctcgagagaaagtccggagagcctcactcttctgccgggcgagtgttacacggatagaagcctcccggcagcgttccttccagtttcgtagcctcttgacgagctgttccctgctttacccaaatgctgtcgtttctctggatcaagggttcttcacggtgtacaggttcctgagctggtgccaggcaggtgacacctcctgcagcccccagcatgcgggcaggcccaggccccaccgttacattggccctggtgctggcggtgtcatgggccatggagctcaagcccacagcaccacccatcttcactggccggccctttgtggtagcgtgggacgtgcccacacaggactgtggcccacgcctcaaggtgccactggacctgaatgcctttgatgtgcaggcctcacctaatgagggttttgtgaaccagaatattaccatcttctaccgcgaccgtctaggcctgtatccacgcttcgattctgccggaaggtctgtgcatggtggtgtgccacagaatgtcagcctttgggcacaccggaagatgctgcagaaacgtgtggagcactacatt

SEQ ID NO: 14030 - DNA, 1942 bp, Homo sapiens
  source 1..1942: mol_type = unassigned DNA
agccagggtagagactgagtcggcgcctggcgggtgttgtgacgcgcaaaccaggggcgggttctaagcggcgacgcgcgggtgctgggaggccttagaacgccgtggcgtgccgcaggacgcgacggctgcagaacatccgccgcaccgctgggggccaacgttgtcggaccgaggagtccgaggtggcgactgagtgagatacccagctgtgcggagctaggacgcggaacatcccagaggccagcatcaacatgtttccatccttggggaatgaccacgcaactgggcccagccctggtgctgggggtggccctgtgcctgggttgtggccagcccctaccacaggtccctgaacgccccttctctgtgctgtggaatgtaccctcagcacactgtgaggcccgctttggtgtgcacctgccactcaatgctctgggcatcatagccaaccgtggccagcattttcacggtcagaacatgaccattttctacaagaaccaactcggcctctatccctactttggacccaggggcacagctcacaatgggggcatcccccaggctttgccccttgaccgccacctggcactggctgcctaccagatccaccacagcctgagacctggctttgctggcccagcagtgctggattgggaggagtggtgtccactctgggctgggaactggggccgccgccgagcttatcaggcagcctcttgggcttgggcacagcaggtattccctgacctggaccctcaggagcagctctacaaggcctatactggctttgagcaggcggcccgtgcactgatggaggatacgctgcgggtggcccaggcactacggccccatggactctggggcttctatcactacccagcctgtggcaatggctggcatagtatggcttccaactataccggccgctgccatgcagccacccttgcccgcaacactcaactgcattggctctgggccgcctccagtgccctcttccccagcatctacctcccacccaggctgccacctgcccaccaccaggcctttgtccgacatcgcctggaggaggccttccgtgtggcccttgttgggcaccgacatcccctgcctgtcctggcctatgtccgcctcacacaccggagatctgggaggttcctgtcccaggatgaccttgtgcagtccattggtgtgagtgcagcactaggggcagccggcgtggtgctctggggggacctgagcctctccagctctgaggaggagtgctggcatctccatgactacctggtggacaccttgggcccctatgtgatcaatgtgaccagggcagcgatggcctgcagtcaccagcggtgccatggccacgggcgctgtgcccggcgagatccaggacagatggaagcctttctacacctgtggccagacggcagccttggagattggaagtccttcagctgccactgttactggggctgggctggccccacctgccaggagcccaggcctgggcctaaagaagcagtataaagccagggcccctgccactgcctcttcttttccctgctgccacttttccagtcctggaactactctgtcccactcttgctctattcagtttacagtcaaccctcccaagcacacaccccgcttcccttggaatccctgaggggtagaaggggccagaaaaaacgcttataaaaccagaggccctctgagatcatgtgagtcctccatggcaaggaagcagttccagggagagtcaggttccagctagttagggctgccagcctagggctttgtgcctacacctcactaagcccatggagaggtcacagatgggccgtgcacgggcagatgggccccaaaaaatcttggcgaaggtcggtaaagtgctaagctgttgtctgcactctttcatcataaagtcacttttttccactgc

SEQ ID NO: 14031 - DNA, 1635 bp, Homo sapiens
  source 1..1635: mol_type = unassigned DNA
gaccaaagggtgcggctgctgcagaggtggctgatgcaggtttccatccttggggaatgaccacgcaactgggcccagccctggtgctgggggtggccctgtgcctgggttgtggccagcccctaccacaggtccctgaacgccccttctctgtgctgtggaatgtaccctcagcacactgtgaggcccgctttggtgtgcacctgccactcaatgctctgggcatcatagccaaccgtggccagcattttcacggtcagaacatgaccattttctacaagaaccaactcggcctctatccctactttggacccaggggcacagctcacaatgggggcatcccccaggctttgccccttgaccgccacctggcactggctgcctaccagatccaccacagcctgagacctggctttgctggcccagcagtgctggattgggaggagtggtgtccactctgggctgggaactggggccgccgccgagcttatcaggcagcctcttgggcttgggcacagcaggtattccctgacctggaccctcaggagcagctctacaaggcctatactggctttgagcaggcggcccgtgcactgatggaggatacgctgcgggtggcccaggcactacggccccatggactctggggcttctatcactacccagcctgtggcaatggctggcatagtatggcttccaactataccggccgctgccatgcagccacccttgcccgcaacactcaactgcattggctctgggccgcctccagtgccctcttccccagcatctacctcccacccaggctgccacctgcccaccaccaggcctttgtccgacatcgcctggaggaggccttccgtgtggcccttgttgggcaccgacatcccctgcctgtcctggcctatgtccgcctcacacaccggagatctgggaggttcctgtcccaggaggagtgctggcatctccatgactacctggtggacaccttgggcccctatgtgatcaatgtgaccagggcagcgatggcctgcagtcaccagcggtgccatggccacgggcgctgtgcccggcgagatccaggacagatggaagcctttctacacctgtggccagacggcagccttggagattggaagtccttcagctgccactgttactggggctgggctggccccacctgccaggagcccaggcctgggcctaaagaagcagtataaagccagggcccctgccactgcctcttcttttccctgctgccacttttccagtcctggaactactctgtcccactcttgctctattcagtttacagtcaaccctcccaagcacacaccccgcttcccttggaatccctgaggggtagaaggggccagaaaaaacgcttataaaaccagaggccctctgagatcatgtgagtcctccatggcaaggaagcagttccagggagagtcaggttccagctagttagggctgccagcctagggctttgtgcctacacctcactaagcccatggagaggtcacagatgggccgtgcacgggcagatgggccccaaaaaatcttggcgaaggtcggtaaagtgctaagctgttgtctgcactctttcatcataaagtcacttttttccactgc

SEQ ID NO: 14032 - DNA, 959 bp, Homo sapiens
  source 1..959: mol_type = unassigned DNA
gcggcgacgcgcgggtgctgggaggccttagaacgccgtggcgtgccgcaggacgcgacggctgcagaacatccgccgcaccgctgggggccaacgttgtcggaccgaggagtccgaggtggcgactgagtgagatacccagctgtgcggagctaggacgcggaacatcccagaggccagcatcaacatgctgccacctgcccaccaccaggcctttgtccgacatcgcctggaggaggccttccgtgtggcccttgttgggcaccgacatcccctgcctgtcctggcctatgtccgcctcacacaccggagatctgggaggttcctgtcccaggatgaccttgtgcagtccattggtgtgagtgcagcactaggggcagccggcgtggtgctctggggggacctgagcctctccagctctgaggaggagtgctggcatctccatgactacctggtggacaccttgggcccctatgtgatcaatgtgaccagggcagcgatggcctgcagtcaccagcggtgccatggccacgggcgctgtgcccggcgagatccaggacagatggaagcctttctacacctgtggccagacggcagccttggagattggaagtccttcagctgccactgttactggggctgggctggccccacctgccaggagcccaggcctgggcctaaagaagcagtataaagccagggcccctgccactgcctcttcttttccctgctgccacttttccagtcctggaactactctgtcccactcttgctctattcagtttacagtcaaccctcccaagcacacaccccgcttcccttggaatccctgaggggtagaaggggccagaaaaaacgcttataaaaccagaggccctctgagatcatgtgagtcctccatggcaaggaagcagttccagggagagtcaggttccagctagttagggctgccagcctag

SEQ ID NO: 14033 - DNA, 545 bp, Homo sapiens
  source 1..545: mol_type = unassigned DNA
aaaaggcccaagagacccctggggaaacatgctttccccagctcctcctgtttccatccttggggaatgaccacgcaactgggcccagccctggtgctgggggtggccctgtgcctgggttgtggccagcccctaccacaggtccctgaacgccccttctctgtgctgtggaatgtaccctcagcacactgtgaggcccgctttggtgtgcacctgccactcaatgctctgggcatcatagccaaccgtggccagcattttcacggtcagaacatgaccattttctacaagaaccaactcggcctctatccctactttggacccaggggcacagctcacaatgggggcatcccccaggctttgccccttgaccgccacctggcactggctgcctaccagatccaccacagcctgagacctggctttgctggcccagcagtgctggattgggaggagtggtgtccactctgggctgggaactggggccgccgccgagcttatcaggcagcctcttgggcttgggcacagcaggtattccctgacct

SEQ ID NO: 14034 - DNA, 1402 bp, Homo sapiens
  source 1..1402: mol_type = unassigned DNA
ccagaggccagcatcaacatgtttccatccttggggaatgaccacgcaactgggcccagccctggtgctgggggtggccctgtgcctgggttgtggccagcccctaccacaggtccctgaacgccccttctctgtgctgtggaatgtaccctcagcacactgtgaggcccgctttggtgtgcacctgccactcaatgctctgggcatcatagccaaccgtggccagcattttcacggtcagaacatgaccattttctacaagaaccaactcggcctctatccctactttggacccaggggcacagctcacaatgggggcatcccccaggctttgccccttgaccgccacctggcactggctgcctaccagatccaccacagcctgagacctggctttgctggcccagcagtgctggattgggaggagtggtgtccactctgggctgggaactggggccgccgccgagcttatcaggcagcctcttgggcttgggcacagcaggtattccctgacctggaccctcaggagcagctctacaaggcctatactggctttgagcaggcggcccgtgcactgatggaggatacgctgcgggtggcccaggcactacggccccatggactctggggcttctatcactacccagcctgtggcaatggctggcatagtatggcttccaactataccggccgctgccatgcagccacccttgcccgcaacactcaactgcattggctctgggccgcctccagtgccctcttccccagcatctacctcccacccaggctgccacctgcccaccaccaggcctttgtccgacatcgcctggaggaggccttccgtgtggcccttgttgggcaccgacatcccctgcctgtcctggcctatgtccgcctcacacaccggagatctgggaggttcctgtcccaggaggagtgctggcatctccatgactacctggtggacaccttgggcccctatgtgatcaatgtgaccagggcagcgatggcctgcagtcaccagcggtgccatggccacgggcgctgtgcccggcgagatccaggacagatggaagcctttctacacctgtggccagacggcagccttggagattggaagtccttcagctgccactgttactggggctgggctggccccacctgccaggagcccaggcctgggcctaaagaagcagtataaagccagggcccctgccactgcctcttcttttccctgctgccacttttccagtcctggaactactctgtcccactcttgctctattcagtttacagtcaaccctcccaagcacacaccccgcttcccttggaatccctgaggggtagaaggggccagaaaaaacgcttataaaaccagaggccctctgagatcatgtgagtc

SEQ ID NO: 14035 - DNA, 636 bp, Homo sapiens
  source 1..636: mol_type = unassigned DNA
ccagaggccagcatcaacatgctgccacctgcccaccaccaggcctttgtccgacatcgcctggaggaggccttccgtgtggcccttgttgggcaccgacatcccctgcctgtcctggcctatgtccgcctcacacaccggagatctgggaggttcctgtcccaggaggagtgctggcatctccatgactacctggtggacaccttgggcccctatgtgatcaatgtgaccagggcagcgatggcctgcagtcaccagcggtgccatggccacgggcgctgtgcccggcgagatccaggacagatggaagcctttctacacctgtggccagacggcagccttggagattggaagtccttcagctgccactgttactggggctgggctggccccacctgccaggagcccaggcctgggcctaaagaagcagtataaagccagggcccctgccactgcctcttcttttccctgctgccacttttccagtcctggaactactctgtcccactcttgctctattcagtttacagtcaaccctcccaagcacacaccccgcttcccttggaatccctgaggggtagaaggggccagaaaaaacgcttataaaaccagaggccctctgagatcatgtgagtc

SEQ ID NO: 14036 - DNA, 2407 bp, Homo sapiens
  source 1..2407: mol_type = unassigned DNA
tctttattttatttatgctatctatttcttttccttttttttttttttttttttttttgagatgaagtcttactctgttgcccaggctagagtgtagtggtgtgatctcggctcactgcaaccactgcctcctgggttcaagtgattctcctgacttaacctcctgagtagctgggactacaagagcatgccatcatgcccagctaatttttgtatttttagtagagatggggtttcaccatattggccagaatggttttgcattcctgacctcaagtgatctgcctgcctcagcctcccaaaatgttgggttacaggggtgagccaccgtgccttgctatttatgccatctatttcactgaagattccgcctctcatttcttgagtcattttttttaaatttccttaaattggacttcacatttttctgatgcctccttgtttagcttaataactgaccttctgaattcttttttaggaaaatcaggaatttcttcttggtttggagccattgctggacatcctttgccattcaacctctgatttgcacaaggtgactaaaggaccagcagcaaacaaaagcaaaggtcttctagagtgcactaaagcagaagataacgtaacatttttatcttaccatgaaagtattatctgaaggacagttaaagctttgtgttgttcaaccagtacatctcacttcatggctccttatattttttattctaaagtctatctcttgtctaaaacctgctcgacttccaatttatcaaaggaaaccttttatagctgcttggaatgctccaacagatcagtgtttgataaaatataatttaagactaaatttgaaaatgtttcctgtgattggaagcccactggccaaggccagggggcaaaatgtcactatattttatgtcaacagattgggatactatccgtggtatacatcacaaggggtccccattaatggaggtctcccacagaacataagtttacaagtacatctggaaaaagctgaccaagatattaattattacatccctgctgaagatttcagtggacttgctgttatagattgggaatattggcgaccacagtgggcccggaactggaactcaaaagatgtttacagacagaagtcaagaaagcttatttccgatatgggaaagaatgtatcagctaccgatattgaatatttagccaaagtgacctttgaagaaagtgcaaaagctttcatgaaggaaaccatcaaattgggaattaagagccgacccaaaggcctttggggttattatttatatcctgattgccacaattataacgtttatgccccaaactactctgggtcatgcccagaagacgaagtcttgaggaacaatgagctctcttggctctggaacagcagtgctgctttatatccttctatcggtgtctggaaatcccttggagacagtgaaaacattttgcgcttctccaaatttcgggtgcatgaatccatgaggatctccaccatgacatctcatgattatgctctgcctgtatttgtctacacaaggctagggtacagagatgaacctttatttttcctttctaagcaagatctagtcagcaccataggagaaagtgctgccttgggagctgcaggcattgttatttggggagacatgaatttaactgcatccaaggccaactgtacaaaggtgaagcagtttgtgagttctgatttagggagctacatagccaatgtgaccagagctgctgaggtatgcagccttcacctctgcaggaacaatggcaggtgcataaggaagatgtggaacgcgcccagttaccttcacttgaaccctgcaagttaccacatagaggcctctgaggacggggagtttactgtgaaaggaaaagcatctgatacagacctggcagtgatggcagatacattttcctgtcattgttatcagggatatgaaggagctgattgcagagaaataaagacggctgatggctgctctggggtttccccttctcctggttcactaatgacactttgtctactgcttttagcaagttatcgaagcattcagttgtgagataattgagtttaaagggaattgtgtggcctctagcctagtcatttaaagaaggatgtaacttataacattttttttctcttatgaattctattgagagatattataagtagacattatgtatgtcacttaacataaacagaaacattattttatttgcctccagtctggctaggaaaccagatctggggtaaagtcaatgtacacttcctccttattggaatatttaagttgcatttaaactaaaactagtataatttagtcttttcatgaatgtacatacataaaattatacataaaaatattaaattattcatttcaaa

SEQ ID NO: 14037 - DNA, 1616 bp, Homo sapiens
  source 1..1616: mol_type = unassigned DNA
ttgtctgaaccacgcacaggacatcctttgccattcaacctctgatttgcacaaggtgactaaaggaccagcagcaaacaaaagcaaaggtcttctagagtgcactaaagcagaagataacgtaacatttttatcttaccatgaaagtattatctgaaggacagttaaagctttgtgttgttcaaccagtacatctcacttcatggctccttatattttttattctaaagtctatctcttgtctaaaacctgctcgacttccaatttatcaaaggaaaccttttatagctgcttggaatgctccaacagatcagtgtttgataaaatataatttaagactaaatttgaaaatgtttcctgtgattggaagcccactggccaaggccagggggcaaaatgtcactatattttatgtcaacagattgggatactatccgtggtatacatcacaaggggtccccattaatggaggtctcccacagaacataagtttacaagtacatctggaaaaagctgaccaagatattaattattacatccctgctgaagatttcagtggacttgctgttatagattgggaatattggcgaccacagtgggcccggaactggaactcaaaagatgtttacagacagaagtcaagaaagcttatttccgatatgggaaagaatgtatcagctaccgatattgaatatttagccaaagtgacctttgaagaaagtgcaaaagctttcatgaaggaaaccatcaaattgggaattaagagccgacccaaaggcctttggggttattatttatatcctgattgccacaattataacgtttatgccccaaactactctgggtcatgcccagaagacgaagtcttgaggaacaatgagctctcttggctctggaacagcagtgctgctttatatccttctatcggtgtctggaaatcccttggagacagtgaaaacattttgcgcttctccaaatttcgggtgcatgaatccatgaggatctccaccatgacatctcatgattatgctctgcctgtatttgtctacacaaggctagggtacagagatgaacctttatttttcctttctaagcaagatctagtcagcaccataggagaaagtgctgccttgggagctgcaggcattgttatttggggagacatgaatttaactgcatccaaggccaactgtacaaaggtgaagcagtttgtgagttctgatttagggagctacatagccaatgtgaccagagctgctgaggtatgcagccttcacctctgcaggaacaatggcaggtgcataaggaagatgtggaacgcgcccagttaccttcacttgaaccctgcaagttaccacatagaggcctctgaggacggggagtttactgtgaaaggaaaagcatctgatacagacctggcagtgatggcagatacattttcctgtcattgttatcagggatatgaaggagctgattgcagagaaataaagacggctgatggctgctctggggtttccccttctcctggttcactaatgacactttgtctactgcttttagcaagttatcgaagcattcagttgtgagataattgagtttaaagggaattgtgtggc

SEQ ID NO: 14038 - DNA, 314 bp, Homo sapiens
  source 1..314: mol_type = unassigned DNA
ccagtgagatgaaccaggaaaatcaggaatttcttcttggtttggagccattgctggacatcctttgccattcaacctctgatttgcacaaggtgactaaaggaccagcagcaaacaaaagcaaaggtcttctagagtgcactaaagcagaagataacgtaacatttttatcttaccatgaaagtattatctgaaggacagttaaagctttgtgttgttcaaccagtacatctcacttcatggctccttatattttttattctaaagtctatctcttgtctaaaacctgctcgacttccaatttatcaaaggaa

SEQ ID NO: 14039 - DNA, 589 bp, Homo sapiens
  source 1..589: mol_type = unassigned DNA
tatccgagggcctttgggccattatgctgtgaatgtgacatctgcagccaagctctgcagtcagagtctatgtaacaatcatggaagagtattcgaaaaacacctgagtcctccttctatctgcatatgcctgaaagcagtgtcaggtccctcagctgcaggtctgttggagtttgctggaggtccattccagaccttgtttacctgggtatcaccagcggaggctgcagaaccgcaagaaaatcaggaatttcttcttggtttggagccattgctggacatcctttgccattcaacctctgatttgcacaaggtgactaaaggaccagcagcaaacaaaagcaaaggtcttctagagtgcactaaagcagaagataacgtaacatttttatcttaccatgaaagtattatctgaaggacagttaaagctttgtgttgttcaaccagtacatctcacttcatggctccttatattttttattctaaagtctatctcttgtctaaaacctgctcgacttccaatttatcaaaggaaaccttttatagctgcttggaatgctccaacagatcagtgtttgataaaatataa

SEQ ID NO: 14040 - DNA, 15719 bp, Homo sapiens
  source 1..15719: mol_type = unassigned DNA
gcatggagagtgcgggcggcttcaagctgggtatggagcccctcagcggcggcggggtctgtgagttggacgcggggtcttggcggggaatggaggtagaataaacgtgggacccggagtgcaccaaggtgagaaaaaaaaattactaaaaatgacaagtagaagacttgaggagtccatgggggctgttcagatgggattggtcaatatgttcaaaggatttcaaagcaaggttttgccacccctgagtccaaaggtggttacagaagaagaagtaaaccgaatgcttacaccctcagagttcctgaaggaaatgtccctgaccaccgagcagagactggcaaaaacacgtttgatgtgccgaccacagatcatcgaactcttagatatgggggaaacaacacatcagaagttttcaggaattgacctggatcaggcattattccagccctttccatcagaaattatatttcagaactacactccctgtgaagtctatgaagttccactgattttgaggaacaatgacaaaattccaaggttggtgaaagttgtggaagaaagttcgccttactttaaagtaatcagccccaaagatattggccacaaagtggctcctggagtgccttccatattccgaatcctctttactccagaggagaacaaggattacgcccatacgttgacctgtgttactgaaagagaaaagtttattgtacccatcaaagctagaggggcacgagccattctcgattttcctgacaagctgaatttttccacttgtcctgtcaaatacagcacccagaagattctgctggtacgaaacattggcaacaaaaatgctgtatttcacatcaaaacttgtaggcctttctctatagaaccagctattggaactcttaatgtgggagagtccatgcaactggaagtggagtttgagccacagagtgtgggcgatcacagtggaagacttatcgtgtgttatgacacaggtgaaaaggtgtttgtatctctctatggagctgccatagacatgaatataaggctggataagaattccttgaccatcgagaaaacctacatatctctggccaatcagcgaactataaccattcacaatcgcagtaatatcattgcccatttcctgtggaaggtatttgctacccagcaagaagaggacagagaaaaatatagggcctgtgatgatctgatcaaagaggagaaggatgagactgatgagttttttgaagagtgcattactgatcctttactccgagaacatctttctgttctgtcccgaacctttgcgaatcagaggaggctggtgcagggagacagcaagctgttcttcaataacgttttcactgtggagcccctggaaggtgatgtctggcccaactcatcagctgaaatcaccgtgtactttaacccactagaagccaagctctatcaacagaccatttactgcgacattttaggccgagaaatccgtctgcccctccgaatcaaaggggaaggcatgggacctaagattcacttcaactttgaattgctggatattgggaaagttttcactggatctgcacattgttatgaggcgatactgtacaacaaaggcagcatcgatgctctcttcaacatgacccctccaacttcagctttgggggcctgctttgttttcagtcccaaggaaggcatcattgaaccaagtggagtccaagctatccagatctccttcagctctaccatcctgggaaactttgaagaagagttcctggtcaatgtcaatgggtcacctgagcctgtgaaactgaccattagaggctgtgtcattggacctaccttccattttaatgttccagctctgcactttggtgatgtttcctttgggtttcctcataccttgatatgttccctcaataatacctctttgatccccatgacttacaaactgcgtatccctggggatggccttggccataaaagcatttcatattgtgagcagcatgtggactacaaaagaccatcttggaccaaggaagaaatatcctcaatgaaaccaaaagaattcaccatctctcctgactgtggcaccattcgcccccagggatttgctgctatcagggtgacattatgctccaacactgtgcagaaatacgagctggcactcgtggtggacgtggagggcatcggagaagaggtgctggcgctcttaattacagcaaggtgtgttgtacctgccctccacctggtcaatacagaggtggactttgggcactgcttcctgaagtacccgtatgagaaaacactccagcttgccaatcaagatgacctcccaggattctatgaggtccagcctcaggtgtgtgaggaggtgcctactgtgctgttttccagccccacccccagcggggtcatctccccaagcagcaccatccacataccactggtcctggagacccaggtcactggagaacacagatccacggtttacatctcaatctttgggagccaggacccccctttggtatgtcacttaaagagcgctggagaaggcccagttatctacgtccatcccaatcaagtggacttcgggaatatctacgtcctaaaagactcttccaggattctcaacctatgcaaccagtccttcattcccgcatttttccaggcacacatggcacacaaaaaatccctttggacgattgaacccaatgaaggcatggttcctccagaaactgatgttcaactggcactgaccgccaacctgaatgacacactgacattcaaggactgtgttattttggacattgaaaatagcagtacctatcggattcctgttcaggcttccggaactggttccactattgtttcagataagccctttgctccagaactcaatttgggggcacattttagcctggatacccactattaccactttaagttgatcaacaagggacgtcggatccaacagttgttctggatgaatgatagcttccgaccccaggccaagctgagtaagaagggccgggttaagaagggacatgctcatgtccaaccccagcccagtggctctcaggagcccagggatccacagagccccgtgtttcatctccaccccgccagcatggagctgtacccaggccaggcaattgatgtgatactcgaaggctattctgctactcccaggatagtgaaagagaagctggtgtgccacgccatcatcggggcacagaaggggaagagcttggtgatggctgtgaacatcacctgtgagttcgtcgcacctctcatccagctctccaccaagcagctcatctaccgactggagaagaaacctaacagtatcctgaaacctgattaccagcccttggccataaagaacatttccaccctgcccgtgaacttgttgctgtcaacatctggacccttctttatatgtgagactgataaatccctgctgccggcaactcctgagcctattaaactggaaattgatgaagaaaaaaacctgctgatcaagtttgacccttcctacagaaacgatctgaacaactgggtggcagaagaaattctagcaattaagtatgtggaacaccctcagatagacagcctggacctgcgcggagaagtgcattaccccaacctcagctttgagacaaaggagctggattttggctgcatcctgaacgatactgagctcattcgctacgttaccatcaccaactgcagtccgttggttgtgaagtttcgctggttcttcttggtgaatgatgaggaaaatcagataaggtttgtgacattgccgaagaagccctacagtgccccagtgtcccagatggagtccatcccagcaacctcagaggctgccagcccaccagcaatcctagttacagtagagtcccccgagatggatttaaatgattttgttaagactgtccttgtggatgaagatgccaggcctgaagaaaaagaactaagaaaaacgaaagcttccagtgtgatctcagatgaaataaaaattagctctactgaaatagaaagaatatactcaagccagagccaggtggaggatcaggaatccctacagacctgtgaacagaatgagatgctttccattgggatagaagaagtgtttgatattttgcccctgtttggagtgttgcagccacacagtagccaccaaatatcgttcaccttctatggacacgctaacatcattgcacaagctaaagctctgtgtgaagtggaagaaggacccacctacgaaataacactgaagggagaggcgtccctggtcaactattcctttgacaccaaggatattcactacggattacagctgtttgaccatgtcacagagagggaaatcacgctgacgaacatggggaaagttggctttgagttcaaggttctgactgaccaccagtcttctccagacaaccttctccctggagtgccactaatcctgcctgtgtctggctttatcagttcacatcaagagcaggtattaaaagtttactacctacctggagtacctgaggtctttaaaaggagtttccagatacagatcgcccacctggacccagaaaatatcactctgagcggagagggaatctttccccaaatctgcctcgatctccccaggaacctcacagcaaatgaaaagtatgaaatgttcttgaatcaagccaggaaaaacacagacaaagagtataacaaatgtgaaatgctcgatcactttgacataataactgaggaagtgccagaagacgagcctgctgaggtaagtgctcatctccagatggaggtagaaagacttatagtccaaagctatgtcctagaacatcagaaaacaaccacccctgatcctatggatgacccctgcttcagccatcggagtcgccgcaaactggccaaaatccagctaccagagtacatcctggactttggctacatcatccttggcgaagtccgaacccacatcatcaagatcatcaacaccagtcactttccagtgtcattccatgcagacaagcgtgtccttcatgagacaggattcagtactgagctagatcgtgtaaagaatctacctcattgtgaaacggaaatatttgaagtgagatttgacccacagggggccaatcttcctgttggaagcaaagaagtcattctgcccatcaaggtggttggagggccaacagttcacatctgtctccaagccaaggtgaccattccaaccatgactctctctcgtggaaaagtggactttgccacaattcagtgtggacagtgcctggtggaaactattcagctttccaatcatctccaagtcccttgtgaatggttcgtccagagccaaaagcctgttgacaagctggagaaacacatgccgaagtacttaagacagaaactacgcgctgaattaaagccaaagacacggatcttcgaaatccagcccatttctggagtcttggatcctggtgagaagtccaacgtgcaagtgaaattcatgccaaaagaagagaaattctacagccaaaccctggtgtttcagattgcccagagtgctcaaaagcttaccctcctggcacgtgggcaaggtctagagccacgcctggaatttagtccttcagtcctggatctggggccactgctactttgtgcacctggagacgaggccgaggtgatagtgaagaatccctgcaacttccccattgagttttattccttagaatttgatcagcagtatctcatagaagaaaagatcttgcggaagctgaagggctatgattcctacaacaccctgctgctgcctccccgcaaccctggggagaagctgcccccagaactgtacgagtacttcaaagagataaagaagtcaaaagaggagcagatgagggcgaaatatctggagaatctggcacaggagaatgaagaggaagatataacctcatcagatcagggaacctccaatagcacaaagaggacatcgctgagccgagggatctctgtcacatccaacctggaagaatggcacgccctgttggtcgagtccaaaacctacctagaggaagaggaggatgaggaaagcctggaaaaaatcattttccaaactgacaagcttcagagcattgacagccactccatggaggaagttggagaggtggaaaacaacccagtgagcaaagcaatcgctcgccacctgggcattgacatttctgcagaaggccgcctggccaagaaccggaaaggcatcgccattatcattcatgggacacccttgtcaggaaagtcagccaatgccgttagcgtggccaagtactacaacgcagcctgcctgagcatcgactccattgtgctggaagctgtggccaacagcaacaacatcccagggatccgggcccgtgagctctgcatcagggctgccatagagcagtccgtgaaggaaggagaggaggctgcccaggaggcagctgtgggtcaaaacgtcatagggcaaggacgactgagcactgacaccttgggcaagttagcctccgagatgactctggtggccccagaaattaaacctggaaagagtgttcgtgggagcgtggtgatcaccaaaagcaaggcagacagccatggctccgggtcacagaagcagcatcactcacaccagtctgaaacaccacagatttcctccagccctctccccccggggcccatccaccgctggctcagtgttagtcccagtgtcggaggcgagaccgggctgatgagctgtgtgctcccggatgaacttctcgtgcagatcctggcagagcggatacagctgagtgactgctaccgaggagtggtgtttgatggcctcgacactctctttgctcagaatgctgcagccgccctcctctgcctgctgaaggccattggcagccgggagcatatatacattctcaacatggcccaggattacgcagccatgaaggcccaggagaaagccaaaaaggagcaagaagaacgcaagcacaagggagctcttgagaaagagaaggagcgtctccaaaacatggatgaggaagaatatgatgccctgactgaggaggagaaactcacattcgatcgggggattcagcaggcgctccgcgagcggaagaagagggagcaggagaggctggcaaaggaaatgcaagaaaagaagctacagcaggagctggagcgacaaaaggaagaggatgagctgaaacggagggtcaaaaaaggaaagcagggacccattaaggaggagccccccatgaagaaatctcaagcagcaaacaagcaggttcctccgctcaccaaagtggatgtcaagatggagacaatcgaaaggaaaatatctgttagggaacaaacaatgtctgagaaggaagagctaaataagaagaaaaggaacatgggcgatgtcagcatgcatgggcttcctcttgtccaggaccaagaggacagtgaaggggacaactcaaaggaccccgacaagcaactggccccgaagtttaagacctatgaattgacactgaaggatgtccagaacatcctcatgtactgggaccggaagcaaggagtccagctgcctcctgcagggatggaggaagcgccccatgagcccgacgaccagcgccaggtccccttgggtgggcgcaggggccgcaaggaccgggagagagagcgcctggagaaggagcgcacggagaaggagcgcctggagagggagaaggcggagcgggagcgcctggagaagctgcgagccctggaggagcggagcgactgggagggggaaggggaggaggaccacgaagggaagaaggagaaggacctgggcgtacccttcctagacatccagacaccagactttgaaggcttgagctggaagcaggccctagagagcgacaagcttcccaaaggagagcagatcctagacatcttgggtctgggtgcctccggaccacccatcccgcctcccgccttattctcaatcgtctcctacccggtgaagcggccacctttgaccatgacagacgacctggagcattttgtatttgtgatcccaccatccgaagatatatctctggatgaaaaaaaagaaatggaaatagaatcagactttttggccaccacaaacactacaaaggctcaagaggagcagaccagctcatctaaggggggcaaacagaaaatgaaagaaaagatagaccaagtcttcgagattcagaaagacaagcgtcacatggccttaaacaggaaggtcctttctggggaacctgctggaaccatttcccagctgtcagatacagacctggacaacttcaacgggcagcactcccaggagaaattcaccagactgaatcacttccggtggatcgtgccagccaatggcgaggtaacgttgcaggtgcacttctcttctgatgagttcgggaactttgaccaaacctttaactttgagatcctaggaacttgctgccagtaccagctctactgccgaggcatctgcacttacccatacatttgccaagacccaaaagtggtatttcctcagcggaagatggacatgaagacaaatgaggtcatctttaagaagtatgttatgagcacggagacgtactactttgggccactactttgtggaaaatcaagagataagtacaagtcatccttattcccaggcaacatggagacgctaacaatcctgaacacttccttaatggtggtggaggcatccttctattttcagaatgatgtcaaagcaaacacgtacttcctggaacccaacaccatggtcctgaaacccaatgagaagcagatattaaacgtatgggcctaccctacttcagttggtgtctttgaagacagcattgtctgctgcatcaatgacaacccagagccagccatcttccaattaagctgccaggggatccgcccggaactagagctggaacccaggcaattacattttgaccggctcttgctgcacagacaggaatccagggtagttcttctccgcaatgtcacgctcctgcctgtggcctggcggatcaccagcctggagcacttgggtgatgatttcactgtatccctgatgcaggggaccatcccccctgaggctgagtacggcctgcacctgtactttcagcccaccaagcctgtcaacatcaagaaggctattcggttggaggttttagatgcagaaaatcttcttggtgttgttcagattgaaaatatcatggtctttgcagaggcatacgacatcgccttggacatcaccttccccaaaggagctgaagggggactggattttgggattgtcagggtcacagaggaggcgaagcagcccctgcaattgaagaaccgtgggaaatatgagatcgcgttcagcttttccgtggactctgtagggatttcaacacctaatataaattccatgatctcagtccaacccaaaaagggttcactgaccccaacagaaaaacccacaaatgtccaagttttcttccatgcaaaaaaggaagtgaagattgagcaccagcctgttctgcgctgtcagattattgagcccaatatttcagaaggaggtgagatcattgccagcatcccaattaagttttccgcgaatgcagtatattccaaatacaacatcaccccctcctctgtcatcaactttggagctttgatctgtggcactcgtaaaagcaccaccttcaccatagaaaatcaaggtgttactgacttcaagttcgccctttataagctgacaggggagagccccattcatcaaaagaaagcagccagccacgtcagacatgcaagatcccgagaaagtgagagcttctacaaaactggctcttccagagcagccaagttctctgacacgattcagaaagaagtaaccaccacaggccaggcccgcttcgcccatggcatgttcaccgtgtaccctgggtttggctccattccttccggaggacagcaggtcatcaacgttgactgtgtggctgacgccatgggaaagtgtgaggagtttatagccatcgatatctccggccgagaccctgcagtccaccctgccggcattctttacactttgctagctgaagcctgtctaccagccttcgtgaccgaaaacaatgccttgatatttgaagagcaccagatatgtaccagtgccaacctgcaccacatcctgcagaccatagagagcggggggctgttcgtcgaggatgagaacaagttcatcttctgcaatgtcctggtgggccgccaagccaaggctcgtttcaagatcagcaacgtgggaaagatcacctgtgatgtcaacattgtagtcaggcctatctccaataagccctttgcccgcatcgtcgacatttttgaagtggaacccagcaagatgtgcattgccagtcattcccatgcctttgccacggtgtccttcaccccgcagatcatgcagaactaccagtgcatctttgaggctaccttggatggcttgcccagcaccctggccaagagccgaggcctcgtgtttgacatcgctggtgaggggaacctccctcgagtgacggttgtgcggccagttcttcataaccaatatggaaaccccttgctcctctttaagaggcttctccttggtcattcagagaagctgcctctcatcctcaagaacaatggtgtcctccctgcccagctgcatgttgacctgcaggatgagctaggagtcttctccctgaaagggaggcccaccaccgcgtatatctacatcacagaggaaaataaaccacatgtaaaagcaaagaaagctcacacagcctccttggttgtttctcctggagatacagctgaatttgatgtcgttttccactcccagaaggttgggaggatgagaggtatcatccacttgtcagtgatcaacaaccaatatgaggagacctccatccacatggtgggagagggctatgaggatgacatcaccttggacaacatccatggactggtggcccccaccagccaggaagacataagtatctctgagttcacagagatcatcgaggacaatgatatggaagacttggtggcagctgctctggtggaccacatccaatttggggactgccacattggacacagctataatgcgagcttcacagtcacaaatcacagccaagtgaacttgatacggtttgaatggcctgtttcagctacaattgctttctccccacagatgggccacctccaccctgggtgtgccaaggacatagtggtgaccatgaagtcagatgtacccatcaacctaaagaatatgcggatcaggtgcaagctctccaggattatgtttcagctccctgcagaccaggtccccgactgggatgaccgcatgcacacagtcaagtgggtggacgtacccagaaacatgcctgggactttcactacaaaacgaaaagtgatagagacggatccggaacctgctcactcagtactagaagaaaactaccaagaactgcagcttcaaatcagtgccaatgtggatttcgcttcataccattgccaagcaagagatgtgcgctttaaggaaaccttggtttaccagacccgagtgtttgagttcgatgtgattaattcaggacgtgtccagctggaattcagctgggtctcagaagatacctcaaaggcagtcagctttgcaaaaccagatcaccaaggttcagctcaaaaagatcagcttagtcagggcacgatgcatacaggcagcaccctggacagcaccatggaccactgggccgagggttccccacagcccttctctgtggagccctcttcgggaatcgtgccggtggggaagattcagaagttcaaagtaaaattctccccgttggacattggagacttcgagagcaaccttttctgccagattcccaacctgccacctggagagcaaggtccggtcctggtagcaaaagggcggagcaccttgcccatctgccattttgatctgaaagactcggactacataagtggccatcagcgcaacccagagctccgagggtccagtgggggagctctggatccaaacacccgggtgattgagttcaccactgtgggcataggagggaagaatctccggacctttaccatcctaaacccaaccaatagcacctactccttctgctggatctctgaagaaattgaaagtctccagaaccctgcagcattcacatgccttacagaaaagggcttcatccaccctgaaaagaaagccgagatcgtgttccagttcacacctttccatctgggcatcactgagtcatcatggaccttcctaattcccgagcacaacatcacagtccctttcctgctggtaggcaaaactaccgaacctctcatctctctgaacaagtcacacctcaacttcagctctctcctcattggcagagaagccagggagactgtgcagatcattaacaaggaggagcaggggttcgatttttccttccaggacaactcccgctattctgaaggtttcagcaacagcctgcttgtatgtcccatggaaggctggatcccaccactgtccaggttcccaattgatattttcttcacaccaaagcaggaaggagatgtgaactttaatttgatctgcaatgtggaaaagaaagtccaccctgtgacattaaatgtcaaggccgagggctacactatgaatgtggagatcaagtgcaaggacaggacaggctccatcactctgttgactcccaaccagactaacatcatcaacttctatgaggtggagttaaatgaatgtgtccagtgtgaattcaactttatcaacactggaaagttcaccttcagcttccaggcacagctgtgtggctccaaaaccttgctgcagtacttggaattttcacccatcgacagcactgtggatgtaggacagagtgtacatgccaccctgtcttttcaaccattaaagaagtgtgtcttgacagacctggaactcataatcaagatcagccatggtccaacatttatgtgcaacatctcaggctgtgctgtgagcccggctatccatttctccttcaccagctacaactttgggacctgctttatctatcaagctgggatgcccccatacaaacaaaccctggtaattaccaacaaggaagaaacacctatgagcatagattgtctgtacaccaacaccactcacctcgaggtgaactcccgtgttgatgtggtaaagccaggaaacacattggagattccaataactttttatcctcgagaaagtatcaactatcaagaactcattccctttgaaatcaatgggctctcacaacaaacagtcgaaatcaaagggaagggtaccaaaatgaagattttagtcctagatccagccaacaggattgtgaagttgggagctgtcctaccagggcaggttgtgaaaagaacagtttccatcatgaacaacagcctggcccagctcacatttaatcagtccattctgttcacaattccagaactccaggaacccaaggtccttaccctggcgcccttccacaacatcacactgaagcccaaagaagtctgtaaactggaagtcatctttgccccgaagaagcgtgtccctcccttctctgaggaagtgttcatggaatgcatggggctcctgcgccccctcttcctccttagcggctgctgccaggccctggagatctcactggaccaggaacatattccctttggacccgtggtgtatcagacgcaagccacacgtcgcatcctcatgatgaacacaggcgatgtgggtgcaaggtttaaatgggacatcaaaaaatttgagcctcatttctccattagcccagaagaaggctatattacctcaggcatggaggtttcttttgaagtgacctaccatcccaccgaggtgggaaaggagagcctttgtaaaaacattctctgctacatccagggaggcagtcctctgagtctaaccctgtctggagtctgcgtgggaccacctgcggtaaaagaggtagtgaatttcacgtgccaggtgcgctccaagcacacgcagaccatcctgctgtcaaaccgcaccaaccagacctggaatctgcaccccatctttgagggcgagcactgggaggggcctgagttcatcaccctggaggcccaccagcaaaacaagccctatgagatcacctacaggccccgcaccatgaacttggagaaccgcaagcaccagggcaccctcttcttccccctcccagatgggaccggctggctgtatgctctgcatgggacttctgagctccccaaagctgtagccaatatctatcgtgaagtgccatgtaagaccccctacactgagcttctgccaatcaccaactggctgaacaagccccagagattccgggtcatcgtggaaatactgaaaccagagaagccggacctaagcatcactatgaagggccttgattacattgatgtactgtctggctctaagaaagactacaagctgaacttcttttcccacaaggagggaacgtacgctgcaaaggtgatcttccgaaacgaggtgacaaatgagttcttgtactacaatgtgagtttcagggtcatcccttcaggcatcatcaaaaccatcgagatggtgaccccagtccggcaagttgcgtcagcctccatcaagttggagaaccctctgccctactcggtgaccttctccacggaatgccggatgcccgacatcgccctgccctcccagtttgtggtgcctgccaactccgagggcacgttctcatttgaatttcagcccctgaaagctggagaaaccttcggaagactaactttgcacaacactgacttgggttactaccaatatgagctctatctgaaagccacgccagcacttccggaaaagcctgttcacttccagactgtccttggcagcagccaaatcatccttgtgaagttcatcaattacacacggcagaggacagaatactactgcaggaccgactgtacagacttccacgcagaaaaactcattaatgcagccccaggaggccagggaggcactgaagccagtgtggaagtcttattcgagcccagccacctgggtgagaccaagggcatcctgatcctatcatcgctcgcaggtggagagtatatcatccccctctttggaatggctctgcctcccaagccccaaggtcccttctcgatccgagccgggtacagcataatcatccccttcaagaatgtcttctatcacatggtgaccttctccatcatcgtggataacccagccttcaccattcgcgctggagagtctgtgcggcccaagaagatcaacaacatcacagtctcctttgaaggaaacccatctggcagcaaaacccccatcaccaccaagctgactgtgagctgccctcctggtgaagggagtgagactggagttaaatgggtttattatctgaaggggatcaccctttagtggtaaccagggttacctgtatcaaccaaaagctatgcattgtcttagcctgaaaaagaatagagaaaacaataagaattctaaaggaactgtttttattcttctcatacaattatagggcagttatttccctattatgtgttttccaaatatagatatgaaatatctattccatattaaacattataactacacacaacag

SEQ ID NO: 14041 - DNA, 3152 bp, Homo sapiens
  source 1..3152: mol_type = unassigned DNA
accgtggcaacggacggcaacagctcgggcggcgcatggagagtgcgggcggcttcaagctgggtatggagcccctcagcggcggcggggtctgtgagaaaaaaaaattactaaaaatgacaagtagaagacttgaggagtccatgggggctgttcagatgggattggtcaatatgttcaaaggatttcaaagcaaggttttgccacccctgagtccaaaggtggttacagaagaagaagtaaaccgaatgcttacaccctcagagttcctgaaggaaatgtccctgaccaccgagcagagactggcaaaaacacgtttgatgtgccgaccacagatcatcgaactcttagatatgggggaaacaacacatcagaagttttcaggaattgacctggatcaggcattattccagccctttccatcagaaattatatttcagaactacactccctgtgaagtctatgaagttccactgattttgaggaacaatgacaaaattccaaggttggtgaaagttgtggaagaaagttcgccttactttaaagtaatcagccccaaagatattggccacaaagtggctcctggagtgccttccatattccgaatcctctttactccagaggagaacaaggattacgcccatacgttgacctgtgttactgaaagagaaaagtttattgtacccatcaaagctagaggggcacgagccattctcgattttcctgacaagctgaatttttccacttgtcctgtcaaatacagcacccagaagattctgctggtacgaaacattggcaacaaaaatgctgtatttcacatcaaaacttgtaggcctttctctatagaaccagctattggaactcttaatgtgggagagtccatgcaactggaagtggagtttgagccacagagtgtgggcgatcacagtggaagacttatcgtgtgttatgacacaggtgaaaaggtgtttgtatctctctatggagctgccatagacatgaatataaggctggataagaattccttgaccatcgagaaaacctacatatctctggccaatcagcgaactataaccattcacaatcgcagtaatatcattgcccatttcctgtggaaggtatttgctacccagcaagaagaggacagagaaaaatatagggcctgtgatgatctgatcaaagaggagaaggatgagactgatgagttttttgaagagtgcattactgatcctttactccgagaacatctttctgttctgtcccgaacctttgcgaatcagaggaggctggtgcagggagacagcaagctgttcttcaataacgttttcactgtggagcccctggaaggtgatgtctggcccaactcatcagctgaaatcaccgtgtactttaacccactagaagccaagctctatcaacagaccatttactgcgacattttaggccgagaaatccgtctgcccctccgaatcaaaggggaaggcatgggacctaagattcacttcaactttgaattgctggatattgggaaagttttcactggatctgcacattgttatgaggcgatactgtacaacaaaggcagcatcgatgctctcttcaacatgacccctccaacttcagctttgggggcctgctttgttttcagtcccaaggaaggcatcattgaaccaagtggagtccaagctatccagatctccttcagctctaccatcctgggaaactttgaagaagagttcctggtcaatgtcaatgggtcacctgagcctgtgaaactgaccattagaggctgtgtcattggacctaccttccattttaatgttccagctctgcactttggtgatgtttcctttgggtttcctcataccttgatatgttccctcaataatacctctttgatccccatgacttacaaactgcgtatccctggggatggccttggccataaaagcatttcatattgtgagcagcatgtggactacaaaagaccatcttggaccaaggaagaaatatcctcaatgaaaccaaaagaattcaccatctctcctgactgtggcaccattcgcccccagggatttgctgctatcagggtgacattatgctccaacactgtgcagaaatacgagctggcactcgtggtggacgtggagggcatcggagaagaggtgctggcgctcttaattacagcaaggtgtgttgtacctgccctccacctggtcaatacagaggtggactttgggcactgcttcctgaagtacccgtatgagaaaacactccagcttgccaatcaagatgacctcccaggattctatgaggtccagcctcaggtgtgtgaggaggtgcctactgtgctgttttccagccccacccccagcggggtcatctccccaagcagcaccatccacataccactggtcctggagacccaggtcactggagaacacagatccacggtttacatctcaatctttgggagccaggacccccctttggtatgtcacttaaagagcgctggagaaggcccagttatctacgtccatcccaatcaagtggacttcgggaatatctacgtcctaaaagactcttccaggattctcaacctatgcaaccagtccttcattcccgcatttttccaggcacacatggcacacaaaaaatccctttggacgattgaacccaatgaaggcatggttcctccagaaactgatgttcaactggcactgaccgccaacctgaatgacacactgacattcaaggactgtgttattttggacattgaaaatagcagtacctatcggattcctgttcaggcttccggaactggttccactattgtttcagataagccctttgctccagaactcaatttgggggcacattttaggtaaggaaatctcatggaccagtttttatagatatcacatatgttacatatgctgagcatcacctctactttagaaaattattttaagtaattaaaactagccacctcagtccctctcctttcccatcctcactcttccacctcctgatgtgtatgtcagcaacaagaagacattttctagccataacttggttgcattctctaatccgtgtccctctacatccgagaagaatatggtttgtaggaaatgcattcttttctcaaactg

SEQ ID NO: 14042 - DNA, 3058 bp, Homo sapiens
  source 1..3058: mol_type = unassigned DNA
aacggacggcaacagctcgggcggcgcatggagagtgcgggcggcttcaagctgggtgagaaaaaaaaattactaaaaatgacaagtagaagacttgaggagtccatgggggctgttcagatgggattggtcaatatgttcaaaggatttcaaagcaaggttttgccacccctgagtccaaaggtggttacagaagaagaagtaaaccgaatgcttacaccctcagagttcctgaaggaaatgtccctgaccaccgagcagagactggcaaaaacacgtttgatgtgccgaccacagatcatcgaactcttagatatgggggaaacaacacatcagaagttttcaggaattgacctggatcaggcattattccagccctttccatcagaaattatatttcagaactacactccctgtgaagtctatgaagttccactgattttgaggaacaatgacaaaattccaaggttggtgaaagttgtggaagaaagttcgccttactttaaagtaatcagccccaaagatattggccacaaagtggctcctggagtgccttccatattccgaatcctctttactccagaggagaacaaggattacgcccatacgttgacctgtgttactgaaagagaaaagtttattgtacccatcaaagctagaggggcacgagccattctcgattttcctgacaagctgaatttttccacttgtcctgtcaaatacagcacccagaagattctgctggtacgaaacattggcaacaaaaatgctgtatttcacatcaaaacttgtaggcctttctctatagaaccagctattggaactcttaatgtgggagagtccatgcaactggaagtggagtttgagccacagagtgtgggcgatcacagtggaagacttatcgtgtgttatgacacaggtgaaaaggtgtttgtatctctctatggagctgccatagacatgaatataaggctggataagaattccttgaccatcgagaaaacctacatatctctggccaatcagcgaactataaccattcacaatcgcagtaatatcattgcccatttcctgtggaaggtatttgctacccagcaagaagaggacagagaaaaatatagggcctgtgatgatctgatcaaagaggagaaggatgagactgatgagttttttgaagagtgcattactgatcctttactccgagaacatctttctgttctgtcccgaacctttgcgaatcagaggaggctggtgcagggagacagcaagctgttcttcaataacgttttcactgtggagcccctggaaggtgatgtctggcccaactcatcagctgaaatcaccgtgtactttaacccactagaagccaagctctatcaacagaccatttactgcgacattttaggccgagaaatccgtctgcccctccgaatcaaaggggaaggcatgggacctaagattcacttcaactttgaattgctggatattgggaaagttttcactggatctgcacattgttatgaggcgatactgtacaacaaaggcagcatcgatgctctcttcaacatgacccctccaacttcagctttgggggcctgctttgttttcagtcccaaggaaggcatcattgaaccaagtggagtccaagctatccagatctccttcagctctaccatcctgggaaactttgaagaagagttcctggtcaatgtcaatgggtcacctgagcctgtgaaactgaccattagaggctgtgtcattggacctaccttccattttaatgttccagctctgcactttggtgatgtttcctttgggtttcctcataccttgatatgttccctcaataatacctctttgatccccatgacttacaaactgcgtatccctggggatggccttggccataaaagcatttcatattgtgagcagcatgtggactacaaaagaccatcttggaccaaggaagaaatatcctcaatgaaaccaaaagaattcaccatctctcctgactgtggcaccattcgcccccagggatttgctgctatcagggtgacattatgctccaacactgtgcagaaatacgagctggcactcgtggtggacgtggagggcatcggagaagaggtgctggcgctcttaattacagcaaggtgtgttgtacctgccctccacctggtcaatacagaggtggactttgggcactgcttcctgaagtacccgtatgagaaaacactccagcttgccaatcaagatgacctcccaggattctatgaggtccagcctcaggtgtgtgaggaggtgcctactgtgctgttttccagccccacccccagcggggtcatctccccaagcagcaccatccacataccactggtcctggagacccaggtcactggagaacacagatccacggtttacatctcaatctttgggagccaggacccccctttggtatgtcacttaaagagcgctggagaaggcccagttatctacgtccatcccaatcaagtggacttcgggaatatctacgtcctaaaagactcttccaggattctcaacctatgcaaccagtccttcattcccgcatttttccaggcacacatggcacacaaaaaatccctttggacgattgaacccaatgaaggcatggttcctccagaaactgatgttcaactggcactgaccgccaacctgaatgacacactgacattcaaggactgtgttattttggacattgaaaatagcagtacctatcggattcctgttcaggcttccggaactggttccactattgtttcagataagccctttgctccagaactcaatttgggggcacattttaggtaaggaaatctcatggaccagtttttatagatatcacatatgttacatatgctgagcatcacctctactttagaaaattattttaagtaattaaaactagccacctcagtccctctcctttcccatcctcactcttccacctcctgatgtgtatgtcagcaacaagaagacattttctagccataacttggttgcattctctaatccgtgt

SEQ ID NO: 14043 - DNA, 15480 bp, Homo sapiens
  source 1..15480: mol_type = unassigned DNA
ggagcccctcagcggcggcggggtctgtgagttggacgcggggtcttggcggggaatggaggtagaataaacgtgggacccggagtgcaccaaggtgagaaaaaaaaattactaaaaatgacaagtagaagacttgaggagtccatgggggctgttcagatgggattggtcaatatgttcaaaggatttcaaagcaaggttttgccacccctgagtccaaaggtggttacagaagaagaagtaaaccgaatgcttacaccctcagagttcctgaaggaaatgtccctgaccaccgagcagagactggcaaaaacacgtttgatgtgccgaccacagatcatcgaactcttagatatgggggaaacaacacatcagaagttttcaggaattgacctggatcaggcattattccagccctttccatcagaaattatatttcagaactacactccctgtgaagtctatgaagttccactgattttgaggaacaatgacaaaattccaaggttggtgaaagttgtggaagaaagttcgccttactttaaagtaatcagccccaaagatattggccacaaagtggctcctggagtgccttccatattccgaatcctctttactccagaggagaacaaggattacgcccatacgttgacctgtgttactgaaagagaaaagtttattgtacccatcaaagctagaggggcacgagccattctcgattttcctgacaagctgaatttttccacttgtcctgtcaaatacagcacccagaagattctgctggtacgaaacattggcaacaaaaatgctgtatttcacatcaaaacttgtaggcctttctctatagaaccagctattggaactcttaatgtgggagagtccatgcaactggaagtggagtttgagccacagagtgtgggcgatcacagtggaagacttatcgtgtgttatgacacaggtgaaaaggtgtttgtatctctctatggagctgccatagacatgaatataaggctggataagaattccttgaccatcgagaaaacctacatatctctggccaatcagcgaactataaccattcacaatcgcagtaatatcattgcccatttcctgtggaaggtatttgctacccagcaagaagaggacagagaaaaatatagggcctgtgatgatctgatcaaagaggagaaggatgagactgatgagttttttgaagagtgcattactgatcctttactccgagaacatctttctgttctgtcccgaacctttgcgaatcagaggaggctggtgcagggagacagcaagctgttcttcaataacgttttcactgtggagcccctggaaggtgatgtctggcccaactcatcagctgaaatcaccgtgtactttaacccactagaagccaagctctatcaacagaccatttactgcgacattttaggccgagaaatccgtctgcccctccgaatcaaaggggaaggcatgggacctaagattcacttcaactttgaattgctggatattgggaaagttttcactggatctgcacattgttatgaggcgatactgtacaacaaaggcagcatcgatgctctcttcaacatgacccctccaacttcagctttgggggcctgctttgttttcagtcccaaggaaggcatcattgaaccaagtggagtccaagctatccagatctccttcagctctaccatcctgggaaactttgaagaagagttcctggtcaatgtcaatgggtcacctgagcctgtgaaactgaccattagaggctgtgtcattggacctaccttccattttaatgttccagctctgcactttggtgatgtttcctttgggtttcctcataccttgatatgttccctcaataatacctctttgatccccatgacttacaaactgcgtatccctggggatggccttggccataaaagcatttcatattgtgagcagcatgtggactacaaaagaccatcttggaccaaggaagaaatatcctcaatgaaaccaaaagaattcaccatctctcctgactgtggcaccattcgcccccagggatttgctgctatcagggtgacattatgctccaacactgtgcagaaatacgagctggcactcgtggtggacgtggagggcatcggagaagaggtgctggcgctcttaattacagcaaggtgtgttgtacctgccctccacctggtcaatacagaggtggactttgggcactgcttcctgaagtacccgtatgagaaaacactccagcttgccaatcaagatgacctcccaggattctatgaggtccagcctcaggtgtgtgaggaggtgcctactgtgctgttttccagccccacccccagcggggtcatctccccaagcagcaccatccacataccactggtcctggagacccaggtcactggagaacacagatccacggtttacatctcaatctttgggagccaggacccccctttggtatgtcacttaaagagcgctggagaaggcccagttatctacgtccatcccaatcaagtggacttcgggaatatctacgtcctaaaagactcttccaggattctcaacctatgcaaccagtccttcattcccgcatttttccaggcacacatggcacacaaaaaatccctttggacgattgaacccaatgaaggcatggttcctccagaaactgatgttcaactggcactgaccgccaacctgaatgacacactgacattcaaggactgtgttattttggacattgaaaatagcagtacctatcggattcctgttcaggcttccggaactggttccactattgtttcagataagccctttgctccagaactcaatttgggggcacattttagcctggatacccactattaccactttaagttgatcaacaagggacgtcggatccaacagttgttctggatgaatgatagcttccgaccccaggccaagctgagtaagaagggccgggttaagaagggacatgctcatgtccaaccccagcccagtggctctcaggagcccagggatccacagagccccgtgtttcatctccaccccgccagcatggagctgtacccaggccaggcaattgatgtgatactcgaaggctattctgctactcccaggatagtgaaagagaagctggtgtgccacgccatcatcggggcacagaaggggaagagcttggtgatggctgtgaacatcacctgtgagttcgtcgcacctctcatccagctctccaccaagcagctcatctaccgactggagaagaaacctaacagtatcctgaaacctgattaccagcccttggccataaagaacatttccaccctgcccgtgaacttgttgctgtcaacatctggacccttctttatatgtgagactgataaatccctgctgccggcaactcctgagcctattaaactggaaattgatgaagaaaaaaacctgctgatcaagtttgacccttcctacagaaacgatctgaacaactgggtggcagaagaaattctagcaattaagtatgtggaacaccctcagatagacagcctggacctgcgcggagaagtgcattaccccaacctcagctttgagacaaaggagctggattttggctgcatcctgaacgatactgagctcattcgctacgttaccatcaccaactgcagtccgttggttgtgaagtttcgctggttcttcttggtgaatgatgaggaaaatcagataaggtttgtgacattgccgaagaagccctacagtgccccagtgtcccagatggagtccatcccagcaacctcagaggctgccagcccaccagcaatcctagttacagtagagtcccccgagatggatttaaatgattttgttaagactgtccttgtggatgaagatgccaggcctgaagaaaaagaactaagaaaaacgaaagcttccagtgtgatctcagatgtacggtgtcctttccatggggaggaaagaatatactcaagccagagccaggtggaggatcaggaatccctacagacctgtgaacagaatgagatgctttccattgggatagaagaagtgtttgatattttgcccctgtttggagtgttgcagccacacagtagccaccaaatatcgttcaccttctatggacacgctaacatcattgcacaagctaaagctctgtgtgaagtggaagaaggacccacctacgaaataacactgaagggagaggcgtccctggtcaactattcctttgacaccaaggatattcactacggattacagctgtttgaccatgtcacagagagggaaatcacgctgacgaacatggggaaagttggctttgagttcaaggttctgactgaccaccagtcttctccagacaaccttctccctggagtgccactaatcctgcctgtgtctggctttatcagttcacatcaagagcaggtattaaaagtttactacctacctggagtacctgaggtctttaaaaggagtttccagatacagatcgcccacctggacccagaaaatatcactctgagcggagagggaatctttccccaaatctgcctcgatctccccaggaacctcacagcaaatgaaaagtatgaaatgttcttgaatcaagccaggaaaaacacagacaaagagtataacaaatgtgaaatgctcgatcactttgacataataactgaggaagtgccagaagacgagcctgctgaggtaagtgctcatctccagatggaggtagaaagacttatagtccaaagctatgtcctagaacatcagaaaacaaccacccctgatcctatggatgacccctgcttcagccatcggagtcgccgcaaactggccaaaatccagctaccagagtacatcctggactttggctacatcatccttggcgaagtccgaacccacatcatcaagatcatcaacaccagtcactttccagtgtcattccatgcagacaagcgtgtccttcatgagacaggattcagtactgagctagatcgtgtaaagaatctacctcattgtgaaacggaaatatttgaagtgagatttgacccacagggggccaatcttcctgttggaagcaaagaagtcattctgcccatcaaggtggttggagggccaacagttcacatctgtctccaagccaaggtgaccattccaaccatgactctctctcgtggaaaagtggactttgccacaattcagtgtggacagtgcctggtggaaactattcagctttccaatcatctccaagtcccttgtgaatggttcgtccagagccaaaagcctgttgacaagctggagaaacacatgccgaagtacttaagacagaaactacgcgctgaattaaagccaaagacacggatcttcgaaatccagcccatttctggagtcttggatcctggtgagaagtccaacgtgcaagtgaaattcatgccaaaagaagagaaattctacagccaaaccctggtgtttcagattgcccagagtgctcaaaagcttaccctcctggcacgtgggcaaggtctagagccacgcctggaatttagtccttcagtcctggatctggggccactgctactttgtgcacctggagacgaggccgaggtgatagtgaagaatccctgcaacttccccattgagttttattccttagaatttgatcagcagtatctcatagaagaaaagatcttgcggaagctgaagggctatgattcctacaacaccctgctgctgcctccccgcaaccctggggagaagctgcccccagaactgtacgagtacttcaaagagataaagaagtcaaaagaggagcagatgagggcgaaatatctggagaatctggcacaggagaatgaagaggaagatataacctcatcagatcagggaacctccaatagcacaaagaggacatcgctgagccgagggatctctgtcacatccaacctggaagaatggcacgccctgttggtcgagtccaaaacctacctagaggaagaggaggatgaggaaagcctggaaaaaatcattttccaaactgacaagcttcagagcattgacagccactccatggaggaagttggagaggtggaaaacaacccagtgagcaaagcaatcgctcgccacctgggcattgacatttctgcagaaggccgcctggccaagaaccggaaaggcatcgccattatcattcatgggacacccttgtcaggaaagtcagccaatgccgttagcgtggccaagtactacaacgcagcctgcctgagcatcgactccattgtgctggaagctgtggccaacagcaacaacatcccagggatccgggcccgtgagctctgcatcagggctgccatagagcagtccgtgaaggaaggagaggaggctgcccaggaggcagctgtgggtcaaaacgtcatagggcaaggacgactgagcactgacaccttgggcaagttagcctccgagatgactctggtggccccagaaattaaacctggaaagagtgttcgtgggagcgtggtgatcaccaaaagcaaggcagacagccatggctccgggtcacagaagcagcatcactcacaccagtctgaaacaccacagatttcctccagccctctccccccggggcccatccaccgctggctcagtgttagtcccagtgtcggaggcgagaccgggctgatgagctgtgtgctcccggatgaacttctcgtgcagatcctggcagagcggatacagctgagtgactgctaccgaggagtggtgtttgatggcctcgacactctctttgctcagaatgctgcagccgccctcctctgcctgctgaaggccattggcagccgggagcatatatacattctcaacatggcccaggattacgcagccatgaaggcccaggagaaagccaaaaaggagcaagaagaacgcaagcacaagggagctcttgagaaagagaaggagcgtctccaaaacatggatgaggaagaatatgatgccctgactgaggaggagaaactcacattcgatcgggggattcagcaggcgctccgcgagcggaagaagagggagcaggagaggctggcaaaggaaatgcaagaaaagaagctacagcaggagctggagcgacaaaaggaagaggatgagctgaaacggagggtcaaaaaaggaaagcagggacccattaaggaggagccccccatgaagaaatctcaagcagcaaacaagcaggttcctccgctcaccaaagtggatgtcaagatggagacaatcgaaaggaaaatatctgttagggaacaaacaatgtctgagaaggaagagctaaataagaagaaaaggaacatgggcgatgtcagcatgcatgggcttcctcttgtccaggaccaagaggacagtgaaggggacaactcaaaggaccccgacaagcaactggccccgaagtttaagacctatgaattgacactgaaggatgtccagaacatcctcatgtactgggaccggaagcaaggagtccagctgcctcctgcagggatggaggaagcgccccatgagcccgacgaccagcgccaggtccccttgggtgggcgcaggggccgcaaggaccgggagagagagcgcctggagaaggagcgcacggagaaggagcgcctggagagggagaaggcggagcgggagcgcctggagaagctgcgagccctggaggagcggagcgactgggagggggaaggggaggaggaccacgaagggaagaaggagaaggacctgggcgtacccttcctagacatccagacaccagactttgaaggcttgagctggaagcaggccctagagagcgacaagcttcccaaaggagagcagatcctagacatcttgggtctgggtgcctccggaccacccatcccgcctcccgccttattctcaatcgtctcctacccggtgaagcggccacctttgaccatgacagacgacctggagcattttgtatttgtgatcccaccatccgaagatatatctctggatgaaaaaaaagaaatggaaatagaatcagactttttggccaccacaaacactacaaaggctcaagaggagcagaccagctcatctaaggggggcaaacagaaaatgaaagaaaagatagaccaagtcttcgagattcagaaagacaagcgtcacatggccttaaacaggaaggtcctttctggggaacctgctggaaccatttcccagctgtcagatacagacctggacaacttcaacgggcagcactcccaggagaaattcaccagactgaatcacttccggtggatcgtgccagccaatggcgaggtaacgttgcaggtgcacttctcttctgatgagttcgggaactttgaccaaacctttaactttgagatcctaggaacttgctgccagtaccagctctactgccgaggcatctgcacttacccatacatttgccaagacccaaaagtggtatttcctcagcggaagatggacatgaagacaaatgaggtcatctttaagaagtatgttatgagcacggagacgtactactttgggccactactttgtggaaaatcaagagataagtacaagtcatccttattcccaggcaacatggagacgctaacaatcctgaacacttccttaatggtggtggaggcatccttctattttcagaatgatgtcaaagcaaacacgtacttcctggaacccaacaccatggtcctgaaacccaatgagaagcagatattaaacgtatgggcctaccctacttcagttggtgtctttgaagacagcattgtctgctgcatcaatgacaacccagagccagccatcttccaattaagctgccaggggatccgcccggaactagagctggaacccaggcaattacattttgaccggctcttgctgcacagacaggaatccagggtagttcttctccgcaatgtcacgctcctgcctgtggcctggcggatcaccagcctggagcacttgggtgatgatttcactgtatccctgatgcaggggaccatcccccctgaggctgagtacggcctgcacctgtactttcagcccaccaagcctgtcaacatcaagaaggctattcggttggaggttttagatgcagaaaatcttcttggtgttgttcagattgaaaatatcatggtctttgcagaggcatacgacatcgccttggacatcaccttccccaaaggagctgaagggggactggattttgggattgtcagggtcacagaggaggcgaagcagcccctgcaattgaagaaccgtgggaaatatgagatcgcgttcagcttttccgtggactctgtagggatttcaacacctaatataaattccatgatctcagtccaacccaaaaagggttcactgaccccaacagaaaaacccacaaatgtccaagttttcttccatgcaaaaaaggaagtgaagattgagcaccagcctgttctgcgctgtcagattattgagcccaatatttcagaaggaggtgagatcattgccagcatcccaattaagttttccgcgaatgcagtatattccaaatacaacatcaccccctcctctgtcatcaactttggagctttgatctgtggcactcgtaaaagcaccaccttcaccatagaaaatcaaggtgttactgacttcaagttcgccctttataagctgacaggggagagccccattcatcaaaagaaagcagccagccacgtcagacatgcaagatcccgagaaagtgagagcttctacaaaactggctcttccagagcagccaagttctctgacacgattcagaaagaagtaaccaccacaggccaggcccgcttcgcccatggcatgttcaccgtgtaccctgggtttggctccattccttccggaggacagcaggtcatcaacgttgactgtgtggctgacgccatgggaaagtgtgaggagtttatagccatcgatatctccggccgagaccctgcagtccaccctgccggcattctttacactttgctagctgaagcctgtctaccagccttcgtgaccgaaaacaatgccttgatatttgaagagcaccagatatgtaccagtgccaacctgcaccacatcctgcagaccatagagagcggggggctgttcgtcgaggatgagaacaagttcatcttctgcaatgtcctggtgggccgccaagccaaggctcgtttcaagatcagcaacgtgggaaagatcacctgtgatgtcaacattgtagtcaggcctatctccaataagccctttgcccgcatcgtcgacatttttgaagtggaacccagcaagatgtgcattgccagtcattcccatgcctttgccacggtgtccttcaccccgcagatcatgcagaactaccagtgcatctttgaggctaccttggatggcttgcccagcaccctggccaagagccgaggcctcgtgtttgacatcgctggtgaggggaacctccctcgagtgacggttgtgcggccagttcttcataaccaatatggaaaccccttgctcctctttaagaggcttctccttggtcattcagagaagctgcctctcatcctcaagaacaatggtgtcctccctgcccagctgcatgttgacctgcaggatgagctaggagtcttctccctgaaagggaggcccaccaccgcgtatatctacatcacagaggaaaataaaccacatgtaaaagcaaagaaagctcacacagcctccttggttgtttctcctggagatacagctgaatttgatgtcgttttccactcccagaaggttgggaggatgagaggtatcatccacttgtcagtgatcaacaaccaatatgaggagacctccatccacatggtgggagagggctatgaggatgacatcaccttggacaacatccatggactggtggcccccaccagccaggaagacataagtatctctgagttcacagagatcatcgaggacaatgatatggaagacttggtggcagctgctctggtggaccacatccaatttggggactgccacattggacacagctataatgcgagcttcacagtcacaaatcacagccaagtgaacttgatacggtttgaatggcctgtttcagctacaattgctttctccccacagatgggccacctccaccctgggtgtgccaaggacatagtggtgaccatgaagtcagatgtacccatcaacctaaagaatatgcggatcaggtgcaagctctccaggattatgtttcagctccctgcagaccaggtccccgactgggatgaccgcatgcacacagtcaagtgggtggacgtacccagaaacatgcctgggactttcactacaaaacgaaaagtgatagagacggatccggaacctgctcactcagtactagaagaaaactaccaagaactgcagcttcaaatcagtgccaatgtggatttcgcttcataccattgccaagcaagagatgtgcgctttaaggaaaccttggtttaccagacccgagtgtttgagttcgatgtgattaattcaggacgtgtccagctggaattcagctgggtctcagaagatacctcaaaggcagtcagctttgcaaaaccagatcaccaaggttcagctcaaaaagatcagcttagtcagggcacgatgcatacaggcagcaccctggacagcaccatggaccactgggccgagggttccccacagcccttctctgtggagccctcttcgggaatcgtgccggtggggaagattcagaagttcaaagtaaaattctccccgttggacattggagacttcgagagcaaccttttctgccagattcccaacctgccacctggagagcaaggtccggtcctggtagcaaaagggcggagcaccttgcccatctgccattttgatctgaaagactcggactacataagtggccatcagcgcaacccagagctccgagggtccagtgggggagctctggatccaaacacccgggtgattgagttcaccactgtgggcataggagggaagaatctccggacctttaccatcctaaacccaaccaatagcacctactccttctgctggatctctgaagaaattgaaagtctccagaaccctgcagcattcacatgccttacagaaaagggcttcatccaccctgaaaagaaagccgagatcgtgttccagttcacacctttccatctgggcatcactgagtcatcatggaccttcctaattcccgagcacaacatcacagtccctttcctgctggtaggcaaaactaccgaacctctcatctctctgaacaagtcacacctcaacttcagctctctcctcattggcagagaagccagggagactgtgcagatcattaacaaggaggagcaggggttcgatttttccttccaggacaactcccgctattctgaaggtttcagcaacagcctgcttgtatgtcccatggaaggctggatcccaccactgtccaggttcccaattgatattttcttcacaccaaagcaggaaggagatgtgaactttaatttgatctgcaatgtggaaaagaaagtccaccctgtgacattaaatgtcaaggccgagggctacactatgaatgtggagatcaagtgcaaggacaggacaggctccatcactctgttgactcccaaccagactaacatcatcaacttctatgaggtggagttaaatgaatgtgtccagtgtgaattcaactttatcaacactggaaagttcaccttcagcttccaggcacagctgtgtggctccaaaaccttgctgcagtacttggaattttcacccatcgacagcactgtggatgtaggacagagtgtacatgccaccctgtcttttcaaccattaaagaagtgtgtcttgacagacctggaactcataatcaagatcagccatggtccaacatttatgtgcaacatctcaggctgtgctgtgagcccggctatccatttctccttcaccagctacaactttgggacctgctttatctatcaagctgggatgcccccatacaaacaaaccctggtaattaccaacaaggaagaaacacctatgagcatagattgtctgtacaccaacaccactcacctcgaggtgaactcccgtgttgatgtggtaaagccaggaaacacattggagattccaataactttttatcctcgagaaagtatcaactatcaagaactcattccctttgaaatcaatgggctctcacaacaaacagtcgaaatcaaagggaagggtaccaaaatgaagattttagtcctagatccagccaacaggattgtgaagttgggagctgtcctaccagggcaggttgtgaaaagaacagtttccatcatgaacaacagcctggcccagctcacatttaatcagtccattctgttcacaattccagaactccaggaacccaaggtccttaccctggcgcccttccacaacatcacactgaagcccaaagaagtctgtaaactggaagtcatctttgccccgaagaagcgtgtccctcccttctctgaggaagtgttcatggaatgcatggggctcctgcgccccctcttcctccttagcggctgctgccaggccctggagatctcactggaccaggaacatattccctttggacccgtggtgtatcagacgcaagccacacgtcgcatcctcatgatgaacacaggcgatgtgggtgcaaggtttaaatgggacatcaaaaaatttgagcctcatttctccattagcccagaagaaggctatattacctcaggcatggaggtttcttttgaagtgacctaccatcccaccgaggtgggaaaggagagcctttgtaaaaacattctctgctacatccagggaggcagtcctctgagtctaaccctgtctggagtctgcgtgggaccacctgcggtaaaagaggtagtgaatttcacgtgccaggtgcgctccaagcacacgcagaccatcctgctgtcaaaccgcaccaaccagacctggaatctgcaccccatctttgagggcgagcactgggaggggcctgagttcatcaccctggaggcccaccagcaaaacaagccctatgagatcacctacaggccccgcaccatgaacttggagaaccgcaagcaccagggcaccctcttcttccccctcccagatgggaccggctggctgtatgctctgcatgggacttctgagctccccaaagctgtagccaatatctatcgtgaagtgccatgtaagaccccctacactgagcttctgccaatcaccaactggctgaacaagccccagagattccgggtcatcgtggaaatactgaaaccagagaagccggacctaagcatcactatgaagggccttgattacattgatgtactgtctggctctaagaaagactacaagctgaacttcttttcccacaaggagggaacgtacgctgcaaaggtgatcttccgaaacgaggtgacaaatgagttcttgtactacaatgtgagtttcagggtcatcccttcaggcatcatcaaaaccatcgagatggtgaccccagtccggcaagttgcgtcagcctccatcaagttggagaaccctctgccctactcggtgaccttctccacggaatgccggatgcccgacatcgccctgccctcccagtttgtggtgcctgccaactccgagggcacgttctcatttgaatttcagcccctgaaagctggagaaaccttcggaagactaactttgcacaacactgacttgggttactaccaatatgagctctatctgaaagccacgccagcacttccggaaaagcctgttcacttccagactgtccttggcagcagccaaatcatccttgtgaagttcatcaattacacacggcagaggacagaatactactgcaggaccgactgtacagacttccacgcagaaaaactcattaatgcagccccaggaggccagggaggcactgaagccagtgtggaagtcttattcgagcccagccacctgggtgagaccaagggcatcctgatcctatcatcgctcgcaggtggagagtatatcatccccctctttggaatggctctgcctcccaagccccaaggtcccttctcgatccgagccgggtacagcataatcatccccttcaagaatgtcttctatcacatggtgaccttctccatcatcgtggataacccagccttcaccattcgcgctggagagtctgtgcggcccaagaagatcaacaacatcacagtctcctttgaaggaaacccatctggcagcaaaacccccatcaccaccaagctgactgtgagctgccctcctggtgaagggagtgagactggagttaaatgggtttattatctgaaggggatcaccctttag

SEQ ID NO: 14044 - DNA, 3685 bp, Homo sapiens
  source 1..3685: mol_type = unassigned DNA
gcatggagagtgcgggcggcttcaagctgggtatggagcccctcagcggcggcggggtctgtgagttggacgcggggtcttggcggggaatggaggtagaataaacgtgggacccggagtgcaccaaggtgagaaaaaaaaattactaaaaatgacaagtagaagacttgaggagtccatgggggctgttcagatgggattggtcaatatgttcaaaggatttcaaagcaaggttttgccacccctgagtccaaaggtggttacagaagaagaagtaaaccgaatgcttacaccctcagagttcctgaaggaaatgtccctgaccaccgagcagagactggcaaaaacacgtttgatgtgccgaccacagatcatcgaactcttagatatgggggaaacaacacatcagaagttttcaggaattgacctggatcaggcattattccagccctttccatcagaaattatatttcagaactacactccctgtgaagtctatgaagttccactgattttgaggaacaatgacaaaattccaaggttggtgaaagttgtggaagaaagttcgccttactttaaagtaatcagccccaaagatattggccacaaagtggctcctggagtgccttccatattccgaatcctctttactccagaggagaacaaggattacgcccatacgttgacctgtgttactgaaagagaaaagtttattgtacccatcaaagctagaggggcacgagccattctcgattttcctgacaagctgaatttttccacttgtcctgtcaaatacagcacccagaagattctgctggtacgaaacattggcaacaaaaatgctgtatttcacatcaaaacttgtaggcctttctctatagaaccagctattggaactcttaatgtgggagagtccatgcaactggaagtggagtttgagccacagagtgtgggcgatcacagtggaagacttatcgtgtgttatgacacaggtgaaaaggtgtttgtatctctctatggagctgccatagacatgaatataaggctggataagaattccttgaccatcgagaaaacctacatatctctggccaatcagcgaactataaccattcacaatcgcagtaatatcattgcccatttcctgtggaaggtatttgctacccagcaagaagaggacagagaaaaatatagggcctgtgatgatctgatcaaagaggagaaggatgagactgatgagttttttgaagagtgcattactgatcctttactccgagaacatctttctgttctgtcccgaacctttgcgaatcagaggaggctggtgcagggagacagcaagctgttcttcaataacgttttcactgtggagcccctggaaggtgatgtctggcccaactcatcagctgaaatcaccgtgtactttaacccactagaagccaagctctatcaacagaccatttactgcgacattttaggccgagaaatccgtctgcccctccgaatcaaaggggaaggcatgggacctaagattcacttcaactttgaattgctggatattgggaaagttttcactggatctgcacattgttatgaggcgatactgtacaacaaaggcagcatcgatgctctcttcaacatgacccctccaacttcagctttgggggcctgctttgttttcagtcccaaggaaggcatcattgaaccaagtggagtccaagctatccagatctccttcagctctaccatcctgggaaactttgaagaagagttcctggtcaatgtcaatgggtcacctgagcctgtgaaactgaccattagaggctgtgtcattggacctaccttccattttaatgttccagctctgcactttggtgatgtttcctttgggtttcctcataccttgatatgttccctcaataatacctctttgatccccatgacttacaaactgcgtatccctggggatggccttggccataaaagcatttcatattgtgagcagcatgtggactacaaaagaccatcttggaccaaggaagaaatatcctcaatgaaaccaaaagaattcaccatctctcctgactgtggcaccattcgcccccagggatttgctgctatcagggtgacattatgctccaacactgtgcagaaatacgagctggcactcgtggtggacgtggagggcatcggagaagaggtgctggcgctcttaattacagcaaggtgtgttgtacctgccctccacctggtcaatacagaggtggactttgggcactgcttcctgaagtacccgtatgagaaaacactccagcttgccaatcaagatgacctcccaggattctatgaggtccagcctcaggtgtgtgaggaggtgcctactgtgctgttttccagccccacccccagcggggtcatctccccaagcagcaccatccacataccactggtcctggagacccaggtcactggagaacacagatccacggtttacatctcaatctttgggagccaggacccccctttggtatgtcacttaaagagcgctggagaaggcccagttatctacgtccatcccaatcaagtggacttcgggaatatctacgtcctaaaagactcttccaggattctcaacctatgcaaccagtccttcattcccgcatttttccaggcacacatggcacacaaaaaatccctttggacgattgaacccaatgaaggcatggttcctccagaaactgatgttcaactggcactgaccgccaacctgaatgacacactgacattcaaggactgtgttattttggacattgaaaatagcagtacctatcggattcctgttcaggcttccggaactggttccactattgtttcagataagccctttgctccagaactcaatttgggggcacattttagcctggatacccactattaccactttaagttgatcaacaagggacgtcggatccaacagttgttctggatgaatgatagcttccgaccccaggccaagctgagtaagaagggccgggttaagaagggacatgctcatgtccaaccccagcccagtggctctcaggagcccagggatccacagagccccgtgtttcatctccaccccgccagcatggagctgtacccaggccaggcaattgatgtgatactcgaaggctattctgctactcccagggtaaggggatagcacatttggaagctattgttttttcctaaataaatctctactgtatctatttcttaggaaagtcccttgacatttatctgaggaaggatatggtttctcaaggattgtgtacaatcctgagttaccatagtagcatccgttgctttcggggtgcagctctgctcagtcttcaatttgtttctgtagctactgtgaacccaatcttaaaggaggttctcatgcccagggtccacagtgaccagccagcaagtctctggtagaaaaacacccagtttttagccaaagcaaattctcctattaacacttagcaggatgaatttaatattcattcaaaaagggtgtttatatcgacactctgggctgcctctcctattcaggtattgggacatccctgttcctttctttccagcctgactgcaactcacatttcaaaacatcttctttttatgcattaataaaagagccacatttatcttcagc

SEQ ID NO: 14045 - DNA, 2340 bp, Homo sapiens
  source 1..2340: mol_type = unassigned DNA
ggagcccctcagcggcggcggggtctgtgagttggacgcggggtcttggcggggaatggaggtagaataaacgtgggacccggagtgcaccaaggtgagaaaaaaaaattactaaaaatgacaagtagaagacttgaggagtccatgggggctgttcagatgggattggtcaatatgttcaaaggatttcaaagcaaggttttgccacccctgagtccaaaggtggttacagaagaagaagtaaaccgaatgcttacaccctcagagttcctgaaggaaatgtccctgaccaccgagcagagactggcaaaaacacgtttgatgtgccgaccacagatcatcgaactcttagatatgggggaaacaacacatcagaagttttcaggaattgacctggatcaggcattattccagccctttccatcagaaattatatttcagaactacactccctgtgaagtctatgaagttccactgattttgaggaacaatgacaaaattccaaggttggtgaaagttgtggaagaaagttcgccttactttaaagtaatcagccccaaagatattggccacaaagtggctcctggagtgccttccatattccgaatcctctttactccagaggagaacaaggattacgcccatacgttgacctgtgttactgaaagagaaaagtttattgtacccatcaaagctagaggggcacgagccattctcgattttcctgacaagctgaatttttccacttgtcctgtcaaatacagcacccagaagattctgctggtacgaaacattggcaacaaaaatgctgtatttcacatcaaaacttgtaggcctttctctatagaaccagctattggaactcttaatgtgggagagtccatgcaactggaagtggagtttgagccacagagtgtgggcgatcacagtggaagacttatcgtgtgttatgacacaggtgaaaaggtgtttgtatctctctatggagctgccatagacatgaatataaggctggataagaattccttgaccatcgagaaaacctacatatctctggccaatcagcgaactataaccattcacaatcgcagtaatatcattgcccatttcctgtggaaggtatttgctacccagcaagaagaggacagagaaaaatatagggcctgtgatgatctgatcaaagaggagaaggatgagactgatgagttttttgaagagtgcattactgatcctttactccgagaacatctttctgttctgtcccgaacctttgcgaatcagaggaggctggtgcagggagacagcaagctgttcttcaataacgttttcactgtggagcccctggaaggtgatgtctggcccaactcatcagctgaaatcaccgtgtactttaacccactagaagccaagctctatcaacagaccatttactgcgacattttaggccgagaaatccgtctgcccctccgaatcaaaggggaaggcatgggacctaagattcacttcaactttgaattgctggatattgggaaagttttcactggatctgcacattgttatgaggcgatactgtacaacaaaggcagcatcgatgctctcttcaacatgacccctccaacttcagctttgggggcctgctttgttttcagtcccaaggaaggcatcattgaaccaagtggagtccaagctatccagatctccttcagctctaccatcctgggaaactttgaagaagagttcctggtcaatgtcaatgggtcacctgagcctgtgaaactgaccattagaggctgtgtcattggacctaccttccattttaatgttccagctctgcactttggtgatgtttcctttgccacacaggaactgagagatcctcaagtactgattccctttcagcggtttcctcataccttgatatgttccctcaataatacctctttgatccccatgacttacaaactgcgtatccctggggatggccttggccataaaagcatttcatattgtgagcagcatgtggactacaaaagaccatcttggaccaaggaagaaatatcctcaatgaaaccaaaagaattcaccatctctcctgactgtggcaccattcgcccccagggatttgctgctatcagggtgacattatgctccaacactgtgcagaaatacgagctggcactcgtggtggacgtggagggcatcggagaagaggtgctggcgctcttaattacagcaagtgctccagagttatgcaataggaaggtgatgctgtcagtcctgcagtggaagatccatagagccaagaggtccctgccccgggacactgttgctgtgacttga

SEQ ID NO: 14046 - DNA, 3762 bp, Homo sapiens
  source 1..3762: mol_type = unassigned DNA
ggagcccctcagcggcggcggggtctgtgagttggacgcggggtcttggcggggaatggaggtagaataaacgtgggacccggagtgcaccaaggtgagaaaaaaaaattactaaaaatgacaagtagaagacttgaggagtccatgggggctgttcagatgggattggtcaatatgttcaaaggatttcaaagcaaggttttgccacccctgagtccaaaggtggttacagaagaagaagtaaaccgaatgcttacaccctcagagttcctgaaggaaatgtccctgaccaccgagcagagactggcaaaaacacgtttgatgtgccgaccacagatcatcgaactcttagatatgggggaaacaacacatcagaagttttcaggaattgacctggatcaggcattattccagccctttccatcagaaattatatttcagaactacactccctgtgaagtctatgaagttccactgattttgaggaacaatgacaaaattccaaggttggtgaaagttgtggaagaaagttcgccttactttaaagtaatcagccccaaagatattggccacaaagtggctcctggagtgccttccatattccgaatcctctttactccagaggagaacaaggattacgcccatacgttgacctgtgttactgaaagagaaaagtttattgtacccatcaaagctagaggggcacgagccattctcgattttcctgacaagctgaatttttccacttgtcctgtcaaatacagcacccagaagattctgctggtacgaaacattggcaacaaaaatgctgtatttcacatcaaaacttgtaggcctttctctatagaaccagctattggaactcttaatgtgggagagtccatgcaactggaagtggagtttgagccacagagtgtgggcgatcacagtggaagacttatcgtgtgttatgacacaggtgaaaaggtgtttgtatctctctatggagctgccatagacatgaatataaggctggataagaattccttgaccatcgagaaaacctacatatctctggccaatcagcgaactataaccattcacaatcgcagtaatatcattgcccatttcctgtggaaggtatttgctacccagcaagaagaggacagagaaaaatatagggcctgtgatgatctgatcaaagaggagaaggatgagactgatgagttttttgaagagtgcattactgatcctttactccgagaacatctttctgttctgtcccgaacctttgcgaatcagaggaggctggtgcagggagacagcaagctgttcttcaataacgttttcactgtggagcccctggaaggtgatgtctggcccaactcatcagctgaaatcaccgtgtactttaacccactagaagccaagctctatcaacagaccatttactgcgacattttaggccgagaaatccgtctgcccctccgaatcaaaggggaaggcatgggacctaagattcacttcaactttgaattgctggatattgggaaagttttcactggatctgcacattgttatgaggcgatactgtacaacaaaggcagcatcgatgctctcttcaacatgacccctccaacttcagctttgggggcctgctttgttttcagtcccaaggaaggcatcattgaaccaagtggagtccaagctatccagatctccttcagctctaccatcctgggaaactttgaagaagagttcctggtcaatgtcaatgggtcacctgagcctgtgaaactgaccattagaggctgtgtcattggacctaccttccattttaatgttccagctctgcactttggtgatgtttcctttgggtttcctcataccttgatatgttccctcaataatacctctttgatccccatgacttacaaactgcgtatccctggggatggccttggccataaaagcatttcatattgtgagcagcatgtggactacaaaagaccatcttggaccaaggaagaaatatcctcaatgaaaccaaaagaattcaccatctctcctgactgtggcaccattcgcccccagggatttgctgctatcagggtgacattatgctccaacactgtgcagaaatacgagctggcactcgtggtggacgtggagggcatcggagaagaggtgctggcgctcttaattacagcaaggtgtgttgtacctgccctccacctggtcaatacagaggtggactttgggcactgcttcctgaagtacccgtatgagaaaacactccagcttgccaatcaagatgacctcccaggattctatgaggtccagcctcaggtgtgtgaggaggtgcctactgtgctgttttccagccccacccccagcggggtcatctccccaagcagcaccatccacataccactggtcctggagacccaggtcactggagaacacagatccacggtttacatctcaatctttgggagccaggacccccctttggtatgtcacttaaagagcgctggagaaggcccagttatctacgtccatcccaatcaagtggacttcgggaatatctacgtcctaaaagactcttccaggattctcaacctatgcaaccagtccttcattcccgcatttttccaggcacacatggcacacaaaaaatccctttggacgattgaacccaatgaaggcatggttcctccagaaactgatgttcaactggcactgaccgccaacctgaatgacacactgacattcaaggactgtgttattttggacattgaaaatagcagtacctatcggattcctgttcaggcttccggaactggttccactattgtttcagataagccctttgctccagaactcaatttgggggcacattttagcctggatacccactattaccactttaagttgatcaacaagggacgtcggatccaacagttgttctggatgaatgatagcttccgaccccaggccaagctgagtaagaagggccgggttaagaagggacatgctcatgtccaaccccagcccagtggctctcaggagcccagggatccacagagccccgtgtttcatctccaccccgccagcatggagctgtacccaggccaggcaattgatgtgatactcgaaggctattctgctactcccaggaaacctaacagtatcctgaaacctgattaccagcccttggccataaagaacatttccaccctgcccgtgaacttgttgctgtcaacatctggacccttctttatatgtgagactgataaatccctgctgccggcaactcctgagcctattaaactggaaattgatgaagaaaaaaacctgctgatcaagtttgacccttcctacagaaacgatctgaacaactgggtggcagaagaaattctagcaattaagtatgtggaacaccctcagatagacagcctggacctgcgcggagaagtgcattaccccaacctcagctttgagacaaaggagctggattttggctgcatcctgaacgatactgagctcattcgctacgttaccatcaccaactgcagtccgttggttgtgaagtttcgctggttcttcttggtgaatgatgaggaaaatcagataaggtttgtgacattgccgaagaagccctacagtgccccagtgtcccagatggagtccatcccagcaacctcagaggctgccagcccaccagcaatcctagttacagtagagtcccccgagatggatttaaatgattttgttaagtaa

SEQ ID NO: 14047 - DNA, 3659 bp, Homo sapiens
  source 1..3659: mol_type = unassigned DNA
aagctgggtatggagcccctcagcggcggcggggtctgtgagttggacgcggggtcttggcggggaatggaggtagaataaacgtgggacccggagtgcaccaagaaaaaaaaattactaaaaatgacaagtagaagacttgaggagtccatgggggctgttcagatgggattggtcaatatgttcaaaggatttcaaagcaaggttttgccacccctgagtccaaaggtggttacagaagaagaagtaaaccgaatgcttacaccctcagagttcctgaaggaaatgtccctgaccaccgagcagagactggcaaaaacacgtttgatgtgccgaccacagatcatcgaactcttagatatgggggaaacaacacatcagaagttttcaggaattgacctggatcaggcattattccagccctttccatcagaaattatatttcagaactacactccctgtgaagtctatgaagttccactgattttgaggaacaatgacaaaattccaaggttggtgaaagttgtggaagaaagttcgccttactttaaagtaatcagccccaaagatattggccacaaagtggctcctggagtgccttccatattccgaatcctctttactccagaggagaacaaggattacgcccatacgttgacctgtgttactgaaagagaaaagtttattgtacccatcaaagctagaggggcacgagccattctcgattttcctgacaagctgaatttttccacttgtcctgtcaaatacagcacccagaagattctgctggtacgaaacattggcaacaaaaatgctgtatttcacatcaaaacttgtaggcctttctctatagaaccagctattggaactcttaatgtgggagagtccatgcaactggaagtggagtttgagccacagagtgtgggcgatcacagtggaagacttatcgtgtgttatgacacaggtgaaaaggtgtttgtatctctctatggagctgccatagacatgaatataaggctggataagaattccttgaccatcgagaaaacctacatatctctggccaatcagcgaactataaccattcacaatcgcagtaatatcattgcccatttcctgtggaaggtatttgctacccagcaagaagaggacagagaaaaatatagggcctgtgatgatctgatcaaagaggagaaggatgagactgatgagttttttgaagagtgcattactgatcctttactccgagaacatctttctgttctgtcccgaacctttgcgaatcagaggaggctggtgcagggagacagcaagctgttcttcaataacgttttcactgtggagcccctggaaggtgatgtctggcccaactcatcagctgaaatcaccgtgtactttaacccactagaagccaagctctatcaacagaccatttactgcgacattttaggccgagaaatccgtctgcccctccgaatcaaaggggaaggcatgggacctaagattcacttcaactttgaattgctggatattgggaaagttttcactggatctgcacattgttatgaggcgatactgtacaacaaaggcagcatcgatgctctcttcaacatgacccctccaacttcagctttgggggcctgctttgttttcagtcccaaggaaggcatcattgaaccaagtggagtccaagctatccagatctccttcagctctaccatcctgggaaactttgaagaagagttcctggtcaatgtcaatgggtcacctgagcctgtgaaactgaccattagaggctgtgtcattggacctaccttccattttaatgttccagctctgcactttggtgatgtttcctttgggtttcctcataccttgatatgttccctcaataatacctctttgatccccatgacttacaaactgcgtatccctggggatggccttggccataaaagcatttcatattgtgagcagcatgtggactacaaaagaccatcttggaccaaggaagaaatatcctcaatgaaaccaaaagaattcaccatctctcctgactgtggcaccattcgcccccagggatttgctgctatcagggtgacattatgctccaacactgtgcagaaatacgagctggcactcgtggtggacgtggagggcatcggagaagaggtgctggcgctcttaattacagcaaggtgtgttgtacctgccctccacctggtcaatacagaggtggactttgggcactgcttcctgaagtacccgtatgagaaaacactccagcttgccaatcaagatgacctcccaggattctatgaggtccagcctcaggtgtgtgaggaggtgcctactgtgctgttttccagccccacccccagcggggtcatctccccaagcagcaccatccacataccactggtcctggagacccaggtcactggagaacacagatccacggtttacatctcaatctttgggagccaggacccccctttggtatgtcacttaaagagcgctggagaaggcccagttatctacgtccatcccaatcaagtggacttcgggaatatctacgtcctaaaagactcttccaggattctcaacctatgcaaccagtccttcattcccgcatttttccaggcacacatggcacacaaaaaatccctttggacgattgaacccaatgaaggcatggttcctccagaaactgatgttcaactggcactgaccgccaacctgaatgacacactgacattcaaggactgtgttattttggacattgaaaatagcagtacctatcggattcctgttcaggcttccggaactggttccactattgtttcagataagccctttgctccagaactcaatttgggggcacattttagcctggatacccactattaccactttaagttgatcaacaagggacgtcggatccaacagttgttctggatgaatgatagcttccgaccccaggccaagctgagtaagaagggccgggttaagaagggacatgctcatgtccaaccccagcccagtggctctcaggagcccagggatccacagagccccgtgtttcatctccaccccgccagcatggagctgtacccaggccaggcaattgatgtgatactcgaaggctattctgctactcccagggtaaggggatagcacatttggaagctattgttttttcctaaataaatctctactgtatctatttcttaggaaagtcccttgacatttatctgaggaaggatatggtttctcaaggattgtgtacaatcctgagttaccatagtagcatccgttgctttcggggtgcagctctgctcagtcttcaatttgtttctgtagctactgtgaacccaatcttaaaggaggttctcatgcccagggtccacagtgaccagccagcaagtctctggtagaaaaacacccagtttttagccaaagcaaattctcctattaacacttagcaggatgaatttaatattcattcaaaaagggtgtttatatcgacactctgggctgcctctcctattcaggtattgggacatccctgttcctttctttccagcctgactgcaactcacatttcaaaacatcttctttttatgcattaataaaagagccacatttatcttcagcaa

SEQ ID NO: 14048 - DNA, 1634 bp, Homo sapiens
  source 1..1634: mol_type = unassigned DNA
acggggcgggacgggctgggccggacctgctctgaggctcccagtcgcagcggtgaccgcgggcgggtggggcgccgggtgaagaaaccaagacgcagagaggccaagccccttgccttgggtcacacagccaaaggaggcagagccagaactcacaaccagatccagaggcaacagggacatggccacctgggacgaaaaggcagtcacccgcagggccaaggtggctcccgctgagaggatgagcaagttcttaaggcacttcacggtcgtgggagacgactaccatgcctggaacatcaactacaagaaatgggagaatgaagaggaggaggaggaggaggagcagccaccacccacaccagtctcaggcgaggaaggcagagctgcagcccctgacgttgcccctgcccctggccccgcacccagggccccccttgacttcaggggcatgttgaggaaactgttcagctcccacaggtttcaggtcatcatcatctgcttggtggttctggatgccctcctggtgcttgctgagctcatcctggacctgaagatcatccagcccgacaagaataactatgctgccatggtattccactacatgagcatcaccatcttggtcttttttatgatggagatcatctttaaattatttgtcttccgcctggagttctttcaccacaagtttgagatcctggatgccgtcgtggtggtggtctcattcatcctcgacattgtcctcctgttccaggagcaccagtttgaggctctgggcctgctgattctgctccggctgtggcgggtggcccggatcatcaatgggattatcatctcagttaagacacgttcagaacggcaactcttaaggttaaaacagatgaatgtacaattggccgccaagattcaacaccttgagttcagctgctctgagaaggaacaagaaattgaaagacttaacaaactattgcgacagcatggacttcttggtgaagtgaactagacccggaccagctcccctcaaaaagaagacactgtctcatgggcctgtgctgtcacgagaggaacagctgcccctcctgggccgcttggtgagaggtttggtttgatacctctgcctccctcctgccagcatggattctgggtggacacagccttgtggaaggtccagtaccaccaagagctgcccatccactcccaccccacactgtatcaaatgtatcacattttctcatgttgaacactttagccttaattgaaaatgagcaacaaagctggacaattgctagttgtatataaaatttaatctcaccgaatgtacagttttcaaatttcacgtgtatattaaggaactgatgcatctgagcattctgaaagaaagaaaaagaagctactttagctgccaccccattctagaaaagtctcttattttcaagctgttctaaatagcttcgtctcagtttccccaaaaggggtacccaggcccctcctctgtgtgccccagctgcatcagccagcttctaggtggctccattgttttctgccacctgacaacatttttcctcaattactgtacaactactgtataaaataaaacaactactgtataaaataaactctctcttttccctgga

SEQ ID NO: 14049 - DNA, 2189 bp, Homo sapiens
  source 1..2189: mol_type = unassigned DNA
ggtgaagaaaccaagacgcagagaggccaagccccttgccttgggtcacacagccaaaggaggcagagccagaactcacaaccaggtctgtgtcccctaagtcctcggatgcatcgtccctgccccgctgccctcccgggagattgtaggagagaagcaggggcagaggcagtgctggatgtcccgggagaaggctgcaatgagcaggcccagccatccctgaaggaggagccccggggaagcaaactcttccctagaaacactttaaaagcacccacctgttggagacagagatgctgaggaacaagagtgattggggccagggtaaacgccaagacagagaggggagagcagttcctcagtggaactccctccaacattgcccccaccacttttaccagtgctgggtgtgggggatcttgcaggctcagcttcgtgacttggcctgtctctgcctcagtttccgcatctgtcccatgaggttaagcatgtacctacctcgcaggattgctgagaagatgatataagatgcttggtgtacaggcttagcccctggcaccaggttactaccaaaagttcatggttccagtgcttcctccaccctccgtcctgcccctctgagagtacttctctgtcctgggcacctttaacttcaggttgttcagggctatctgagatctgcaggatttccggacagccccaccagcaactaggagctgcttgagtaagaccaagatccagaggcaacagggacatggccacctgggacgaaaaggcagtcacccgcagggccaaggtggctcccgctgagaggatgagcaagttcttaaggcacttcacggtcgtgggagacgactaccatgcctggaacatcaactacaagaaatgggagaatgaagaggaggaggaggaggaggagcagccaccacccacaccagtctcaggcgaggaaggcagagctgcagcccctgacgttgcccctgcccctggccccgcacccagggccccccttgacttcaggggcatgttgaggaaactgttcagctcccacaggtttcaggtcatcatcatctgcttggtggttctggatgccctcctggtgcttgctgagctcatcctggacctgaagatcatccagcccgacaagaataactatgctgccatggtattccactacatgagcatcaccatcttggtcttttttatgatggagatcatctttaaattatttgtcttccgcctggagttctttcaccacaagtttgagatcctggatgccgtcgtggtggtggtctcattcatcctcgacattgtcctcctgttccaggagcaccagtttgaggctctgggcctgctgattctgctccggctgtggcgggtggcccggatcatcaatgggattatcatctcagttaagacacgttcagaacggcaactcttaaggttaaaacagatgaatgtacaattggccgccaagattcaacaccttgagttcagctgctctgagaaggaacaagaaattgaaagacttaacaaactattgcgacagcatggacttcttggtgaagtgaactagacccggaccagctcccctcaaaaagaagacactgtctcatgggcctgtgctgtcacgagaggaacagctgcccctcctgggccgcttggtgagaggtttggtttgatacctctgcctccctcctgccagcatggattctgggtggacacagccttgtggaaggtccagtaccaccaagagctgcccatccactcccaccccacactgtatcaaatgtatcacattttctcatgttgaacactttagccttaattgaaaatgagcaacaaagctggacaattgctagttgtatataaaatttaatctcaccgaatgtacagttttcaaatttcacgtgtatattaaggaactgatgcatctgagcattctgaaagaaagaaaaagaagctactttagctgccaccccattctagaaaagtctcttattttcaagctgttctaaatagcttcgtctcagtttccccaaaaggggtacccaggcccctcctctgtgtgccccagctgcatcagccagcttctaggtggctccattgttttctgccacctgacaacatttttcctcaattactgtacaactactgtataaaataaaacaactactgtataaaataaa

SEQ ID NO: 14050 - DNA, 539 bp, Homo sapiens
  source 1..539: mol_type = unassigned DNA
gcttctttcccagcctgcctcctggaggtgaacatgtgcaggtggagaagtgcccactgcatcggggccaaaagagagaacgctgcctacctcaccccaacggcatttgaaagtagactggctcatctgaaatgcttatttgcaagcatctaacttcctgaccctgtgtcacagatggccccacttggccccaagcccctggtgaagaaaccaagacgcagagaggccaagccccttgccttgggtcacacagccaaaggaggcagagccagaactcacaaccagatccagaggcaacagggacatggccacctgggacgaaaaggcagtcacccgcagggccaaggtggctcccgctgagaggatgagcaagttcttaaggcacttcacggtcgtgggagacgactaccatgcctggaacatcaactacaagaaatgggagaatgaagaggaggaggaggaggaggagcagccaccacccacaccagtctcaggcgaggaaggcagagctgcagcccctgacgttgcccctgcccctg

SEQ ID NO: 14051 - DNA, 1810 bp, Homo sapiens
  source 1..1810: mol_type = unassigned DNA
aatcctcacattttgggagggaggccaaggcgggcagatcacctgaggttaggagttcaagatcagcctggccaacatggcgaaaccctgtctctattaaaaataccaaaattagctgggcatggtggcacgcgcctgtaataccagctactcaggaggctgaggcaggagagtcacttgaacccgggaggcggaggctgcagtgagtcgagatcgtgccactgcactccagcctgggcgacaagagcgagactctgtctcaaaaaaaaaagagtggttaacaagcatgatgatacaaccagttgaaagcaatatttgagttcataaagaagttgatgagttgataaaccaacaacacctaattggggaaagcataaggaagagagctgtgttgcaatcaaaaggttttttttttacttgaatgtaaataccaatcaagatacattgaaataaggacctgaaggtggcaagacagtagaaagcaggagtaagagtggaaatgaaagcagaaggtcctacagtgtaggggaagcaatggaagaacttctacctgatggacaaatatgggctaatatggatccagaagaacgaatgttggcagctgctacagcttttacccacatctgtgcagggcagggtgaaggagatgtcaggagagaagcccaatctatccaatatgatccctacagtaaagcttcagtagccccagggaagcgacctgctcttcctgtgcaactacagtacccacatgtagaaagtaatgtcccttcagaaacagtctctgaggcctcccaaagactccgaaagccagtgatgaagagaaaggtgctgcgcagaaagccagatggggaagtattagtaacagatgagtcgattatcagtgaatcagaatctggtacagaaaatgatcaggatctctgggacttaagacaaaggctgatgaatgtacagttccaggaagacaaggaatcttcatttgatgtttcacaaaaatttaacctaccacatgaataccaaggaatttctcaagatcagctcatttgctctctacaaagagaaggaatgggctctccagcttacgaacaagacctgattgttgccagcagacccaagtcctttattctcccaaagctggaccagttaagccgaaaccggggcaagacagaccgggtagcccggtattttgagtacaaacgggactgggactcaatacgtttacctggtgaagatcatagaaaggaattacgctggggtgtccgagagcagatgctttgtcgagcagaaccccaatccaaacctcagcatatatatgtcccaaacaattatctagtaccaacagagaagaaaaggtctgcactccgttggggtgttcgttgtgaccttgcaaatggtgtcatacccaggaagcttcccttccctctttctccttcttaaatctttttaaacttctttcacaggattgtttgagataacctagctctttatatcttcccttttaaatagaaacaactgtcttgagaagctcttcgaaacattttatggtaaggacttcacctatcattggtctttcctagctatatatcacattggtatcagatgatacttccaaattgccactcaaatccagcaattgcaagataaatcatatcagagaaagaacaacagacctggtctttctattttgtcaaattagtaagggccctttgtgtcctgtaactttttttacctatcaatatgagttgctgtgcttcagtgtgtgttttttaagttgctgggcattacacttaccaattaaagaattttggaaatt

SEQ ID NO: 14052 - DNA, 2061 bp, Homo sapiens
  source 1..2061: mol_type = unassigned DNA
gcagccacgggtcacgccagggccctgcacaccatgcagaggaaaggaagagctcagtgcgccagggtttcatacagccgctctctcaggccccaaggaaacgtctagagcgcacaggcggactcaccccagactgttcgaaccgtccctgagcgcccgccctcgtctcccggcaccactggccccgcagcagccagttgagaagggcggaggctgattccaatgaagtggcagaccgttaggcggcctctccaaaaagccagctatgtcgccgttagccaaggtttgagggtcttctccttctcttcgagggcccaacctcccctccagatttagtacaccagaggcgtcgcagcaacggctgctgcctgcgcgcctcagctaggcgggctcggatatttttaaggccacattggaaatcccgggcatgctcccgccggcggagaaggcccagacaaaatgtgcgccaatcaggatacagacttggaggacgtttaccctcaggaccaataagagggagggcggaccgggccaagggtgccggttcgctctccggatttaaacctcagcggtcggcggttaaccgcaggctcggcgcgtgggccggcagtgcgcctgcgcaagttacgcgaaagctaacagaatctgcggtgctctgctggcgactggcaggacgcggtgcagagagcggacttccgcgacgcgggttttttttttacttgaatgtaaataccaatcaagatacattgaaataagaaggtcctacagtgtaggggaagcaatggaagaacttctacctgatggacaaatatgggctaatatggatccagaagaacgaatgttggcagctgctacagcttttacccacatctgtgcagggcagggtgaaggagatgtcaggagagaagcccaatctatccaatatgatccctacagtaaagcttcagtagccccagggaagcgacctgctcttcctgtgcaactacagtacccacatgtagaaagtaatgtcccttcagaaacagtctctgaggcctcccaaagactccgaaagccagtgatgaagagaaaggtgctgcgcagaaagccagatggggaagtattagtaacagatgagtcgattatcagtgaatcagaatctggtacagaaaatgatcaggatctctgggacttaagacaaaggctgatgaatgtacagttccaggaagacaaggaatcttcatttgatgtttcacaaaaatttaacctaccacatgaataccaaggaatttctcaagatcagctcatttgctctctacaaagagaaggaatgggctctccagcttacgaacaagacctgattgttgccagcagacccaagtcctttattctcccaaagctggaccagttaagccgaaaccggggcaagacagaccgggtagcccggtattttgagtacaaacgggactgggactcaatacgtttacctggtgaagatcatagaaaggaattacgctggggtgtccgagagcagatgctttgtcgagcagaaccccaatccaaacctcagcatatatatgtcccaaacaattatctagtaccaacagagaagaaaaggtctgcactccgttggggtgttcgttgtgaccttgcaaatggtgtcatacccaggaagcttcccttccctctttctccttcttaaatctttttaaacttctttcacaggattgtttgagataacctagctctttatatcttcccttttaaatagaaacaactgtcttgagaagctcttcgaaacattttatggtaaggacttcacctatcattggtctttcctagctatatatcacattggtatcagatgatacttccaaattgccactcaaatccagcaattgcaagataaatcatatcagagaaagaacaacagacctggtctttctattttgtcaaattagtaagggccctttgtgtcctgtaactttttttacctatcaatatgagttgctgtgcttcagtgtgtgttttttaagttgctgggcattacacttaccaattaaagaattttggaaattcatg

SEQ ID NO: 14053 - DNA, 1803 bp, Homo sapiens
  source 1..1803: mol_type = unassigned DNA
ccggaagcggagggacgcggggacctggtggctgccggcccactgcggcgggagccctcgctccttttcccaccgtcgggacggtgcagagtggcagcttccctccgtggattccaggtcctgcctggcgagccgtccccaacgtctgcgttcctgagggaggcggccggggcagcgtgagctacaggcgatgtgcgcggcgggccgcagcccctggaggtcacggtgtgcgctggccgccgccgcggtctttgccccggtggcctttctgagctcctgggccgcgcccctgggaccaggcggaggccggggacggccccagggctggaggggagtcccgaaggccgctagcgacctgggtccaagccacgcccacggccaggcggggcgactgcgagctttgccgttgaaaggcggagcgtgtcttgtcgccttctagctgcaccttttgtggactgcagcatggaaccgtccaaggtgttttttttttacttgaatgtaaataccaatcaagatacattgaaataagaaggtcctacagtgtaggggaagcaatggaagaacttctacctgatggacaaatatgggctaatatggatccagaagaacgaatgttggcagctgctacagcttttacccacatctgtgcagggcagggtgaaggagatgtcaggagagaagcccaatctatccaatatgatccctacagtaaagcttcagtagccccagggaagcgacctgctcttcctgtgcaactacagtacccacatgtagaaagtaatgtcccttcagaaacagtctctgaggcctcccaaagactccgaaagccagtgatgaagagaaaggtgctgcgcagaaagccagatggggaagtattagtaacagatgagtcgattatcagtgaatcagaatctggtacagaaaatgatcaggatctctgggacttaagacaaaggctgatgaatgtacagttccaggaagacaaggaatcttcatttgatgtttcacaaaaatttaacctaccacatgaataccaaggaatttctcaagatcagctcatttgctctctacaaagagaaggaatgggctctccagcttacgaacaagacctgattgttgccagcagacccaagtcctttattctcccaaagctggaccagttaagccgaaaccggggcaagacagaccgggtagcccggtattttgagtacaaacgggactgggactcaatacgtttacctggtgaagatcatagaaaggaattacgctggggtgtccgagagcagatgctttgtcgagcagaaccccaatccaaacctcagcatatatatgtcccaaacaattatctagtaccaacagagaagaaaaggtctgcactccgttggggtgttcgttgtgaccttgcaaatggtgtcatacccaggaagcttcccttccctctttctccttcttaaatctttttaaacttctttcacaggattgtttgagataacctagctctttatatcttcccttttaaatagaaacaactgtcttgagaagctcttcgaaacattttatggtaaggacttcacctatcattggtctttcctagctatatatcacattggtatcagatgatacttccaaattgccactcaaatccagcaattgcaagataaatcatatcagagaaagaacaacagacctggtctttctattttgtcaaattagtaagggccctttgtgtcctgtaactttttttacctatcaatatgagttgctgtgcttcagtgtgtgttttttaagttgctgggcattaca

SEQ ID NO: 14054 - DNA, 1777 bp, Homo sapiens
  source 1..1777: mol_type = unassigned DNA
ttaaaaaaaaaaaaacaacgaactccatctgggatagcaataacctgtgaaaatgctcccccggctaatttgtatcaatgattatgaacaacatgctaaatcagtacttccaaagtctatatatgactattacaggtctggggcaaatgatgaagaaactttggctgataatattgcagcattttccagatggaagctgtatccaaggatgctccggaatgttgctgaaacagatctgtcgacttctgttttaggacagagggtcagcatgccaatatgtgtgggggctacggccatgcagcgcatggctcatgtggacggcgagcttgccactgtgagagcctgtcagtccctgggaacgggcatgatgttgagttcctgggccacctcctcaattgaagaagtggcggaagctggtcctgaggcacttcgttggctgcaactgtatatctacaaggaccgagaagtcaccaagaagctagtgcggcaggcagagaagatgggctacaaggccatatttgtgacagtggacacaccttacctgggcaaccgtctggatgatgtgcgtaacagattcaaactgccgccacaactcaggatgaaaaattttgaaaccagtactttatcattttctcctgaggaaaattttggagacgacagtggacttgctgcatatgtggctaaagcaatagacccatctatcagctgggaagatatcaaatggctgagaagactgacatcattgccaattgttgcaaagggcattttgagaggtgatgatgccagggaggctgttaaacatggcttgaatgggatcttggtgtcgaatcatggggctcgacaactcgatggggtgccagccactattgatgttctgccagaaattgtggaggctgtggaagggaaggtggaagtcttcctggacgggggtgtgcggaaaggcactgatgttctgaaagctctggctcttggcgccaaggctgtgtttgtggggagaccaatcgtttggggcttagctttccagggggagaaaggtgttcaagatgtcctcgagatactaaaggaagaattccggttggccatggctctgagtgggtgccagaatgtgaaagtcatcgacaagacattggtgaggaaaaatcctttggccgtttccaagatctgacagtgcacaatattttcccatctgtattattttttttcagcatgtattacttgacaaagagacactgtgcagagggtgaccacagtctgtaattccccacttcaatacaaagggtgtcgttcttttccaacaaaatagcaatcccttttatttcattgcttttgacttttcaatgggtgtcctaggaaccttttagaaagaaatggactttcatcctggaaatatattaactgttaaaaagaaaacattgaaaatgtgtttagacaacgtcatcccctggcaggctaaagtgctgtatcctttagtaaaattggaggtagcaaacactaaggtgaaaagataatgatctcattgtttattaacctgtattctgtttacatgtctttaaaacagtggttcttaaattgtaagctcaggttcaaagtgttggtaatgcctgattcacaactttgagaaggtagcactggagagaattggaatgggtggcggtaattggtgatacttctttgaatgtagatttccaatcacatctttagtgtctgaatatatccaaatgttttaggatgtatgttacttcttagagagaaataaagcatttttgggaagaatata

SEQ ID NO: 14055 - DNA, 1417 bp, Homo sapiens
  source 1..1417: mol_type = unassigned DNA
gccaggctttgagtggctgcgtctaaacacttctttccctgaggactggaagacattagaataaggtccagaaatgtccttggtgtgtttgacagactttcaggcccatgcgcgagagcagctgtctaagtcaactcgggattttattgaaggtggagcagatgacagcatcacgcgggatgacaacattgcagcatttaaaagaattcgcctccgtccgcggtacctgagagatgtgtctgaggtggacaccagaaccacaatccaaggggaggagatcagtgcccctatttgtatcgcacccacagggttccactgccttgtctggcctgatggggaaatgagcacagcaagagctgcccaagcggctggtatctgctacatcaccagcacatttgccagctgtagccttgaagacattgtcattgcagctcccgaaggcctccgatggttccaactctatgtgcatccagacctgcagctgaacaaacagttgatccagagggtagaatccctaggtttcaaagctttggtaataactttggatacacctgtatgtggcaacaggcgacatgacattcgaaaccagttgaggaggaacttaacactaacagatcttcaatcacctaaaaagggaaatgcaataccttatttccagatgactcctatcagcacttctctctgctggaatgatctctcctggtttcagagcataactcgattgcccatcatcctgaaagggattttgacaaaagaggatgcagagttagctgtgaagcacaatgtccagggtatcattgtttccaaccatggtgggaggcagcttgatgaggttcttgcttcaattgatgctttgacagaagtggtggctgctgtaaaggggaaaattgaagtctacctggatggcggggtccgaactggcaatgatgtgctgaaggctctggcccttggagctaagtgcatttttcttgggagaccaatcctatggggccttgcctgcaagggtgaacatggtgttaaggaagttttgaacattttaacaaatgagttccacacttccatggcccttacaggctgccggtcggtcgctgagatcaatcgaaacttggtccagttttccaggctgtaagaaaaaagggccaataaccagactgctgaggttgcccacaggaggatcacaaactcacagcacagtgtgtgatgctgtccttcctggaccccattctgtccggaggctcatggcccatatttcccacatttctaataccaccacccctgtgcttcaggccctccaaacccctgtgttccccaaatgttccatgcccttctttgtatcactgactattatatgttgctctcttgcctaaatcttcctctgaagtaaaagatctcaaaaggacagatcattaatgactgg

SEQ ID NO: 14056 - DNA, 1668 bp, Homo sapiens
  source 1..1668: mol_type = unassigned DNA
ggtgtgtttcctaacacctccggcagtgagccaggctttgagtggctgcgtctaaacacttctttccctgaggactggaagacattagaataagctccagacaattcaaacattgagattcctgggaactaccagatagtagcatcagttcaccaagaaatgaagctggtgaggcagtgaaaatccagggcctagaaagctgggaatgccatgacgtgggcacattgaaagacaagaggcaggcatgatcagccttgaactttaggaagatcccaggaagctgatggaagacaagatgtggagtgaatgtgaaggtccagaaatgtccttggtgtgtttgacagactttcaggcccatgcgcgagagcagctgtctaagtcaactcgggattttattgaaggtggagcagatgacagcatcacgcgggatgacaacattgcagcatttaaaagaattcgcctccgtccgcggtacctgagagatgtgtctgaggtggacaccagaaccacaatccaaggggaggagatcagtgcccctatttgtatcgcacccacagggttccactgccttgtctggcctgatggggaaatgagcacagcaagagctgcccaagcggctggtatctgctacatcaccagcacatttgccagctgtagccttgaagacattgtcattgcagctcccgaaggcctccgatggttccaactctatgtgcatccagacctgcagctgaacaaacagttgatccagagggtagaatccctaggtttcaaagctttggtaataactttggatacacctgtatgtggcaacaggcgacatgacattcgaaaccagttgaggaggaacttaacactaacagatcttcaatcacctaaaaagggaaatgcaataccttatttccagatgactcctatcagcacttctctctgctggaatgatctctcctggtttcagagcataactcgattgcccatcatcctgaaagggattttgacaaaagaggatgcagagttagctgtgaagcacaatgtccagggtatcattgtttccaaccatggtgggaggcagcttgatgaggttcttgcttcaattgatgctttgacagaagtggtggctgctgtaaaggggaaaattgaagtctacctggatggcggggtccgaactggcaatgatgtgctgaaggctctggcccttggagctaagtgcatttttcttgggagaccaatcctatggggccttgcctgcaagggtgaacatggtgttaaggaagttttgaacattttaacaaatgagttccacacttccatggcccttacaggctgccggtcggtcgctgagatcaatcgaaacttggtccagttttccaggctgtaagaaaaaagggccaataaccagactgctgaggttgcccacaggaggatcacaaactcacagcacagtgtgtgatgctgtccttcctggaccccattctgtccggaggctcatggcccatatttcccacatttctaataccaccacccctgtgcttcaggccctccaaacccctgtgttccccaaatgttccatgcccttctttgtatcactgactattatatgttgctctcttgcctaaatcttcctctgaagtaaaagatctcaaaaggacagatcattaatgactggaa

SEQ ID NO: 14057 - DNA, 691 bp, Homo sapiens
  source 1..691: mol_type = unassigned DNA
ttctttagcctgaactgtgggtagtgatgtggtgtgtttcctaacacctccggcagtgagccaggctttgagtggctgcgtctaaacacttctttccctgaggactggaagacattagaataaggtccagaaatgtccttggtgtgtttgacagactttcaggcccatgcgcgagagcagctgtctaagtcaactcgggattttattgaaggtggagcagatgacagcatcacgcgggatgacaacattgcagcatttaaaagaattcgcctccgtccgcggtacctgagagatgtgtctgaggtggacaccagaaccacaatccaaggggaggagatcagtgcccctatttgtatcgcacccacagggttccactgccttgtctggcctgatggggaaatgagcacagcaagagctcccgaaggcctccgatggttccaactctatgtgcatccagacctgcagctgaacaaacagttgatccagagggtagaatccctaggtttcaaagctttggtaataactttggatacacctgtatgtggcaacaggcgacatgacattcgaaaccagttgaggaggaacttaacactaacagatcttcaatcacctaaaaagggaaatgcaataccttatttccagatgactcctatcagcacttctctctgctggaatgatctctcctggtttc

SEQ ID NO: 14058 - DNA, 3037 bp, Homo sapiens
  source 1..3037: mol_type = unassigned DNA
cggccactcggcatctgggttttagtcaggcagtgctccaggcgcctggctgccaggctacgggagaaaagtcctccgctcggccgcacccgttagaggcgctctccactgctgtcctcttcagctcaagatggtggcctgccgggcgattggcatcctcagccgcttttctgccttcaggatcctccgctcccgaggttatatatgccgcaattttacagggtcttctgctttgctgaccagaacccatattaactatggagtcaaaggggatgtggcagttgttcgaattaactctcccaattcaaaggtaaatacactgagtaaagagctacattcagagttctcagaagttatgaatgaaatctgggctagtgatcaaatcagaagtgccgtccttatctcatcaaagccaggctgctttattgcaggtgctgatatcaacatgttagccgcttgcaagacccttcaagaagtaacacagctatcacaagaagcacagagaatagttgagaaacttgaaaagtccacaaagcctattgtggctgccatcaatggatcctgcctgggaggaggacttgaggttgccatttcatgccaatacagaatagcaacaaaagacagaaaaacagtattaggtacccctgaagttttgctgggggccttaccaggagcaggaggcacacaaaggctgcccaaaatggtgggtgtgcctgctgctttggacatgatgctgactggtagaagcattcgtgcagacagggcaaagaaaatgggactggttgaccaactggtggaacccctgggaccaggactaaaacctccagaggaacggacaatagaatacctagaagaagttgcaattacttttgccaaaggactagctgataagaagatctctccaaagagagacaagggattggtggaaaaattgacagcgtatgccatgactattccatttgtcaggcaacaggtttacaaaaaagtggaagaaaaagtgcgaaagcagactaaaggcctttatcctgcacctctgaaaataattgatgtggtaaagactggaattgagcaagggagtgatgccggttatctctgtgaatctcagaaatttggagagcttgtaatgaccaaagaatcaaaggccttgatgggactctaccatggtcaggtcctgtgcaagaagaataaatttggagctccacagaaggatgttaagcatctggctattcttggtgcagggctgatgggagcaggcatcgcccaagtctccgtggataaggggctaaagactatacttaaagatgccaccctcactgcgctagaccgaggacagcaacaagtgttcaaaggattgaatgacaaagtgaagaagaaagctctaacatcatttgaaagggattccatcttcagcaacttgactgggcagcttgattaccaaggttttgaaaaggccgacatggtgattgaagctgtgtttgaggaccttagtcttaagcacagagtgctaaaggaagtagaagcggtgattccagatcactgtatctttgccagtaacacatctgctctcccaatcagtgaaatcgctgctgtcagcaaaagacctgagaaggtgattggcatgcactacttctctcccgtggacaagatgcagctgctggagattatcacgaccgagaaaacttccaaagacaccagtgcttcagctgtagcagttggtctcaagcaggggaaggtcatcattgtggttaaggatggacctggcttctatactaccaggtgtcttgcgcccatgatgtctgaagtcatccgaatcctccaggaaggagttgacccgaagaagctggattccctgaccacaagctttggctttcctgtgggtgccgccacactggtggatgaagttggtgtggatgtagcgaaacatgtggcggaagatctgggcaaagtctttggggagcggtttggaggtggaaacccagaactgctgacacagatggtgtccaagggcttcctaggtcgtaaatctgggaagggcttttacatctatcaggagggtgtgaagaggaaggatttgaattctgacatggatagtattttagcgagtctgaagctgcctcctaagtctgaagtctcatcagacgaagacatccagttccgcctggtgacaagatttgtgaatgaggcagtcatgtgcctgcaagaggggatcttggccacacctgcagagggagacatcggagccgtctttgggcttggcttcccgccttgtctgggagggcctttccgctttgtggatctgtatggcgcccagaagatagtggaccggctcaagaaatatgaagctgcctatggaaaacagttcaccccatgccagctgctagctgaccatgctaacagccctaacaagaagttctaccagtgagcaggcctcatgcctcgctcagtcagtgcactaaccccagctgccggcagtgctggttctccaacagagtggtgtctagatttatcagagtaacgagaagacaaactccggcactgggtttgctccctgattaaagtgccttcagccaagaccatctctccctcctggtgaagtgtgacttcgaattagtttgcacttcctgttggaaggtagagcccactgctcattgtataagccccgaggcctagagtggcagccaagagccatctgaagccacctctctgcctgttcctcccaagaggccagggtggccaggggtggtgagggcagttctgcacccagccaaacacataacaataaaaaccaaactctgtgtcagcatctttgcccttctggtttaaacgcctccttcaaaaagcaatctggaagaaagccctgtgctttgggggagtaagaatgtgtgtgcagaattctaggcagcaccttagggagggactgggatgagagaaagtgggacctggtgggctcaaccacacacacctgtctgtgcagatgctttgcccaggcttctcaccacggtgtaccgggatattaaacctctttccccagcctgga

SEQ ID NO: 14059 - DNA, 1485 bp, Homo sapiens
  source 1..1485: mol_type = unassigned DNA
ttcagctcaagatggtggcctgccgggcgattggcatcctcagccgcttttctgccttcaggatcctccgctcccgaggttatatatgccgcaattttacagggtcttctgctttgctgaccagaacccatattaactatggagtcaaaggggatgtggcagttgttcgaattaactctcccaattcaaagcatgttagccgcttgcaagacccttcaagaagtaacacagctatcacaagaagcacagagaatagttgagaaacttgaaaagtccacaaagcctattgtggctgccatcaatggatcctgcctgggaggaggacttgaggttgccatttcatgccaatacagaatagcaacaaaagacagaaaaacagtattaggtacccctgaagttttgctgggggccttaccaggagcaggaggcacacaaaggctgcccaaaatggtgggtgtgcctgctgctttggacatgatgctgactggtagaagcattcgtgcagacagggcaaagaaaatgggactggttgaccaactggtggaacccctgggaccaggactaaaacctccagaggaacggacaatagaatacctagaagaagttgcaattacttttgccaaaggactagctgataagaagatctctccaaagagagacaagggattggtggaaaaattgacagcgtatgccatgactattccatttgtcaggcaacaggtttacaaaaaagtggaagaaaaagtgcgaaagcagactaaaggcctttatcctgcacctctgaaaataattgatgtggtaaagactggaattgagcaagggagtgatgccggttatctctgtgaatctcaggtaaacttatttcctttcaatgttttattatcagttaaaggaaaactaaagatccaatcctctgtataaagctgaaaaaggaaaaaaatatccaaagcctagtaaaaatttttttcttccagtgcttatcatctcttatgattaatctcagtgagcaagtggatgctaagaataccctaatggggccaggcgtggtggtttacccctgtaatcccaacattctgggaggccgaggtgggcagatcgtttgagctcaggagttcaagaccagcatgtgcaacatggcaaaaccccatctttacaaaaactacaaaagttagccaggcatggtggcatgcacccacagtcccagctacttgcagggctgaggcaggagaattgtttgagtccaggaggtcagggctgcagtgagctaagtaagatcgcaccactgcattccagcctgggtgacaaagtgagaccctgtctccaaaaaaaaagaaaaaaaagaaaaaaccctatggtctgcagatgtttgaacttacttttagtaataaggttgtctctacgaagggcaggaacagagttctaatcctttcaaaacaagtcacttgggtgttttttgttccgcacttgggcaggttttattgagac

SEQ ID NO: 14060 - DNA, 2044 bp, Homo sapiens
  source 1..2044: mol_type = unassigned DNA
cctttctgggcaggacccgccccttggtcccgcagagccttggtacttggacctgaaccttgctccgagagggagtcctcgcggacgtcagccaagattccagaatgactatcttgacttacccctttaaaaatcttcccactgcatcaaaatgggccctcagattttccataagacctctgagctgttcctcccagctacgagctgccccagctgtccagaccaaaacgaagaagacgttagccaaacccaatataaggaatgttgtggtggtggatggtgttcgcactccatttttgctgtctggcacttcatataaagacctgatgccacatgatttggctagagcagcgcttacgggtttgttgcatcggaccagtgtccctaaggaagtagttgattatatcatctttggtacagttattcaggaagtgaaaacaagcaatgtggctagagaggctgcccttggagctggcttctctgacaagactcctgctcacactgtcaccatggcttgtatctctgccaaccaagccatgaccacaggtgttggcttgattgcttctggccagtgtgatgtgatcgtggcaggtggtgttgagttgatgtccgatgtccctattcgtcactcaaggaaaatgagaaaactgatgcttgatctcaataaggccaaatctatgggccagcgactgtctttaatctctaaattccgatttaatttcctagcacctgagctccctgcggtttctgagttctccaccagtgagaccatgggccactctgcagaccgactggccgctgcctttgctgtttctcggctggaacaggatgaatatgcactgcgctctcacagtctagccaagaaggcacaggatgaaggactcctttctgatgtggtacccttcaaagtaccaggaaaagatacagttaccaaagataatggcatccgtccttcctcactggagcagatggccaaactaaaacctgcattcatcaagccctacggcacagtgacagctgcaaattcttctttcttgactgatggtgcatctgcaatgttaatcatggcggaggaaaaggctctggccatgggttataagccgaaggcatatttgagggattttatgtatgtgtctcaggatccaaaagatcaactattacttggaccaacatatgctactccaaaagttctagaaaaggcaggattgaccatgaatgatattgatgcttttgaatttcatgaagctttctcgggtcagattttggcaaattttaaagccatggattctgattggtttgcagaaaactacatgggtagaaaaaccaaggttggattgcctcctttggagaagtttaataactggggtggatctctgtccctgggacacccatttggagccactggctgcaggttggtcatggctgctgccaacagattacggaaagaaggaggccagtatggcttagtggctgcgtgtgcagctggagggcagggccatgctatgatagtggaagcttatccaaaataatagatccagaagaagtgacctgaagtttctgtgcaacactcacactaggcaatgccatttcaatgcattactaaatgacatttgtagttcctagctcctcttaggaaaacagttcttgtggccttctattaaatagtttgcacttaagccttgccagtgttctgagcttttcaataatcagtttactgctctttcagggatttctaagccaccagaatctcacatgagatgtgtgggtggttgtttttggtctctgttgtcactaaagactaaatgagggtttgcagttgggaaagaggtcaactgagatttggaaatcatctttgtaatatttgcaaattatacttgttcttatctgtgtcctaaagatgtgttctctataaaatacaaaccaacgtgcctaattaattatggaaaaataattcagaatctaaacaccactgaaaacttataaaaaatgtttagatacataaatatggtggtcagcgttaataaagtggagaaatattggagaa

SEQ ID NO: 14061 - DNA, 574 bp, Homo sapiens
  source 1..574: mol_type = unassigned DNA
ctcggacaaggtcggcagtgctagctgcagttaggacagtgacttggactagcgttccagctgaagttcgggacagtagtgtcacctgcgccctaatttatcatcacaagttaacgaagtctgggggtgtgggggtgtgtgtgtgtgtgtgggtgtgtgtgggcgtgtgtgggcgtcggccttaatgtaaccctggtctgcgtagaagtgtgtgttgtttcgcctgcttcccctgtacccaggtcggcggctatagagattgtggacggcgccatgggtttgcccgatttctgctgtaaagaataagactagattccagaatgactatcttgacttacccctttaaaaatcttcccactgcatcaaaatgggccctcagattttccataagacctctgagctgttcctcccagctacgagctgccccagctgtccagaccaaaacgaagaagacgttagccaaacccaatataaggaatgttgtggtggtggatggtgttcgcactccatttttgctgtctggcacttcatataaagacctgatgccacatgatttggctagagcagcgcttac

SEQ ID NO: 14062 - DNA, 696 bp, Homo sapiens
  source 1..696: mol_type = unassigned DNA
acgtcagccaaggtgagacggcgagccctcagctctccgcccgggctttcccaaaggcgagattccacttccttccccgcaactgtcgccggtgcccccggccccctcccctccctgggaaagtgggagttgagggagcggaaggaaactcctcggacaagattccagaatgactatcttgacttacccctttaaaaatcttcccactgcatcaaaatgggccctcagattttccataagacctctgagctgttcctcccagctacgagctgccccagctgtccagaccaaaacgaagaagacgttagccaaacccaatataaggaatgttgtggtggtggatggtgttcgcactccatttttgctgtctggcacttcatataaagacctgatgccacatgatttggctagagcagcgcttacgggtttgttgcatcggaccagtgtccctaaggaagtagttgattatatcatctttggtacagttattcaggaagtgaaaacaagcaatgtggctagagaggctgcccttggagctggcttctctgacaagactcctgctcacactgtcaccatggcttgtatctctgccaaccaagccatgaccacaggtgttggcttgattgcttctggccagtgtgatgtgatcgtggcaggtggtgttgagttgatgtccgatgtccctattcgtcactc

SEQ ID NO: 14063 - DNA, 557 bp, Homo sapiens
  source 1..557: mol_type = unassigned DNA
aaagtaacacagctagtgactagaaccacgtgccctggctaccacttccgagtgacatcagctgccgatccataagaaataccttcaaaccaatgcagggattccagaatgactatcttgacttacccctttaaaaatcttcccactgcatcaaaatgggccctcagattttccataagacctctgagctgttcctcccagctacgagctgccccagctgtccagaccaaaacgaagaagacgttagccaaacccaatataaggaatgttgtggtggtggatggtgttcgcactccatttttgctgtctggcacttcatataaagacctgatgccacatgatttggctagagcagcgcttacgggtttgttgcatcggaccagtgtccctaaggaagtagttgattatatcatctttggtacagttattcaggaagtgaaaacaagcaatgtggctagagaggctgcccttggagctggcttctctgacaagactcctgctcacactgtcaccatggcttgtatctctgccaaccaagccatgaccacaggtgttgg

SEQ ID NO: 14064 - DNA, 1519 bp, Homo sapiens
  source 1..1519: mol_type = unassigned DNA
gaaccttgctccgagagggagtcctcgcggacgtcagccaagattccagaatgactatcttgacttacccctttaaaaatcttcccactgcatcaaaatgggccctcagattttccataagacctctgagctgttcctcccagctacgagctgccccagctgtccagaccaaaacgaagaagacgttagccaaacccaatataaggaatgttgtggtggtggatggtgttcgcactccatttttgctgtctggcacttcgggtttgttgcatcggaccagtgtccctaaggaagtagttgattatatcatctttggtacagttattcaggaagtgaaaacaagcaatgtggctagagaggctgcccttggagctggcttctctgacaagactcctgctcacactgtcaccatggcttgtatctctgccaaccaagccatgaccacaggtgttggcttgattgcttctggccagtgtgatgtgatcgtggcaggtggtgttgagttgatgtccgatgtccctattcgtcactcaaggaaaatgagaaaactgatgcttgatctcaataaggccaaatctatgggccagcgactgtctttaatctctaaattccgatttaatttcctagcacctgagctccctgcggtttctgagttctccaccagtgagaccatgggccactctgcagaccgactggccgctgcctttgctgtttctcggctggaacaggatgaatatgcactgcgctctcacagtctagccaagaaggcacaggatgaaggactcctttctgatgtggtacccttcaaagtaccaggaaaagatacagttaccaaagataatggcatccgtccttcctcactggagcagatggccaaactaaaacctgcattcatcaagccctacggcacagtgacagctgcaaattcttctttcttgactgatggtgcatctgcaatgttaatcatggcggaggaaaaggctctggccatgggttataagccgaaggcatatttgagggattttatgtatgtgtctcaggatccaaaagatcaactattacttggaccaacatatgctactccaaaagttctagaaaaggcaggattgaccatgaatgatattgatgcttttgaatttcatgaagctttctcgggtcagattttggcaaattttaaagccatggattctgattggtttgcagaaaactacatgggtagaaaaaccaaggttggattgcctcctttggagaagtttaataactggggtggatctctgtccctgggacacccatttggagccactggctgcaggttggtcatggctgctgccaacagattacggaaagaaggaggccagtatggcttagtggctgcgtgtgcagctggagggcagggccatgctatgatagtggaagcttatccaaaataatagatccagaagaagtgacctgaagtttctgtgcaacactcacactaggcaatgccatttcaatgcattactaaatgacatttgtagtt

SEQ ID NO: 14065 - DNA, 1895 bp, Homo sapiens
  source 1..1895: mol_type = unassigned DNA
agagggagtcctcgcggacgtcagccaagattccagaatgactatcttgacttacccctttaaaaatcttcccactgcatcaaaatgggccctcagattttccataagacctctgagctgttcctcccagctacgagctgccccagagagagaatctgaccaacacagttgatcacttgtaggtagatgacactggtttctggttggctcctatatggatggatcattgctgtccagaccaaaacgaagaagacgttagccaaacccaatataaggaatgttgtggtggtggatggtgttcgcactccatttttgctgtctggcacttcatataaagacctgatgccacatgatttggctagagcagcgcttacgggtttgttgcatcggaccagtgtccctaaggaagtagttgattatatcatctttggtacagttattcaggaagtgaaaacaagcaatgtggctagagaggctgcccttggagctggcttctctgacaagactcctgctcacactgtcaccatggcttgtatctctgccaaccaagccatgaccacaggtgttggcttgattgcttctggccagtgtgatgtgatcgtggcaggtggtgttgagttgatgtccgatgtccctattcgtcactcaaggaaaatgagaaaactgatgcttgatctcaataaggccaaatctatgggccagcgactgtctttaatctctaaattccgatttaatttcctagcacctgagctccctgcggtttctgagttctccaccagtgagaccatgggccactctgcagaccgactggccgctgcctttgctgtttctcggctggaacaggatgaatatgcactgcgctctcacagtctagccaagaaggcacaggatgaaggactcctttctgatgtggtacccttcaaagtaccaggaaaagatacagttaccaaagataatggcatccgtccttcctcactggagcagatggccaaactaaaacctgcattcatcaagccctacggcacagtgacagctgcaaattcttctttcttgactgatggtgcatctgcaatgttaatcatggcggaggaaaaggctctggccatgggttataagccgaaggcatatttgagggattttatgtatgtgtctcaggatccaaaagatcaactattacttggaccaacatatgctactccaaaagttctagaaaaggcaggattgaccatgaatgatattgatgcttttgaatttcatgaagctttctcgggtcagattttggcaaattttaaagccatggattctgattggtttgcagaaaactacatgggtagaaaaaccaaggttggattgcctcctttggagaagtttaataactggggtggatctctgtccctgggacacccatttggagccactggctgcaggttggtcatggctgctgccaacagattacggaaagaaggaggccagtatggcttagtggctgcgtgtgcagctggagggcagggccatgctatgatagtggaagcttatccaaaataatagatccagaagaagtgacctgaagtttctgtgcaacactcacactaggcaatgccatttcaatgcattactaaatgacatttgtagttcctagctcctcttaggaaaacagttcttgtggccttctattaaatagtttgcacttaagccttgccagtgttctgagcttttcaataatcagtttactgctctttcagggatttctaagccaccagaatctcacatgagatgtgtgggtggttgtttttggtctctgttgtcactaaagactaaatgagggtttgcagttgggaaagaggtcaactgagatttggaaatcatctttgtaatatttgcaaattatacttgtt

SEQ ID NO: 14066 - DNA, 1257 bp, Homo sapiens
  source 1..1257: mol_type = unassigned DNA
gacgccggtgttttgcagtcctgggcagctcggcagtccagcccggcccgggtcatggtggtgggccgagggctgctcggccgccgcagcctcgccgcgctgggagccgcctgcgcccgccgaggcctcggtgcctaaggccgcgctgccgggctcgagcggaggcggcgcaggcgctgaggctggcgcggagcgggcgcggggccgcgggtgcggaaagcgctaggtccagccctgctgggagttttctgccacacagatttgcggaagaacctgaccgtggacgagggcaccatgaaggtagaggtgctgcctgccctgaccgacaactacatgtacctggtcattgatgatgagaccaaggaggctgccattgtggatccggtgcagccccagaaggtcgtggacgcggcgagaaagcacggggtgaaactgaccacagtgctcaccacccaccaccactgggaccatgctggcgggaatgagaaactggtcaagctggagtcgggactgaaggtgtacgggggtgacgaccgtatcggggccctgactcacaagatcactcacctgtccacactgcaggtggggtctctgaacgtcaagtgcctggcgaccccgtgccacacttcaggacacatttgttacttcgtgagcaagcccggaggctcggagccccctgccgtgttcacaggtgacaccttgtttgtggctggctgcgggaagttctatgaagggactgcggatgagatgtgtaaagctctgctggaggtcttgggccggctccccccggacacaagagtctactgtggccacgagtacaccatcaacaacctcaagtttgcacgccacgtggagcccggcaatgccgccatccgggagaagctggcctgggccaaggagaagtacagcatcggggagcccacagtgccatccaccctggcagaggagtttacctacaaccccttcatgagagtgagggagaagacggtgcagcagcacgcaggtgagacggacccggtgaccaccatgcgggccgtgcgcagggagaaggaccagttcaagatgccccgggactgaggccgccctgcaccttcagcggatttggggattaggctcttttaggtaactggctttcctgctggtccgtgcgggaaattcagtcttgatttaaccttaattttacagcccttggcttgtgttatcggacattctaatgcatatttataagagaagtttaacaagtatttattcccataa

SEQ ID NO: 14067 - DNA, 1481 bp, Homo sapiens
  source 1..1481: mol_type = unassigned DNA
ctgcctcggaacgctgtcccccgcagcgacggcccgttccacctcgcgatctgccgggtacccgggcggcgtggcgctcggcctccagggatccactgtgcggtgccaaaaaagaggcggaggctcgcggcacagctctcccggcgcagctctcgggccgccgccgccgctcccaggcccgtctcccggcccgtggcagtcggggctcgcggacaaaacaagttgagcgcgagcgcgttgattggttggcggacggtgcgaggtggacgctgattggctgagggcagcgcgaggcgggcgctgattggctgcgacgcgccgacgccggtgttttgcagtcctgggcagctcggcagtccagcccggcccgggtcatggtggtgggccgagggctgctcggccgccgcagcctcgccgcgctgggagccgcctgcgcccgccgaggcctcggtccagccctgctgggagttttctgccacacagatttgcggaagaacctgaccgtggacgagggcaccatgaaggtagaggtgctgcctgccctgaccgacaactacatgtacctggtcattgatgatgagaccaaggaggctgccattgtggatccggtgcagccccagaaggtcgtggacgcggcgagaaagcacggggtgaaactgaccacagtgctcaccacccaccaccactgggaccatgctggcgggaatgagaaactggtcaagctggagtcgggactgaaggtgtacgggggtgacgaccgtatcggggccctgactcacaagatcactcacctgtccacactgcaggtggggtctctgaacgtcaagtgcctggcgaccccgtgccacacttcaggacacatttgttacttcgtgagcaagcccggaggctcggagccccctgccgtgttcacaggtgacaccttgtttgtggctggctgcgggaagttctatgaagggactgcggatgagatgtgtaaagctctgctggaggtcttgggccggctccccccggacacaagagtctactgtggccacgagtacaccatcaacaacctcaagtttgcacgccacgtggagcccggcaatgccgccatccgggagaagctggcctgggccaaggagaagtacagcatcggggagcccacagtgccatccaccctggcagaggagtttacctacaaccccttcatgagagtgagggagaagacggtgcagcagcacgcaggtgagacggacccggtgaccaccatgcgggccgtgcgcagggagaaggaccagttcaagatgccccgggactgaggccgccctgcaccttcagcggatttggggattaggctcttttaggtaactggctttcctgctggtccgtgcgggaaattcagtcttgatttaaccttaattttacagcccttggcttgtgttatcggacattctaatgcatatttataagagaagtttaacaagtatttattcccataa

SEQ ID NO: 14068 - DNA, 1276 bp, Homo sapiens
  source 1..1276: mol_type = unassigned DNA
gtgttttgcagtcctgggcagctcggcagtccagcccggcccgggtcatggtggtgggccgagggctgctcggccgccgcagcctcgccgcgctgggagccgcctgcgcccgccgaggcctcggtccagccctgctgggagttttctgccacacagatttgcggaagaacctgaccgtggacgagggcaccatgaaggtagaggtgctgcctgccctgaccgacaactacatgtacctggtcattgatgatgagaccaaggaggctgccattgtggatccggtgcagccccagaaggtcgtggacgcggcgagaaagcacggggtgaaactgaccacagtgctcaccacccaccaccactgggaccatgctggcgggaatgagaaactggtcaagctggagtcgggactgaaggtgtacgggggtgacgaccgtatcggggccctgactcacaagatcactcacctgtccacactgcaggtgacaccttgtttgtggctggctgcgggaagttctatgaagggactgcggatgagatgtgtaaagctctgctggaggtcttgggccggctccccccggacacaagagtctactgtggccacgagtacaccatcaacaacctcaagtttgcacgccacgtggagcccggcaatgccgccatccgggagaagctggcctgggccaaggagaagtacagcatcggggagcccacagtgccatccaccctggcagaggagtttacctacaaccccttcatgagagtgagggagaagacggtgcagcagcacgcaggtgagacggacccggtgaccaccatgcgggccgtgcgcagggagaaggaccagttcaagatgccccgggactgaggccgccctgcaccttcagcggatttggggattaggctcttttaggtaactggctttcctgctggtccgtgcgggaaattcagtcttgatttaaccttaattttacagcccttggcttgtgttatcggacattctaatgcatatttataagagaagtttaacaagtatttattcccataacttccccttgcagactgttttcttctggcctttaggcctctgcttgtcccctcgggcctccttcctcctccgtgagccactgcagtccccccacccacgcttcaggtcaggcgtgagccggtgcctttgctgtggccttggctgggtgctgatgggactgtcaggcccactgctgcggtcggtacctttgcagcctgtgcttgtggtctgatctgctcaggcccccggcag

SEQ ID NO: 14069 - DNA, 1680 bp, Homo sapiens
  source 1..1680: mol_type = unassigned DNA
aggaaatgaggtgagaagtacgtccactcttctgtccagcttttaacaatctaactaatgccctctccagggtcaccctagaatcagatctgctccccagcatcttctgtttcctggtgagtgattcctgctactttggatggccatgacgggctggagctgccttgtgacaggagcaggagggtttctgggacagaggatcatccgcctcttggtgaaggagaaggagctgaaggagatcagggtcttggacaaggccttcggaccagaattgagagaggaattttctaaactccagaacaagaccaagctgacagtgctggaaggagacattctggatgagccattcctgaagagagcctgccaggacgtctcggtcatcatccacaccgcctgtatcattgatgtcttcggtgtcactcacagagagtctatcatgaatgtcaatgtgaaaggtacccagctcctgttagaggcctgtgtccaagctagtgtgccagtcttcatctacaccagtagcatagaggtagccgggcccaactcctacaaggaaatcatccagaatggccatgaagaagagcctctggaaaacacatggcccgctccatacccacacagcaaaaagcttgctgagaaggctgtactggcggctaacgggtggaatctgaaaaacggcggcaccctgtacacttgtgccttacgacccatgtatatctatggggaaggaagccgattcctttctgctagtataaacgaggccctgaacaacaatgggatcctgtcaagtgttggaaagttctccactgttaacccagtctatgttggcaatgtggcctgggcccacattctggccttgagggccctgcaggaccccaagaaggccccaagcatccgaggacagttctactatatctcagatgacacgcctcaccaaagctatgataaccttaattacaccctgagcaaagagttcggcctccgccttgattccagatggagctttcctttatccctgatgtattggattggcttcctgctggaaatagtgagcttcctactcaggccaatttacacctatcgaccgcccttcaaccgccacatagtcacattgtcaaatagcgtattcaccttctcttataagaaggctcagcgagatctggcgtataagccactctacagctgggaggaagccaagcagaaaacggtggagtgggttggttcccttgtggaccggcacaaggagaccctgaagtccaagactcagtgatttaaggatgacagagatgtgcatgtgggtattgttaggagatgtcatcaagctccaccctcctggcctcatacagaaagtgacaagggcacaagctcaggtcctgctgcctccctttcatacaatggccaacttattgtattcctcatgtcatcaaaacctgcgcagtcattggcccaacaagaaggtttctgtcctaatcatataccagaggaaagaccatgtggtttgctgttaccaaatctcagtagctgattctgaacaatttagggactcttttaacttgagggtcgttttgactactagagctccatttctactcttaaatgagaaaggatttcctttctttttaatcttccattccttcacatagtttgataaaaagatcaataaatgtttgaatgtttaatgtg

SEQ ID NO: 14070 - DNA, 1676 bp, Homo sapiens
  source 1..1676: mol_type = unassigned DNA
aggaaatgaggtgagaagtacgtccactcttctgtccagcttttaacaatctaactaatgccctctccagggtcaccctagaatcagatctgctccccagcatcttctgtttcctggtgagtgattcctgctactttggatggccatgacgggctggagctgccttgtgacaggagcaggagggtttctgggacagaggatcatccgcctcttggtgaaggagaaggagctgaaggagatcagggtcttggacaaggccttcggaccagaattgagagaggaattttctaaactccagaacaagaccaagctgacagtgctggaaggagacattctggatgagccattcctgaagagagcctgccaggacgtctcggtcatcatccacaccgcctgtatcattgatgtcttcggtgtcactcacagagagtctatcatgaatgtcaatgtgaaaggtacccagctcctgttagaggcctgtgtccaagctagtgtgccagtcttcatctacaccagtagcatagaggtagccgggcccaactcctacaaggaaatcatccagaatggccatgaagaagagcctctggaaaacacatggcccgctccatacccacacagcaaaaagcttgctgagaaggctgtactggcggctaacgggtggaatctgaaaaacggcggcaccctgtacacttgtgccttacgacccatgtatatctatggggaaggaagccgattcctttctgctagtataaacgaggccctgaacaacaatgggatcctgtcaagtgttggaaagttctccactgttaacccagtctatgttggcaatgtggcctgggcccacattctggccttgagggccctgcaggaccccaagaaggccccaagcatccgaggacagttctactatatctcagatgacacgcctcaccaaagctatgataaccttaattacaccctgagcaaagagttcggcctccgccttgattccagatggagctttcctttatccctgatgtattggattggcttcctgctggaaatagtgagcttcctactcaggccaatttacacctatcgaccgcccttcaaccgccacatagtcacattgtcaaatagcgtattcaccttctcttataagaaggctcagcgagatctggcgtataagccactctacagctgggaggaagccaagcagaaaacggtggagtgggttggttcccttgtggaccggcacaaggagaccctgaagtccaagactcagtgatttaaggatgacagagatgtgcatgtgggtattgttaggagatgtcatcaagctccaccctcctggcctcatacagaaagtgacaagggcacaagctcaggtcctgctgcctccctttcatacaatggccaacttattgtattcctcatgtcatcaaaacctgcgcagtcattggcccaacaagaaggtttctgtcctaatcatataccagaggaaagaccatgtggtttgctgttaccaaatctcagtagctgattctgaacaatttagggactcttttaacttgagggtcgttttgactactagagctccatttctactcttaaatgagaaaggatttcctttctttttaatcttccattccttcacatagtttgataaaaagatcaataaatgtttgaatgtttaa

SEQ ID NO: 14071 - DNA, 1436 bp, Homo sapiens
  source 1..1436: mol_type = unassigned DNA
gtttgcaaaaaaaatggggtggaggaaaatgaggcatctgtgtgagtatataaccatttgacatctctttttagccctctccagggtcaccctagaatcagatctgctccccagcatcttctgtttcctggtgagtgattcctgctactttggatggccatgacgggctggagctgccttgtgacaggagcaggagggtttctgggacagaggatcatccgcctcttggtgaaggagaaggagctgaaggagatcagggtcttggacaaggccttcggaccagaattgagagaggaattttctaaactccagaacaagaccaagctgacagtgctggaaggagacattctggatgagccattcctgaagagagcctgccaggacgtctcggtcatcatccacaccgcctgtatcattgatgtcttcggtgtcactcacagagagtctatcatgaatgtcaatgtgaaaggtacccagctcctgttagaggcctgtgtccaagctagtgtgccagtcttcatctacaccagtagcatagaggtagccgggcccaactcctacaaggaaatcatccagaatggccatgaagaagagcctctggaaaacacatggcccgctccatacccacacagcaaaaagcttgctgagaaggctgtactggcggctaacgggtggaatctgaaaaacggcggcaccctgtacacttgtgccttacgacccatgtatatctatggggaaggaagccgattcctttctgctagtataaacgaggccctgaacaacaatgggatcctgtcaagtgttggaaagttctccactgttaacccagtctatgttggcaatgtggcctgggcccacattctggccttgagggccctgcaggaccccaagaaggccccaagcatccgaggacagttctactatatctcagatgacacgcctcaccaaagctatgataaccttaattacaccctgagcaaagagttcggcctccgccttgattccagatggagctttcctttatccctgatgtattggattggcttcctgctggaaatagtgagcttcctactcaggccaatttacacctatcgaccgcccttcaaccgccacatagtcacattgtcaaatagcgtattcaccttctcttataagaaggctcagcgagatctggcgtataagccactctacagctgggaggaagccaagcagaaaacggtggagtgggttggttcccttgtggaccggcacaaggagaccctgaagtccaagactcagtgatttaaggatgacagagatgtgcatgtgggtattgttaggagatgtcatcaagctccaccctcctggcctcatacagaaagtgacaagggcacaagctcaggtcctgctgcctccctttcatacaatggccaacttattgtattcctcatgtcatc

SEQ ID NO: 14072 - DNA, 352 bp, Homo sapiens
  source 1..352: mol_type = unassigned DNA
gccacaggaaatgaggtgagaaccctctccagggtcaccctagaatcagatctgctccccagcatcttctgtttcctggtgagtgattcctgctactttggatggccatgacgggctggagctgccttgtgacaggagcaggagggtttctgggacagaggatcatccgcctcttggtgaaggagaaggagctgaaggagatcagggtcttggacaaggccttcggaccagaattgagagaggaattttctaaactccagaacaagaccaagctgacagtgctggaaggagacattctggatgagccattcctgaagagagcctgccaggacgtctcggtcatcatccacac

SEQ ID NO: 14073 - DNA, 1741 bp, Homo sapiens
  source 1..1741: mol_type = unassigned DNA
gttcaaggtaataagggctgagacacaagccacagagcataaagctccagtccttcctccagggatgaggcagtaaggacttggactcctctgtccagcttttaacaatctaagttacgccctcttctgggtcacgctagaatcagatctgctctccagcatcttctgtttcctggcaagtgtttcctgctactttggattggccacgatgggctggagctgccttgtgacaggagcaggagggcttctgggtcagaggatcgtccgcctgttggtggaagagaaggaactgaaggagatcagggccttggacaaggccttcagaccagaattgagagaggaattttctaagctccagaacaggaccaagctgactgtacttgaaggagacattctggatgagccattcctgaaaagagcctgccaggacgtctcggtcgtcatccacaccgcctgtatcattgatgtctttggtgtcactcacagagagtccatcatgaatgtcaatgtgaaaggtacccagctactgttggaggcctgtgtccaagccagtgtgccagtcttcatctacaccagtagcatagaggtagccgggcccaactcctacaaggaaatcatccagaacggccacgaagaagagcctctggaaaacacatggcccactccatacccgtacagcaaaaagcttgctgagaaggctgtgctggcggctaatgggtggaatctaaaaaatggtgataccttgtacacttgtgcgttaagacccacatatatctatggggaaggaggcccattcctttctgccagtataaatgaggccctgaacaacaatgggatcctgtcaagtgttggaaagttctctacagtcaacccagtctatgttggcaacgtggcctgggcccacattctggccttgagggctctgcgggaccccaagaaggccccaagtgtccgaggtcaattctattacatctcagatgacacgcctcaccaaagctatgataaccttaattacatcctgagcaaagagtttggcctccgccttgattccagatggagccttcctttaaccctgatgtactggattggcttcctgctggaagtagtgagcttcctactcagcccaatttactcctatcaaccccccttcaaccgccacacagtcacattatcaaatagtgtgttcaccttctcttacaagaaggctcagcgagatctggcgtataagccactctacagctgggaggaagccaagcagaaaaccgtggagtgggttggttcccttgtggaccggcacaaggagaccctgaagtccaagactcagtgatttaaggatgacagagatgtgcatgtgggtattgttaggaaatgtcatcaaactccacccacctggcttcatacagaaggcaacaggggcacaagcccaggtcctgctgcctctctttcacacaatgcccaacttactgtcttcttcatgtcatcaaaatctgcacagtcactggcccaaccagaactttctgtcctaatcatacaccagaagacaaacaatatgatttgctgttaccaaatctcagtggctgattctgaacaattgtggtctctcttaacttgaggttctcttttgactaatagagctccatttcccctcttaaatgagaaagcatttcttttctctttaatctcctattccttcacacagttcaacataaagagcaataaatgttttaatgcttaacatgga

SEQ ID NO: 14074 - DNA, 717 bp, Homo sapiens
  source 1..717: mol_type = unassigned DNA
tggaggaggagggagcaatgagtatgtggcaggagttcaagccctcttctgggtcacgctagaatcagatctgctctccagcatcttctgtttcctggcaagtgtttcctgctactttggattggccacgatgggctggagctgccttgtgacaggagcaggagggcttctgggtcagaggatcgtccgcctgttggtggaagagaaggaactgaaggagatcagggccttggacaaggccttcagaccagaattgagagaggaattttctaagctccagaacaggaccaagctgactgtacttgaaggagacattctggatgagccattcctgaaaagagcctgccaggacgtctcggtcgtcatccacaccgcctgtatcattgatgtctttggtgtcactcacagagagtccatcatgaatgtcaatgtgaaaggtacccagctactgttggaggcctgtgtccaagccagtgtgccagtcttcatctacaccagtagcatagaggtagccgggcccaactcctacaaggaaatcatccagaacggccacgaagaagagcctctggaaaacacatggcccactccatacccgtacagcaaaaagcttgctgagaaggctgtgctggcggctaatgggtggaatctaaaaaatggtgataccttgtacacttgtgcgttaagacccacatatatctatggggaaggaggcccatt

SEQ ID NO: 14075 - DNA, 1783 bp, Homo sapiens
  source 1..1783: mol_type = unassigned DNA
aaggctaaagccaagactctttatcacactgtggccttaagattggatttctcttcctgttcctgggaagaattagagatataacctaaaggtcactattattctgagaaaagggattctggaggaggagggagcaatgagtatgtggcaggagttcaagccctcttctgggtcacgctagaatcagatctgctctccagcatcttctgtttcctggcaagtgtttcctgctactttggattggccacgatgggctggagctgccttgtgacaggagcaggagggcttctgggtcagaggatcgtccgcctgttggtggaagagaaggaactgaaggagatcagggccttggacaaggccttcagaccagaattgagagaggaattttctaagctccagaacaggaccaagctgactgtacttgaaggagacattctggatgagccattcctgaaaagagcctgccaggacgtctcggtcgtcatccacaccgcctgtatcattgatgtctttggtgtcactcacagagagtccatcatgaatgtcaatgtgaaaggtacccagctactgttggaggcctgtgtccaagccagtgtgccagtcttcatctacaccagtagcatagaggtagccgggcccaactcctacaaggaaatcatccagaacggccacgaagaagagcctctggaaaacacatggcccactccatacccgtacagcaaaaagcttgctgagaaggctgtgctggcggctaatgggtggaatctaaaaaatggtgataccttgtacacttgtgcgttaagacccacatatatctatggggaaggaggcccattcctttctgccagtataaatgaggccctgaacaacaatgggatcctgtcaagtgttggaaagttctctacagtcaacccagtctatgttggcaacgtggcctgggcccacattctggccttgagggctctgcgggaccccaagaaggccccaagtgtccgaggtcaattctattacatctcagatgacacgcctcaccaaagctatgataaccttaattacatcctgagcaaagagtttggcctccgccttgattccagatggagccttcctttaaccctgatgtactggattggcttcctgctggaagtagtgagcttcctactcagcccaatttactcctatcaaccccccttcaaccgccacacagtcacattatcaaatagtgtgttcaccttctcttacaagaaggctcagcgagatctggcgtataagccactctacagctgggaggaagccaagcagaaaaccgtggagtgggttggttcccttgtggaccggcacaaggagaccctgaagtccaagactcagtgatttaaggatgacagagatgtgcatgtgggtattgttaggaaatgtcatcaaactccacccacctggcttcatacagaaggcaacaggggcacaagcccaggtcctgctgcctctctttcacacaatgcccaacttactgtcttcttcatgtcatcaaaatctgcacagtcactggcccaaccagaactttctgtcctaatcatacaccagaagacaaacaatatgatttgctgttaccaaatctcagtggctgattctgaacaattgtggtctctcttaacttgaggttctcttttgactaatagagctccatttcccctcttaaatgagaaagcatttcttttctctttaatctcctattccttcacacagttcaacataaagagcaataaatgttttaatgcttaacatggag

SEQ ID NO: 14076 - DNA, 2215 bp, Homo sapiens
  source 1..2215: mol_type = unassigned DNA
ggaggagccagcggaaggacggtgtgcgggccggccagccctggacgaaagaagagggcccctccaggccagtctgggcaccctgggatagcggctgcagcccgcccctctctccgtaactcagccatcagcaggggcagacggcaggtggcctggttgctgcagctcccaggatcagctctgccctccccgcaaacgccagcctcgtcaccgctccagggcacctccagcagtaacaggtggttgcagcaggtggcagccagcccctggatgagccaaggtctcttccccagccaggcatggccgactctgcacaggcccagaagctggtgtacctggtcacagggggctgtggcttcctgggagagcacgtggtgcgaatgctgctgcagcgggagccccggctcggggagctgcgggtctttgaccaacacctgggtccctggctggaggagctgaagacagggcctgtgagggtgactgccatccagggggacgtgacccaggcccatgaggtggcagcagctgtggccggagcccatgtggtcatccacacggctgggctggtagacgtgtttggcagggccagtcccaagaccatccatgaggtcaacgtgcagggtacccggaacgtgatcgaggcttgtgtgcagaccggaacacggttcctggtctacaccagcagcatggaagttgtggggcctaacaccaaaggtcaccccttctacaggggcaacgaagacaccccatacgaagcagtgcacaggcacccctatccttgcagcaaggccctggccgagtggctggtcctggaggccaacgggaggaaggcaatgttgcctggatgcacgtgctggcagcccgggagctggagcagcgggcaaccctgatgggcggccaggtatacttctgctacgatggatcaccctacaggagctacgaggatttcaacatggagttcctgggcccctgcggactgcggctggtgggcgcccgcccattgctgccctactggctgctggtgttcctggctgccctcaatgccctgctgcagtggctgctgcggccactggtgctctacgcacccctgctgaacccctacacgctggccgtggccaacaccaccttcaccgtcagcaccgacaaggctcagcgccatttcggctatgagcccctgttctcgtgggaggatagccggacccgtaccattctctgggtacaggccgctacgggttcagcccagtgacggtggggctggggcctggaggcccagatacagcacatccacccaggtcccgagccctcacaccctggacgggaagggacagctgcattccagagcaggaggcagggctctggggccagaatggctgtccttgtcgtagagccctccacattttctttttcttttttgagacagggtcttgctctgtcacccagactggagtgcagtggtgtgatcatagctcactgcaccctcaacctcctgggttcaagcaatcctcctgcctcagcctcctgaacagctgggaccacaggtgcacgccaccacacctggcttttttttgttgtttttagagacagggtctcactatattgctcaggctggtcttgaactcctgggctcaagtgatcttcccacgtgggcctcccaaaacgctggaactacaagtgtgagccaccgcgcctggcccaagccctccacattttcaatccaggagccttgagtctgtgttgtgtcctgacacctccaagttctagggccgtcaggacacgggagggtttggggacagagtgtccttcctctgtcctctcatcccagtcctgatggccgcttggtgagtgtctggtgccctggtggcctgccccagctctcttctggctttctgagcaggaagcgagcagaggctccacaggcttacgctgctctcctgacagccacacgcgaccctcggtgcagagtgcagaggcggctctggttcctccagccacctcagtccctctttgggaggtgatgttcccattgtttttcaaaggcctcaccttcaactgtctgtcttagaattcccctctggagggctatggcctccctatgctttcacttcccacctctctacctaagttccttcccagcacatcgccagccctgggcctggggatgtccccaatgctgtacctggctgaccccggattaaaagcctcatccacgaccgtg

SEQ ID NO: 14077 - DNA, 2172 bp, Homo sapiens
  source 1..2172: mol_type = unassigned DNA
gaaggacggtgtgcgggccggccagccctggacgaaagaagagggcccctccaggccagtctgggcaccctgggatagcggctgcagccaggcatggccgactctgcacaggcccagaagctggtgtacctggtcacagggggctgtggcttcctgggagagcacgtggtgcgaatgctgctgcagcgggagccccggctcggggagctgcgggtctttgaccaacacctgggtccctggctggaggagctgaagacagggcctgtgagggtgactgccatccagggggacgtgacccaggcccatgaggtggcagcagctgtggccggagcccatgtggtcatccacacggctgggctggtagacgtgtttggcagggccagtcccaagaccatccatgaggtcaacgtgcagggtacccggaacgtgatcgaggcttgtgtgcagaccggaacacggttcctggtctacaccagcagcatggaagttgtggggcctaacaccaaaggtcaccccttctacaggggcaacgaagacaccccatacgaagcagtgcacaggcacccctatccttgcagcaaggccctggccgagtggctggtcctggaggccaacgggaggaaggtccgtggggggctgcccctggtgacgtgtgcccttcgtcccacgggcatctacggtgaaggccaccagatcatgagggacttctaccgccagggcctgcgcctgggaggttggctcttccgggccatcccggcctctgtggagcatggccgggtctatgtgggcaatgttgcctggatgcacgtgctggcagcccgggagctggagcagcgggcaaccctgatgggcggccaggtatacttctgctacgatggatcaccctacaggagctacgaggatttcaacatggagttcctgggcccctgcggactgcggctggtgggcgcccgcccattgctgccctactggctgctggtgttcctggctgccctcaatgccctgctgcagtggctgctgcggccactggtgctctacgcacccctgctgaacccctacacgctggccgtggccaacaccaccttcaccgtcagcaccgacaaggctcagcgccatttcggctatgagcccctgttctcgtgggaggatagccggacccgtaccattctctgggtacaggccgctacgggttcagcccagtgacggtggggctggggcctggaggcccagatacagcacatccacccaggtcccgagccctcacaccctggacgggaagggacagctgcattccagagcaggaggcagggctctggggccagaatggctgtccttgtcgtagagccctccacattttctttttcttttttgagacagggtcttgctctgtcacccagactggagtgcagtggtgtgatcatagctcactgcaccctcaacctcctgggttcaagcaatcctcctgcctcagcctcctgaacagctgggaccacaggtgcacgccaccacacctggcttttttttgttgtttttagagacagggtctcactatattgctcaggctggtcttgaactcctgggctcaagtgatcttcccacgtgggcctcccaaaacgctggaactacaagtgtgagccaccgcgcctggcccaagccctccacattttcaatccaggagccttgagtctgtgttgtgtcctgacacctccaagttctagggccgtcaggacacgggagggtttggggacagagtgtccttcctctgtcctctcatcccagtcctgatggccgcttggtgagtgtctggtgccctggtggcctgccccagctctcttctggctttctgagcaggaagcgagcagaggctccacaggcttacgctgctctcctgacagccacacgcgaccctcggtgcagagtgcagaggcggctctggttcctccagccacctcagtccctctttgggaggtgatgttcccattgtttttcaaaggcctcaccttcaactgtctgtcttagaattcccctctggagggctatggcctccctatgctttcacttcccacctctctacctaagttccttcccagcacatcgccagccctgggcctggggatgtccccaatgctgtacctggctgaccccggattaaaagcctcatccacgaccgtg

SEQ ID NO: 14078 - DNA, 2022 bp, Homo sapiens
  source 1..2022: mol_type = unassigned DNA
ggaggagccagcggaaggacggtgtgcgggccggccagccctggacgaaagaagagggcccctccaggccagtctgggcaccctgggatagcggctgcagccaggcatggccgactctgcacaggcccagaagctggtgtacctggtcacagggggctgtggcttcctgggagagcacgtggtgcgaatgctgctgcagcgggagccccggctcggggagctgcgggtctttgaccaacacctgggtccctggctggaggagctgaagacagggcctgtgagggtgactgccatccagggggacgtgacccaggcccatgaggtggcagcagctgtggccggagcccatgtggtcatccacacggctgggctggtagacgtgtttggcagggccagtcccaagaccatccatgaggtcaacgtgcagggtacccggaacgtgatcgaggcttgtgtgcagaccggaacacggttcctggtctacaccagcagcatggaagttgtggggcctaacaccaaaggtcaccccttctacaggggcaacgaagacaccccatacgaagcagtgcacaggcacccctatccttgcagcaaggccctggccgagtggctggtcctggaggccaacgggaggaaggcaatgttgcctggatgcacgtgctggcagcccgggagctggagcagcgggcaaccctgatgggcggccaggtatacttctgctacgatggatcaccctacaggagctacgaggatttcaacatggagttcctgggcccctgcggactgcggctggtgggcgcccgcccattgctgccctactggctgctggtgttcctggctgccctcaatgccctgctgcagtggctgctgcggccactggtgctctacgcacccctgctgaacccctacacgctggccgtggccaacaccaccttcaccgtcagcaccgacaaggctcagcgccatttcggctatgagcccctgttctcgtgggaggatagccggacccgtaccattctctgggtacaggccgctacgggttcagcccagtgacggtggggctggggcctggaggcccagatacagcacatccacccaggtcccgagccctcacaccctggacgggaagggacagctgcattccagagcaggaggcagggctctggggccagaatggctgtccttgtcgtagagccctccacattttctttttcttttttgagacagggtcttgctctgtcacccagactggagtgcagtggtgtgatcatagctcactgcaccctcaacctcctgggttcaagcaatcctcctgcctcagcctcctgaacagctgggaccacaggtgcacgccaccacacctggcttttttttgttgtttttagagacagggtctcactatattgctcaggctggtcttgaactcctgggctcaagtgatcttcccacgtgggcctcccaaaacgctggaactacaagtgtgagccaccgcgcctggcccaagccctccacattttcaatccaggagccttgagtctgtgttgtgtcctgacacctccaagttctagggccgtcaggacacgggagggtttggggacagagtgtccttcctctgtcctctcatcccagtcctgatggccgcttggtgagtgtctggtgccctggtggcctgccccagctctcttctggctttctgagcaggaagcgagcagaggctccacaggcttacgctgctctcctgacagccacacgcgaccctcggtgcagagtgcagaggcggctctggttcctccagccacctcagtccctctttgggaggtgatgttcccattgtttttcaaaggcctcaccttcaactgtctgtcttagaattcccctctggagggctatggcctccctatgctttcacttcccacctctctacctaagttccttcccagcacatcgccagccctgggcctggggatgtccccaatgctgtacctggctgaccccggattaaaagcctcatccacgaccgtg

SEQ ID NO: 14079 - DNA, 1501 bp, Homo sapiens
  source 1..1501: mol_type = unassigned DNA
gtgacgcgaggctctgcggagaccaggagtcagactgtaggacgacctcgggtcccacgtgtccccggtactcgccggccggagcccccggcttcccggggccgggggaccttagcggcacccacacacagcctactttccaagcggagccatgtctggtaacggcaatgcggctgcaacggcggaagaaaacagcccaaagatgagagtgattcgcgtgggtacccgcaagagccagcttgctcgcatacagacggacagtgtggtggcaacattgaaagcctcgtaccctggcctgcagtttgaaatcattgctatgtccaccacaggggacaagattcttgatactgcactctctaagattggagagaaaagcctgtttaccaaggagcttgaacatgccctggagaagaatgaagtggacctggttgttcactccttgaaggacctgcccactgtgcttcctcctggcttcaccatcggagccatctgcaagcgggaaaaccctcatgatgctgttgtctttcacccaaaatttgttgggaagaccctagaaaccctgccagagaagagtgtggtgggaaccagctccctgcgaagagcagcccagctgcagagaaagttcccgcatctggagttcaggagtattcggggaaacctcaacacccggcttcggaagctggacgagcagcaggagttcagtgccatcatcctggcaacagctggcctgcagcgcatgggctggcacaaccgggtggggcagatcctgcaccctgaggaatgcatgtatgctgtgggccagggggccttgggcgtggaagtgcgagccaaggaccaggacatcttggatctggtgggtgtgctgcacgatcccgagactctgcttcgctgcatcgctgaaagggccttcctgaggcacctggaaggaggctgcagtgtgccagtagccgtgcatacagctatgaaggatgggcaactgtacctgactggaggagtctggagtctagacggctcagatagcatacaagagaccatgcaggctaccatccatgtccctgcccagcatgaagatggccctgaggatgacccacagttggtaggcatcactgctcgtaacattccacgagggccccagttggctgcccagaacttgggcatcagcctggccaacttgttgctgagcaaaggagccaaaaacatcctggatgttgcacggcagcttaacgatgcccattaactggtttgtggggcacagatgcctgggttgctgctgtccagtgcctacatcccgggcctcagtgccccattctcactgctatctggggagtgattaccccgggagactgaactgcagggttcaagccttccagggatttgcctcaccttggggccttgatgactgccttgcctcctcagtatgtgggggcttcatctctttagagaagtccaagcaacagcctttgaatgtaaccaatcctactaataaaccagttctgaaggt

SEQ ID NO: 14080 - DNA, 1411 bp, Homo sapiens
  source 1..1411: mol_type = unassigned DNA
agtgtcctggttactgcagcggcagcaacagcaggtcctactatcgcctccctctagtctctgcttctctggatccctgaggagggcagaaggaagaaaacagcccaaagatgagagtgattcgcgtgggtacccgcaagagccagcttgctcgcatacagacggacagtgtggtggcaacattgaaagcctcgtaccctggcctgcagtttgaaatcattgctatgtccaccacaggggacaagattcttgatactgcactctctaagattggagagaaaagcctgtttaccaaggagcttgaacatgccctggagaagaatgaagtggacctggttgttcactccttgaaggacctgcccactgtgcttcctcctggcttcaccatcggagccatctgcaagcgggaaaaccctcatgatgctgttgtctttcacccaaaatttgttgggaagaccctagaaaccctgccagagaagagtgtggtgggaaccagctccctgcgaagagcagcccagctgcagagaaagttcccgcatctggagttcaggagtattcggggaaacctcaacacccggcttcggaagctggacgagcagcaggagttcagtgccatcatcctggcaacagctggcctgcagcgcatgggctggcacaaccgggtggggcagatcctgcaccctgaggaatgcatgtatgctgtgggccagggggccttgggcgtggaagtgcgagccaaggaccaggacatcttggatctggtgggtgtgctgcacgatcccgagactctgcttcgctgcatcgctgaaagggccttcctgaggcacctggaaggaggctgcagtgtgccagtagccgtgcatacagctatgaaggatgggcaactgtacctgactggaggagtctggagtctagacggctcagatagcatacaagagaccatgcaggctaccatccatgtccctgcccagcatgaagatggccctgaggatgacccacagttggtaggcatcactgctcgtaacattccacgagggccccagttggctgcccagaacttgggcatcagcctggccaacttgttgctgagcaaaggagccaaaaacatcctggatgttgcacggcagcttaacgatgcccattaactggtttgtggggcacagatgcctgggttgctgctgtccagtgcctacatcccgggcctcagtgccccattctcactgctatctggggagtgattaccccgggagactgaactgcagggttcaagccttccagggatttgcctcaccttggggccttgatgactgccttgcctcctcagtatgtgggggcttcatctctttagagaagtccaagcaacagcctttgaatgtaaccaatcctactaataaaccagttctgaaggtgt

SEQ ID NO: 14081 - DNA, 1548 bp, Homo sapiens
  source 1..1548: mol_type = unassigned DNA
ccaggagtcagactgtaggacgacctcgggtcccacgtgtccccggtactcgccggccggagcccccggcttcccggggccgggggaccttagcggcacccacacacagcctactttccaagcggagccatgtctggtaacggcaatgcggctgcaacggcgtcattccagagccctggactaggagtaggaagatctgaattgtggccccaactctctttcggttattagctctgtgaccctaggaagaaaacagcccaaagatgagagtgattcgcgtgggtacccgcaagagccagcttgctcgcatacagacggacagtgtggtggcaacattgaaagcctcgtaccctggcctgcagtttgaaatcattgctatgtccaccacaggggacaagattcttgatactgcactctctaagattggagagaaaagcctgtttaccaaggagcttgaacatgccctggagaagaatgaagtggacctggttgttcactccttgaaggacctgcccactgtgcttcctcctggcttcaccatcggagccatctgcaagcgggaaaaccctcatgatgctgttgtctttcacccaaaatttgttgggaagaccctagaaaccctgccagagaagagtgtggtgggaaccagctccctgcgaagagcagcccagctgcagagaaagttcccgcatctggagttcaggagtattcggggaaacctcaacacccggcttcggaagctggacgagcagcaggagttcagtgccatcatcctggcaacagctggcctgcagcgcatgggctggcacaaccgggtggggcagatcctgcaccctgaggaatgcatgtatgctgtgggccagggggccttgggcgtggaagtgcgagccaaggaccaggacatcttggatctggtgggtgtgctgcacgatcccgagactctgcttcgctgcatcgctgaaagggccttcctgaggcacctggaaggaggctgcagtgtgccagtagccgtgcatacagctatgaaggatgggcaactgtacctgactggaggagtctggagtctagacggctcagatagcatacaagagaccatgcaggctaccatccatgtccctgcccagcatgaagatggccctgaggatgacccacagttggtaggcatcactgctcgtaacattccacgagggccccagttggctgcccagaacttgggcatcagcctggccaacttgttgctgagcaaaggagccaaaaacatcctggatgttgcacggcagcttaacgatgcccattaactggtttgtggggcacagatgcctgggttgctgctgtccagtgcctacatcccgggcctcagtgccccattctcactgctatctggggagtgattaccccgggagactgaactgcagggttcaagccttccagggatttgcctcaccttggggccttgatgactgccttgcctcctcagtatgtgggggcttcatctctttagagaagtccaagcaacagcctttgaatgtaaccaatcctactaataaa

SEQ ID NO: 14082 - DNA, 755 bp, Homo sapiens
  source 1..755: mol_type = unassigned DNA
gctcagtgtcctggttactgcagcggcagcaacagcaggtcctactatcgcctccctctagtctctgcttctctggatccctgaggagggcagaagccagtgattctggttcttggacaaggtgttgaggaacactagaaacagaggggactgtgacctggggactttttctgcaggaagaaaacagcccaaagatgagagtgattcgcgtgggtacccgcaagagccagcttgctcgcatacagacggacagtgtggtggcaacattgaaagcctcgtaccctggcctgcagtttgaaatcattgctatgtccaccacaggggacaagattcttgatactgcactctctaagattggagagaaaagcctgtttaccaaggagcttgaacatgccctggagaagaatgaagtggacctggttgttcactccttgaaggacctgcccactgtgcttcctcctggcttcaccatcggagccatctgcaagcgggaaaaccctcatgatgctgttgtctttcacccaaaatttgttgggaagaccctagaaaccctgccagagaagagtgtggtgggaaccagctccctgcgaagagcagcccagctgcagagaaagttcccgcatctggagttcaggagtattcggggaaacctcaacacccggcttcggaagctggacgagcagcaggagttcagtgccatcatcctggcaacagctggcctgcagcgcatgggctggcacaaccgggtggggcag

SEQ ID NO: 14083 - DNA, 1559 bp, Homo sapiens
  source 1..1559: mol_type = unassigned DNA
gacgcgaggctctgcggagaccaggagtcagactgtaggacgacctcgggtcccacgtgtccccggtactcgccggccggagcccccggcttcccggggccgggggaccttagcggcacccacacacagcctactttccaagcggagccatgtctggtaacggcaatgcggctgcaacggcggtgagtgctgagccggtgaccagcacactttgggcttctggacgagccgtgcagcgattggccccaggttgccatcctcagtcgtctattggaagaaaacagcccaaagatgagagtgattcgcgtgggtacccgcaagagccagcttgctcgcatacagacggacagtgtggtggcaacattgaaagcctcgtaccctggcctgcagtttgaaatcattgctatgtccaccacaggggacaagattcttgatactgcactctctaagattggagagaaaagcctgtttaccaaggagcttgaacatgccctggagaagaatgaagtggacctggttgttcactccttgaaggacctgcccactgtgcttcctcctggcttcaccatcggagccatctgcaagcgggaaaaccctcatgatgctgttgtctttcacccaaaatttgttgggaagaccctagaaaccctgccagagaagagtgtggtgggaaccagctccctgcgaagagcagcccagctgcagagaaagttcccgcatctggagttcaggagtattcggggaaacctcaacacccggcttcggaagctggacgagcagcaggagttcagtgccatcatcctggcaacagctggcctgcagcgcatgggctggcacaaccgggtggggcagatcctgcaccctgaggaatgcatgtatgctgtgggccagggggccttgggcgtggaagtgcgagccaaggaccaggacatcttggatctggtgggtgtgctgcacgatcccgagactctgcttcgctgcatcgctgaaagggccttcctgaggcacctggaaggaggctgcagtgtgccagtagccgtgcatacagctatgaaggatgggcaactgtacctgactggaggagtctggagtctagacggctcagatagcatacaagagaccatgcaggctaccatccatgtccctgcccagcatgaagatggccctgaggatgacccacagttggtaggcatcactgctcgtaacattccacgagggccccagttggctgcccagaacttgggcatcagcctggccaacttgttgctgagcaaaggagccaaaaacatcctggatgttgcacggcagcttaacgatgcccattaactggtttgtggggcacagatgcctgggttgctgctgtccagtgcctacatcccgggcctcagtgccccattctcactgctatctggggagtgattaccccgggagactgaactgcagggttcaagccttccagggatttgcctcaccttggggccttgatgactgccttgcctcctcagtatgtgggggcttcatctctttagagaagtccaagcaacagcctttgaatgtaa

SEQ ID NO: 14084 - DNA, 1155 bp, Homo sapiens
  source 1..1155: mol_type = unassigned DNA
gaacaaacagatcctggtgggacagtgtacccaaggtcacccagccaagaggctgagcaggactgtacgtcagatccgtttacctcagtccttaatgcatgcagtccagccagattaagggacccttaatactgtcagctttccccactgtgggatcttcatcctcttgacttcttttgtagccagacatctgggcctcttgctggagaaggtggcagcttgctgctcttagactctagtctactccatgtggcatctggatggcactgaaattttctcaagtgccttgtctgttgtagataatgaatctatcctccagtgactcagcacaggttccccagtgtggtcctggctgccctgcccctgccagctgcaggccccacccttcctgtggccaggctgatgggccttatctctttacccacctggctgtgcacagcactcccactgacaactgccttggtcaaggtgggcttcagggctcagtgtcctggttactgcagcggcagcaacagcaggtcctactatcgcctccctctagtctctgcttctctggatccctgaggagggcagaaggaagaaaacagcccaaagatgagagtgattcgcgtgggtacccgcaagagccagcttgctcgcatacagacggacagtgtggtggcaacattgaaagcctcgtaccctggcctgcagtttgaaatcattgctatgtccaccacaggggacaagattcttgatactgcactctctaagattggagagaaaagcctgtttaccaaggagcttgaacatgccctggagaagaatgaagtggacctggttgttcactccttgaaggacctgcccactgtgcttcctcctggcttcaccatcggagccatctgcaagcgggaaaaccctcatgatgctgttgtctttcacccaaaatttgttgggaagaccctagaaaccctgccagagaagagtgtggtgggaaccagctccctgcgaagagcagcccagctgcagagaaagttcccgcatctggagttcaggagtattcggggaaacctcaacacccggcttcggaagctggacgagcagcaggagttcagtgccatcatcctggcaacagctggcctgcagcgcatgggctggcacaaccgggtggggcag

SEQ ID NO: 14085 - DNA, 1469 bp, Homo sapiens
  source 1..1469: mol_type = unassigned DNA
gacgcgaggctctgcggagaccaggagtcagactgtaggacgacctcgggtcccacgtgtccccggtactcgccggccggagcccccggcttcccggggccgggggaccttagcggcacccacacacagcctactttccaagcggagccatgtctggtaacggcaatgcggctgcaacggcggtgagtgctgagccggtgaccagcacactttgggcttctggacgagccgtgcagcgattggccccaggttgccatcctcagtcgtctattggaagaaaacagcccaaagatgagagtgattcgcgtgggtacccgcaagagccagcttgctcgcatacagacggacagtgtggtggcaacattgaaagcctcgtaccctggcctgcagtttgaaatcattgctatgtccaccacaggggacaagattcttgatactgcactctctaagattggagagaaaagcctgtttaccaaggagcttgaacatgccctggagaagaatgaagtggacctggttgttcactccttgaaggacctgcccactgtgcttcctcctggcttcaccatcggagccatctgcaagcgggaaaaccctcatgatgctgttgtctttcacccaaaatttgttgggaagaccctagaaaccctgccagagaagagtgtggtgggaaccagctccctgcgaagagcagcccagctgcagagaaagttcccgcatctggagttcaggagtattcggggaaacctcaacacccggcttcggaagctggacgagcagcaggagttcagtgccatcatcctggcaacagctggcctgcagcgcatgggctggcacaaccgggtggggcagatcctgcaccctgaggaatgcatgtatgctgtgggccaggaaggaggctgcagtgtgccagtagccgtgcatacagctatgaaggatgggcaactgtacctgactggaggagtctggagtctagacggctcagatagcatacaagagaccatgcaggctaccatccatgtccctgcccagcatgaagatggccctgaggatgacccacagttggtaggcatcactgctcgtaacattccacgagggccccagttggctgcccagaacttgggcatcagcctggccaacttgttgctgagcaaaggagccaaaaacatcctggatgttgcacggcagcttaacgatgcccattaactggtttgtggggcacagatgcctgggttgctgctgtccagtgcctacatcccgggcctcagtgccccattctcactgctatctggggagtgattaccccgggagactgaactgcagggttcaagccttccagggatttgcctcaccttggggccttgatgactgccttgcctcctcagtatgtgggggcttcatctctttagagaagtccaagcaacagcctttgaatgtaaccaatcctactaataaaccagttctgaagg

SEQ ID NO: 14086 - DNA, 1351 bp, Homo sapiens
  source 1..1351: mol_type = unassigned DNA
agactgtaggacgacctcgggtcccacgtgtccccggtactcgccggccggagcccccggcttcccggggccgggggaccttagcggcacccacacacagcctactttccaagcggagccatgtctggtaacggcaatgcggctgcaacggcggaagaaaacagcccaaagatgagagtgattcgcgtgggtacccgcaagagccagcttgctcgcatacagacggacagtgtggtggcaacattgaaagcctcgtaccctggcctgcagtttgaaatcattgctatgtccaccacaggggacaagattcttgatactgcactctctaagattggagagaaaagcctgtttaccaaggagcttgaacatgccctggagaagaatgaagtggacctggttgttcactccttgaaggacctgcccactgtgcttcctcctggcttcaccatcggagccatctgcaagcgggaaaaccctcatgatgctgttgtctttcacccaaaatttgttgggaagaccctagaaaccctgccagagaagagtgtggtgggaaccagctccctgcgaagagcagcccagctgcagagaaagttcccgcatctggagttcaggagtattcggggaaacctcaacacccggcttcggaagctggacgagcagcaggagttcagtgccatcatcctggcaacagctggcctgcagcgcatgggctggcacaaccgggtggggcagatcctgcaccctgaggaatgcatgtatgctgtgggccaggaaggaggctgcagtgtgccagtagccgtgcatacagctatgaaggatgggcaactgtacctgactggaggagtctggagtctagacggctcagatagcatacaagagaccatgcaggctaccatccatgtccctgcccagcatgaagatggccctgaggatgacccacagttggtaggcatcactgctcgtaacattccacgagggccccagttggctgcccagaacttgggcatcagcctggccaacttgttgctgagcaaaggagccaaaaacatcctggatgttgcacggcagcttaacgatgcccattaactggtttgtggggcacagatgcctgggttgctgctgtccagtgcctacatcccgggcctcagtgccccattctcactgctatctggggagtgattaccccgggagactgaactgcagggttcaagccttccagggatttgcctcaccttggggccttgatgactgccttgcctcctcagtatgtgggggcttcatctctttagagaagtccaagcaacagcctttgaatgtaaccaatcctactaataaaccagttctgaaggtg

SEQ ID NO: 14087 - DNA, 1415 bp, Homo sapiens
  source 1..1415: mol_type = unassigned DNA
ggaggagggagagagagagaagagaagaaaaagaaaaaagaacatcaataaaaagaagtcagatttgttcgaaatcttgaggagtcttcaggccagctccctgtcggatggcttttatgaaaaaatatctcctccccattctggggctcttcatggcctactactactattctgcaaacgaggaattcagaccagagatgctccaaggaaagaaagtgattgtcacaggggccagcaaagggatcggaagagagatggcttatcatctggcgaagatgggagcccatgtggtggtgacagcgaggtcaaaagaaactctacagaaggtggtatcccactgcctggagcttggagcagcctcagcacactacattgctggcaccatggaagacatgaccttcgcagagcaatttgttgcccaagcaggaaagctcatgggaggactagacatgctcattctcaaccacatcaccaacacttctttgaatctttttcatgatgatattcaccatgtgcgcaaaagcatggaagtcaacttcctcagttacgtggtcctgactgtagctgccttgcccatgctgaagcagagcaatggaagcattgttgtcgtctcctctctggctgggaaagtggcttatccaatggttgctgcctattctgcaagcaagtttgctttggatgggttcttctcctccatcagaaaggaatattcagtgtccagggtcaatgtatcaatcactctctgtgttcttggcctcatagacacagaaacagccatgaaggcagtttctgggatagtccatatgcaagcagctccaaaggaggaatgtgccctggagatcatcaaagggggagctctgcgccaagaagaagtgtattatgacagctcactctggaccactcttctgatcagaaatccatgcaggaagatcctggaatttctctactcaacgagctataatatggacagattcataaacaagtaggaactccctgagggctgggcatgctgagggattttgggactgttctgtctcatgtttatctgagctcttatctatgaagacatcttcccagagtgtccccagagacatgcaagtcatgggtcacacctgacaaatggaaggagttcctctaacatttgcaaaatggaaatgtaataataatgaatgtcatgcaccgctgcagccagcagttgtaaaattgttagtaaacataggtataattaccagatagttatattaaatttatatcttatatataataatatgtgatgattaatacaatattaattataataaaggtcacataaactttataaattcataactggtagctataacttgagcttattcaggatggtttctttaaaaccataaactgtacaaatgaaatttttcaatatttgtttctta

SEQ ID NO: 14088 - DNA, 1319 bp, Homo sapiens
  source 1..1319: mol_type = unassigned DNA
acaattcagaggctgctgcctgcttaggaggttgtagaaagctctgtaggttctctctgtgtgtcctacaggagtcttcaggccagctccctgtcggatggcttttatgaaaaaatatctcctccccattctggggctcttcatggcctactactactattctgcaaacgaggaattcagaccagagatgctccaaggaaagaaagtgattgtcacaggggccagcaaagggatcggaagagagatggcttatcatctggcgaagatgggagcccatgtggtggtgacagcgaggtcaaaagaaactctacagaaggtggtatcccactgcctggagcttggagcagcctcagcacactacattgctggcaccatggaagacatgaccttcgcagagcaatttgttgcccaagcaggaaagctcatgggaggactagacatgctcattctcaaccacatcaccaacacttctttgaatctttttcatgatgatattcaccatgtgcgcaaaagcatggaagtcaacttcctcagttacgtggtcctgactgtagctgccttgcccatgctgaagcagagcaatggaagcattgttgtcgtctcctctctggctgggaaagtggcttatccaatggttgctgcctattctgcaagcaagtttgctttggatgggttcttctcctccatcagaaaggaatattcagtgtccagggtcaatgtatcaatcactctctgtgttcttggcctcatagacacagaaacagccatgaaggcagtttctgggatagtccatatgcaagcagctccaaaggaggaatgtgccctggagatcatcaaagggggagctctgcgccaagaagaagtgtattatgacagctcactctggaccactcttctgatcagaaatccatgcaggaagatcctggaatttctctactcaacgagctataatatggacagattcataaacaagtaggaactccctgagggctgggcatgctgagggattttgggactgttctgtctcatgtttatctgagctcttatctatgaagacatcttcccagagtgtccccagagacatgcaagtcatgggtcacacctgacaaatggaaggagttcctctaacatttgcaaaatggaaatgtaataataatgaatgtcatgcaccgctgcagccagcagttgtaaaattgttagtaaacataggtataattaccagatagttatattaaatttatatcttatatataataatatgtgatgattaatacaatattaattataataaaggtcacataaactttataaattcataa

SEQ ID NO: 14089 - DNA, 1391 bp, Homo sapiens
  source 1..1391: mol_type = unassigned DNA
ccgcaaaggaagagagagatgaaacagaaggaaaggcagaggaggagggagagagagagaagagaagaaaaagaaaaaagaacatcaataaaaagaagtcagatttgttcgaaatcttgaggttctctctgtgtgtcctacaggagtcttcaggccagctccctgtcggatggcttttatgaaaaaatatctcctccccattctggggctcttcatggcctactactactattctgcaaacgaggaattcagaccagagatgctccaaggaaagaaagtgattgtcacaggggccagcaaagggatcggaagagagatggcttatcatctggcgaagatgggagcccatgtggtggtgacagcgaggtcaaaagaaactctacagaaggtggtatcccactgcctggagcttggagcagcctcagcacactacattgctggcaccatggaagacatgaccttcgcagagcaatttgttgcccaagcaggaaagctcatgggaggactagacatgctcattctcaaccacatcaccaacacttctttgaatctttttcatgatgatattcaccatgtgcgcaaaagcatggaagtcaacttcctcagttacgtggtcctgactgtagctgccttgcccatgctgaagcagagcaatggaagcattgttgtcgtctcctctctggctgggaaagtggcttatccaatggttgctgcctattctgcaagcaagtttgctttggatgggttcttctcctccatcagaaaggaatattcagtgtccagggtcaatgtatcaatcactctctgtgttcttggcctcatagacacagaaacagccatgaaggcagtttctgggatagtccatatgcaagcagctccaaaggaggaatgtgccctggagatcatcaaagggggagctctgcgccaagaagaagtgtattatgacagctcactctggaccactcttctgatcagaaatccatgcaggaagatcctggaatttctctactcaacgagctataatatggacagattcataaacaagtaggaactccctgagggctgggcatgctgagggattttgggactgttctgtctcatgtttatctgagctcttatctatgaagacatcttcccagagtgtccccagagacatgcaagtcatgggtcacacctgacaaatggaaggagttcctctaacatttgcaaaatggaaatgtaataataatgaatgtcatgcaccgctgcagccagcagttgtaaaattgttagtaaacataggtataattaccagatagttatattaaatttatatcttatatataataatatgtgatgattaatacaatattaattataataaaggtcacataaactttataaattcataa

SEQ ID NO: 14090 - DNA, 1879 bp, Homo sapiens
  source 1..1879: mol_type = unassigned DNA
tcgcgccccaggccggtgtacccccgcactccgcgccccggcctagaagctctctctccccgctccccggcccggcccccgccccgccccgccccagcccgctgggccgccatggagcgctggccttggccgtcgggcggcgcctggctgctcgtggctgcccgcgcgctgctgcagctgctgcgctcagacctgcgtctgggccgcccgctgctggcggcgctggcgctgctggccgcgctcgactggctgtgccagcgcctgctgcccccgccggccgcactcgccgtgctggccgccgccggctggatcgcgttgtcccgcctggcgcgcccgcagcgcctgccggtggccactcgcgcggtgctcatcaccggctgtgactctggttttggcaaggagacggccaagaaactggactccatgggcttcacggtgctggccaccgtattggagttgaacagccccggtgccatcgagctgcgtacctgctgctcccctcgcctaaggctgctgcagatggacctgaccaaaccaggagacattagccgcgtgctagagttcaccaaggcccacaccaccagcaccggcctgtggggcctcgtcaacaacgcaggccacaatgaagtagttgctgatgcggagctgtctccagtggccactttccgtagctgcatggaggtgaatttctttggcgcgctcgagctgaccaagggcctcctgcccctgctgcgcagctcaaggggccgcatcgtgactgtggggagcccagcgggggacatgccatatccgtgcttgggggcctatggaacctccaaagcggccgtggcgctactcatggacacattcagctgtgaactccttccctggggggtcaaggtcagcatcatccagcctggctgcttcaagacagagtcagtgagaaacgtgggtcagtgggaaaagcgcaagcaattgctgctggccaacctgcctcaagagctgctgcaggcctacggcaaggactacatcgagcacttgcatgggcagttcctgcactcgctacgcctggccatgtccgacctcaccccagttgtagatgccatcacagatgcgctgctggcagctcggccccgccgccgctattaccccggccagggcctggggctcatgtacttcatccactactacctgcctgaaggcctgcggcgccgcttcctgcaggccttcttcatcagtcactgtctgcctcgagcactgcagcctggccagcctggcactaccccaccacaggacgcagcccaggacccaaacctgagccccggcccttccccagcagtggctcggtgagccatgtgcacctatggcccagccactgcagcacaggaggctccgtgagcccttggttcctccccgaaaacccccagcattacgatcccccaagtgtcctggaccctggcctaaagaatcccacccccacttcatgcccactgccgatgcccaatccaggcccggtgaggccaaggtttcccagtgagcctctgcgcctctccactgtttcatgagcccaaacaccctcctggcacaacgctctaccctgcagcttggagaactccgctggatggggagtctcatgcaagacttcactgcagcctttcacaggactctgcagatagtgcctctgcaaactaaggagtgactaggtgggttggggaccccctcaggattgtttctcggcaccagtgcctcagtgctgcaattgagggctaaatcccaagtgtctcttgactggctcaagaattagggccccaactacacacccccaagccacagggaagcatgtactgtacttcccaattgccacattttaaataaagacaaatttttatttcttctaaaa

SEQ ID NO: 14091 - DNA, 1220 bp, Homo sapiens
  source 1..1220: mol_type = unassigned DNA
acagtctcaccatggcccgcaccgtggtgctcatcaccggctgttcctcgggcatcggcctgcacttggccgtacgtctggcttcagatccatcccagagcttcaaagtgtatgccacgttgagggacctgaaaacacagggccggctgtgggaggcggcccgggccctggcatgccctccgggatccctggagacgttgcagctggacgtaagggactcaaaatccgtggccgctgcccgggaacgcgtgactgagggccgcgtggacgtgctggtgtgtaacgcaggcctgggcctgctggggccgctggaggcgctgggggaggacgccgtggcctctgtgctggacgtgaatgtagtagggactgtgcggatgctgcaggccttcctgccagacatgaagaggcgcggttcgggacgcgtgttggtgaccgggagcgtgggaggattgatggcttgagcctgatcgagtgcggcccagtgcacaccgccttcatggagaaggtgttgggcagcccagaggaggtgctggaccgcacggacatccacaccttccaccgcttctaccaatacctcgcccacagcaagcaagtctttcgcgaggcggcgcagaaccctgaggaggtggcggaggtcttcctcaccgctttgcgcgccccgaagccgaccctgcgctacttcaccaccgagcgcttcctgcccctgctgcggatgcgcctggacgaccccagcggctccaactacgtcaccgccatgcaccgggaagtgttcggcgacgttccggcaaaggccgaggctggggccgaggctgggggcggggccgggcctggggcagaggacgaggccgggcgcggtgcggtgggggaccctgagctcggcgatcctccggccgccccgcagtaaaggcttcctcagccgctgtctcccgcgcccttctttgtcccctgggtctgtgtggtccctggggatggggcggcggtagcagctgtgggtggctaattaagatagatcgcgttagccagttttaccagcgcagctaggcgcgatggctgtcgcctcagcctcccaagtagctgggataccggctaattttgtatgttcggtagagacggggtttctccatgttggtcaggctggtctcaaactctcgaccttaggtgatccgcccgcctcggcctctcagattgctgggcatacaggcatgagccaccgcgaccgg

SEQ ID NO: 14092 - DNA, 2223 bp, Homo sapiens
  source 1..2223: mol_type = unassigned DNA
gggcctcccaaagtgctgggattacaggcatgagccaccgtgcccagcctcaaagcatattttaaaggatagaaataaacagccatatgaagagatacagacagggcggtctggaagggtccagagcaggagcttctatctccatagagttggggttacgtcaccctctgggcacattctgtcagcctccacacgttcagccctcagaagctcccgaaccctgtcctttgggccttttatggagaactccattggctgtccatgactgaagcatggacaactgtgataatgtgattgggcaaaaagggtctgatctaagcccagcaaggccagtccagattctttgggcctttgtgcagcattcctttctccagggtatggggcaaggacccactctggaatgaggatcctacaacccacaatcagattagagtcctgccttgggcagctgaaaagaggacaggagaaggtcagagagacgaaaggctgttttttgaggcctgaggcaccccaacatgacaacgtaagactgtaaccatggtcatgtgagttatgagctaggaaccctggacgaaaccagcacatatacaatcatctcccacctcccaacgcctttactttcacagcctctgcagcaaactgcggtcactataatcgctcctgtggcacagaggcatacccaggggaatctgcccagggggccactctgtgcccacgtgggaacccacacctgcttgtaaagcctcccctccctctgaccagcaaccaggacagtttgttgttccaagcagtgggctcatgtctgttttggctcagaacagggtggggagagcgggccagggacccgcaggaaggcttatccttgagattgcgtgggagacacaacaaggggtgggggcccgcaggcggggcggggcgaagcaggtgatatcaagcccagagccccagcctctccccacagtctcaccatggcccgcaccgtggtgctcatcaccggctgttcctcgggcatcggcctgcacttggccgtacgtctggcttcagatccatcccagagcttcaaagtgtatgccacgttgagggacctgaaaacacagggccggctgtgggaggcggcccgggccctggcatgccctccgggatccctggagacgttgcagctggacgtaagggactcaaaatccgtggccgctgcccgggaacgcgtgactgagggccgcgtggacgtgctggtgtgtaacgcaggcctgggcctgctggggccgctggaggcgctgggggaggacgccgtggcctctgtgctggacgtgaatgtagtagggactgtgcggatgctgcaggccttcctgccagacatgaagaggcgcggttcgggacgcgtgttggtgaccgggagcgtgggaggattgatggggctgcctttcaatgacgtttattgcgccagcaagttcgcgctcgaaggcttatgcgagagtctggcggttctgctgctgccctttggggtccacttgagcctgatcgagtgcggcccagtgcacaccgccttcatggagaaggtgttgggcagcccagaggaggtgctggaccgcacggacatccacaccttccaccgcttctaccaatacctcgcccacagcaagcaagtctttcgcgaggcggcgcagaaccctgaggaggtggcggaggtcttcctcaccgctttgcgcgccccgaagccgaccctgcgctacttcaccaccgagcgcttcctgcccctgctgcggatgcgcctggacgaccccagcggctccaactacgtcaccgccatgcaccgggaagtgttcggcgacgttccggcaaaggccgaggctggggccgaggctgggggcggggccgggcctggggcagaggacgaggccgggcgcggtgcggtgggggaccctgagctcggcgatcctccggccgccccgcagtaaaggcttcctcagccgctgtctcccgcgcccttctttgtcccctgggtctgtgtggtccctggggatggggcggcggtagcagctgtgggtggctaattaagatagatcgcgttagccagttttaccagcgcagctaggcgcgatggctgtcgcctgtaatgccagcgctttgggaggcggaggcaggaggatcgctcaagccccggagttggagaccagccagagcaacacagtgagacccccatctctacaaaaataaagaaaattt

SEQ ID NO: 14093 - DNA, 4982 bp, Homo sapiens
  source 1..4982: mol_type = unassigned DNA
agttaggtgggacttgggttggggtagagtcaggttgtgacctgcactccattagccatgagacctcaggcaagttccttgctttctctgagtgctttcctttcctttcccttttcttttcttttttgtttttcttttgttttgagacggagtttcactcttgttgcccagcctggagtgcaatagcgcggtctcagttcaccacaacctctgcctcccgggttcaagtgtagctaggattgcaggcatgtgccaccacgcccagctaattttgtatttttagtagagacgaggtttctccatgttggtcagactggtcttggactcccgacctcaggtgatccgcccgccctggcctctcagagtgctgggattacaggcatgacccaccccatccggccctctgagtctttcttatctgtaaaatgggtataataatacctatctaatcggttttagtaatggtggagataatgcctgaaagtgctagtatagaggtttaatacccagcaaggactgttattagaatgaatagtaatatgactactgtcacattttgcaaatgtgtaaagaagaaagagggctaagtgaatcaaagggagacagccccactcaccctgttctgccccagaggactgagcgatccccaccatctgggaagctgcctcaccaggaggtccagctggggctacaggactggctactttgctacaatggcccatctttcctgagcccagtggagggtcccaggggggcagaagtcattgataggggccagtagggttgtagagccactgtctgaacttctgtggaggtctggtgcaggggaggtgtgaacagataggaggctaggtgaggatgcagcagaggaagggggcaggagtgccccaggagggggcggtaccgaggcagggattcagctgggtctgagagggagggaaggctgagggggatggccctttggagtgggcagggacatgaccacagaaagcctgggaagtggaaacagacaggagcctgctggagctcttggagctttgtgtggggcactaggggaaggaggcaggcactccaccctgacctgcccctacctctggatgagggtcttctctgcctgttggatgatgtgctgcccctgctcttggaggaagaggcctcccagccaccccctcctgccagtcgccttgccctgctgacccagacagatctgctatccctacagcatccaggaaggccacagggagggggcccaggtggcatgggtttctgaggcctgggatctgctctcagtcccgctctcgccaaccccctttgcccctctgtgacagtgtgtgtacatatgcgtgcatgtgtgtacctgtgtggtgtggctcacaaggtcacccctgggggtgggataataagaggtaaagtgtgaccccctctcttccgtacattcattttttcaagcttgtgaatattcacattgttaatataatcttctgcagtcccatgacttcgaatagcacttagatgccgatgacccccccaccaaagaaaccccactgtctcccacagactccaggtctgtatctccaactgcctactcaatacaacacgtccacctgatacaatgaacttaatgtgtctaaaccccaattccacatttccagtcctcctaccggctcctcccccagtcttctctactttactatatgacaactccatttttcccaatactggttttaaaaaccctggagtagtccttgactccagtctctctcacctttcaaccaattcagcagcaaatactgacagctctacctttgctcatcaaagcatatccccaaatcaccctattccagactgcacactgtcatctctcccttcaattacagcagtagcctcctaactagttttcttgattccactcctgcccatcagcagtgaaattaccccagagcagttaaaatgatcttttaggatgggcacagtggctcacgcctgtaataccagcactttgggaggtggaggctggctgatccccttaggttgggagttcaagaccatcctcaccaacagggagaaaccccatctctactaaaaatacaaaaattagccggatgtggtgggacgtgtctgtaatcccaactacttgggaggctgagacaggagaactgcttgaacccgggaggtggaggttgcagtgagccagaatcgtgccacagcactccagcctgggcaagaagcgcgaaactccgtctcaaaataaaataatcttctaaaaatgacagggccaggtggggtggcacttttttataatccgagcactttgggaggctgaggtgggcagatcgcttgacatcaggggtttgagaccagcctggccaacatggtgaaactccgtctctactaaaaatactaaaaattagctgggcgtggtggcgggtgcctgtaatcccagctactcgggaggctgatgcaggagaatcgcctgaaccaggcagatgcaggatgcagtgagccaagattaagacactgcactccaacctaagcaatactttgtctcaaaaataaaaaaaagcctgggaaacaaagtgagaccccgtctctacaaaaaagtcaaaaaattagctgggtatggtggcagtgatggcacacacctgtagtcccggctacttgggaagctttttaatattttttgcagagaccgggtctcactctgttacctggcctggtcttgaactcctgggctccaacaatcccctttcctgggcctcccaaagtgctgggattacaggcatgagccaccgtgcccagcctcaaagcatattttaaaggatagaaataaacagccatatgaagagatacagacagggcggtctggaagggtccagagcaggagcttctatctccatagagttggggttacgtcaccctctgggcacattctgtcagcctccacacgttcagccctcagaagctcccgaaccctgtcctttgggccttttatggagaactccattggctgtccatgactgaagcatggacaactgtgataatgtgattgggcaaaaagggtctgatctaagcccagcaaggccagtccagattctttgggcctttgtgcagcattcctttctccagggtatggggcaaggacccactctggaatgaggatcctacaacccacaatcagattagagtcctgccttgggcagctgaaaagaggacaggagaaggtcagagagacgaaaggctgttttttgaggcctgaggcaccccaacatgacaacgtaagactgtaaccatggtcatgtgagttatgagctaggaaccctggacgaaaccagcacatatacaatcatctcccacctcccaacgcctttactttcacagcctctgcagcaaactgcggtcactataatcgctcctgtggcacagaggcatacccaggggaatctgcccagggggccactctgtgcccacgtgggaacccacacctgcttgtaaagcctcccctccctctgaccagcaaccaggacagtttgttgttccaagcagtgggctcatgtctgttttggctcagaacagggtggggagagcgggccagggacccgcaggaaggcttatccttgagattgcgtgggagacacaacaaggggtgggggcccgcaggcggggcggggcgaagcaggtgatatcaagcccagagccccagcctctccccacagtctcaccatggcccgcaccgtggtgctcatcaccggctgttcctcgggcatcggcctgcacttggccgtacgtctggcttcagatccatcccagagcttcaaagtgtatgccacgttgagggacctgaaaacacagggccggctgtgggaggcggcccgggccctggcatgccctccgggatccctggagacgttgcagctggacgtaagggactcaaaatccgtggccgctgcccgggaacgcgtgactgagggccgcgtggacgtgctggtgtgtaacgcaggcctgggcctgctggggccgctggaggcgctgggggaggacgccgtggcctctgtgctggacgtgaatgtagtagggactgtgcggatgctgcaggccttcctgccagacatgaagaggcgcggttcgggacgcgtgttggtgaccgggagcgtgggaggattgatggggctgcctttcaatgacgtttattgcgccagcaagttcgcgctcgaaggcttatgcgagagtctggcggttctgctgctgccctttggggtccacttgagcctgatcgagtgcggcccagtgcacaccgccttcatggagaaggtgttgggcagcccagaggaggtgctggaccgcacggacatccacaccttccaccgcttctaccaatacctcgcccacagcaagcaagtctttcgcgaggcggcgcagaaccctgaggaggtggcggaggtcttcctcaccgctttgcgcgccccgaagccgaccctgcgctacttcaccaccgagcgcttcctgcccctgctgcggatgcgcctggacgaccccagcggctccaactacgtcaccgccatgcaccgggaagtgttcggcgacgttccggcaaaggccgaggctggggccgaggctgggggcggggccgggcctggggcagaggacgaggccgggcgcggtgcggtgggggaccctgagctcggcgatcctccggccgccccgcagtaaaggcttcctcagccgctgtctcccgcgcccttctttgtcccctgggtctgtgtggtccctggggatggggcggcggtagcagctgtgggtggctaattaagatagatcgcgttagccagttttaccagcgcagctaggcgcgatggctgtcgcctgtaatgccagcgctttgggaggcggaggcaggaggatcgctcaagccccggagttggagaccagccagagcaacacagtgagacccccatctctacaaaaataaagaaaatttaaaaatc

SEQ ID NO: 14094 - DNA, 455 bp, Homo sapiens
  source 1..455: mol_type = unassigned DNA
acagtctcaccatggcctgcaccgtggtgctcatcaccggctgttcctcaggtattggcctgcacttggcaatacatctggctttggacccatcccagagcttcaaagtgtatgccacgttgagggacctgaaaacacagggccggctgtgggaggcggcccgggccctggcatgccctcagggatccctggagaggttgcagctggatgtaaggaactcaagctccctggccgctgcccgggaacgcgtgaccgagggccgtgtggatgtgctggtgtgtgacacaggcctgggcctgctggggccgctgggggaggacgctgtggcctctgtactggatgtgaatgtagtaggtactgtgcgggtgctgcaggacttcctgccagacatgaagcggccgggttcgggacgcgtgttggtgactgggagcatgggaggattgatgggtgagtgg

SEQ ID NO: 14095 - DNA, 960 bp, Homo sapiens
  source 1..960: mol_type = unassigned DNA
cccatcccgtggagtggccggcgacaagatggcagcagcgtgtcggagcgtgaagggcctggtggcggtaataaccggaggagcctcgggcctgggcctggccacggcggagcgacttgtggggcagggagcctctgctgtgcttctggacctgcccaactcgggtggggaggcccaagccaagaagttaggaaacaactgcgttttcgccccagccgacgtgacctctgagaaggatgtgcaaacagctctggctctagcaaaaggaaagtttggccgtgtggatgtagctgtcaactgtgcaggcatcgcggtggctagcaagacgtacaacttaaagaagggccagacccataccttggaagacttccagcgagttcttgatgtgaatctcatgggcaccttcaatgtgatccgcctggtggctggtgagatgggccagaatgaaccagaccagggaggccaacgtggggtcatcatcaacactgccagtgtggctgccttcgagggtcaggttggacaagctgcatactctgcttccaaggggggaatagtgggcatgacactgcccattgctcgggatctggctcccataggtatccgggtgatgaccattgccccaggtctgtttggcaccccactgctgaccagcctcccagagaaagtgtgcaacttcttggccagccaagtgcccttccctagccgactgggtgaccctgctgagtatgctcacctcgtacaggccatcatcgagaacccattcctcaatggagaggtcatccggctggatggggccattcgtatgcagccttgaagggagaaggcagagaaaacacacgctcctctgcccttcctttccctggggtactactctccagcttgggaggaagcccagtagccattttgtaactgcctaccagtcgccctctgtgcctaataaagtctctttttctcacagag

SEQ ID NO: 14096 - DNA, 823 bp, Homo sapiens
  source 1..823: mol_type = unassigned DNA
acaagatggcagcagcgtgtcggagcgtgaagggcctggtggcggtaataaccggaggagcctcgggcctgggcctggccacggcggagcgacttgtggggcagggagcctctgctgtgcttctggacctgcccaactcgggtggggaggcccaagccaagaagttaggaaacaactgcgttttcgccccagccgacgtgacctctgagaaggatgtgcaaacagctctggctctagcaaaaggaaagtttggccgtgtggatgtagctgtcaactgtgcaggcatcgcggtggctagcaagacgtacaacttaaagaagggccagacccataccttggaagacttccagcgagttcttgatgtgaatctcatgggcaccttcaatgtgatccgcctggtggctggtgagatgggccagaatgaaccagaccagggaggccaacgtggggtcatcatcaacactgccagtgtggctgccttcgagggtcaggtctgtttggcaccccactgctgaccagcctcccagagaaagtgtgcaacttcttggccagccaagtgcccttccctagccgactgggtgaccctgctgagtatgctcacctcgtacaggccatcatcgagaacccattcctcaatggagaggtcatccggctggatggggccattcgtatgcagccttgaagggagaaggcagagaaaacacacgctcctctgcccttcctttccctggggtactactctccagcttgggaggaagcccagtagccattttgtaactgcctaccagtcgccctctgtgcctaataaagtctctttttctca

SEQ ID NO: 14097 - DNA, 916 bp, Homo sapiens
  source 1..916: mol_type = unassigned DNA
ccggcgacaagatggcagcagcgtgtcggagcgtgaagggcctggtggcggtaataaccggaggagcctcgggcctgggcctggccacggcggagcgacttgtggggcagggagcctctgctgtgcttctggacctgcccaactcgggtggggaggcccaagccaagaagttaggaaacaactgcgttttcgccccagccgacgtgacctctgagaaggatgtgcaaacagctctggctctagcaaaaggaaagtttggccgtgtggatgtagctgtcaactgtgcaggcatcgcggtggctagcaagacgtacaacttaaagaagggccagacccataccttggaagacttccagcgagttcttgatgtgaatctcatgggcaccttcaatgtgatccgcctggtggctggtgagatgggccagaatgaaccagaccagggaggccaacgtggggtcatcatcaacactgccagtgtggctgccttcgagggtcaggttggacaagctgcatactctgcttccaaggggggaatagtgggcatgacactgcccattgctcgggatctggctcccataggtctgtttggcaccccactgctgaccagcctcccagagaaagtgtgcaacttcttggccagccaagtgcccttccctagccgactgggtgaccctgctgagtatgctcacctcgtacaggccatcatcgagaacccattcctcaatggagaggtcatccggctggatggggccattcgtatgcagccttgaagggagaaggcagagaaaacacacgctcctctgcccttcctttccctggggtactactctccagcttgggaggaagcccagtagccattttgtaactgcctaccagtcgccctctgtgcctaataaagtctctttttctcacagag

SEQ ID NO: 14098 - DNA, 1885 bp, Homo sapiens
  source 1..1885: mol_type = unassigned DNA
tggtgtaaaagacaatcgcggccacacaccgcgtgggggctgcgcaaagcagaactaggaagctttgctccggtctggacttcgtccctcccagatctctgagctagcaagcactgcagcccgagccaattgcgaaagaccaacaaagcccagcccagcggaaggaacggtttcggagttgtttttctttgatacgggagttcctccttgctctcgcccctactctttctggtgttagatcgagctaccctctaaaagcagtttagagtggtaaaaaaaaaaaaaaacacaccaaacgctcgcagccacaaaagggatgaaatttcttctggacatcctcctgcttctcccgttactgatcgtctgctccctagagtccttcgtgaagctttttattcctaagaggagaaaatcagtcaccggcgaaatcgtgctgattacaggagctgggcatggaattgggagactgactgcctatgaatttgctaaacttaaaagcaagctggttctctgggatataaataagcatggactggaggaaacagctgccaaatgcaagggactgggtgccaaggttcatacctttgtggtagactgcagcaaccgagaagatatttacagctctgcaaagaaggtgaaggcagaaattggagatgttagtattttagtaaataatgctggtgtagtctatacatcagatttgtttgctacacaagatcctcagattgaaaagacttttgaagttaatgtacttgcacatttctggactacaaaggcatttcttcctgcaatgacgaagaataaccatggccatattgtcactgtggcttcggcagctggacatgtctcggtccccttcttactggcttactgttcaagcaagtttgctgctgttggatttcataaaactttgacagatgaactggctgccttacaaataactggagtcaaaacaacatgtctgtgtcctaatttcgtaaacactggcttcatcaaaaatccaagtacaagtttgggacccactctggaacctgaggaagtggtaaacaggctgatgcatgggattctgactgagcagaagatgatttttattccatcttctatagcttttttaacaacattggaaaggatccttcctgagcgtttcctggcagttttaaaacaaaaaatcagtgttaagtttgatgcagttattggatataaaatgaaagcgcaataagcacctagttttctgaaaactgatttaccaggtttaggttgatgtcatctaatagtgccagaattttaatgtttgaacttctgttttttctaattatccccatttcttcaatatcatttttgaggctttggcagtcttcatttactaccacttgttctttagccaaaagctgattacatatgatataaacagagaaatacctttagaggtgactttaaggaaaatgaagaaaaagaaccaaaatgactttattaaaataatttccaagattatttgtggctcacctgaaggctttgcaaaatttgtaccataaccgtttatttaacatatatttttatttttgattgcacttaaattttgtataatttgtgtttctttttctgttctacataaaatcagaaacttcaagctctctaaataaaatgaaggactatatctagtggtatttcacaatgaatatcatgaactctcaatgggtaggtttcatcctacccattgccactctgtttcctgagagatacctcacattccaatgccaaacatttctgcacagggaagctagaggtggatacacgtgttgcaagtataaaagcatcactgggatttaaggagaattgagagaatgtacccacaaatggcagcaataataaatggatcacacttaaa

SEQ ID NO: 14099 - DNA, 2269 bp, Homo sapiens
  source 1..2269: mol_type = unassigned DNA
gactacacaaggactgaaccagaaggaagaggacagagcaaagccatgaacatcatcctagaaatccttctgcttctgatcaccatcatctactcctacttggagtcgttggtgaagtttttcattcctcagaggagaaaatctgtggctggggagattgttctcattactggagctgggcatggaataggcaggcagactacttatgaatttgcaaaacgacagagcatattggttctgtgggatattaataaggtgaagaaagaagtgggtgatgtaacaatcgtggtgaataatgctgggacagtatatccagccgatcttctcagcaccaaggatgaagagattaccaagacatttgaggtcaacatcctaggacatttttggatcacaaaagcacttcttccatcgatgatggagagaaatcatggccacatcgtcacagtggcttcagtgtgcggccacgaagggattccttacctcatcccatattgttccagcaaatttgccgctgttggctttcacagaggtctgacatcagaacttcaggccttgggaaaaactggtatcaaaacctcatgtctctgcccagtttttgtgaatactgggttcaccaaaaatccaagcacaagattatggcctgtattggagacagatgaagtcgtaagaagtctgatagatggaatacttaccaataagaaaatgatttttgttccatcgtatatcaatatctttctgagactacagaagtttcttcctgaacgcgcctcagcgattttaaatcgtatgcagaatattcaatttgaagcagtggttggccacaaaatcaaaatgaaatgaataaataagctccagccagagatgtatgcatgataatgatatgaatagtttcgaatcaatgctgcaaagctttatttcacattttttcagtcctgataatattaaaaacattggtttggcactagcagcagtcaaacgaacaagattaattacctgtcttcctgtttctcaagaatatttacgtagtttttcataggtctgtttttcctttcatgcctcttaaaaacttctgtgcttacataaacatacttaaaaggttttctttaagatattttatttttccatttaaaggtggacaaaagctacctccctaaaagtaaatacaaagagaacttatttacacagggaaggtttaagactgttcaagtagcattccaatctgtagccatgccacagaatatcaacaagaacacagaatgagtgcacagctaagagatcaagtttcagcaggcagctttatctcaacctggacatattttaagattcagcatttgaaagatttccctagcctcttcctttttcattagcccaaaacggtgcaactctattctggactttattacttgattctgtcttctgtataactctgaagtccaccaaaagtggaccctctatatttcctccctttttatagtcttataagatacattatgaaaggtgaccgactctattttaaatctcagaattttaagttctagccccatgataacctttttctttgtaatttatgctttcatatatccttggtcccagagatgtttagacaattttaggctcaaaaattaaagctaacacaggaaaaggaactgtactggctattacataagaaacaatggacccaagagaagaaaaggaagaaagaaaggttttttggtttttgttttgttttgttttgttttttgtttttttgagatggagtctcactctttcgcccaggctggagtgcagtggtatgatctcagctcactgcaagctccacctcccgggttcacgccattctcctgcctcagcctcctgagtagctgggactacaggcgcccgccaccacacccggctaattttttgtattttttgtagagacggggtttcaccatgttagccaagatggtctcgatctcctgacctcgtgatccacctgcctcggcctcccaaagtgctgggattacgggtgtgagccaccgtgcccagcctttttttttttaatagaaaaaataatccgactcccactacatcaagactaatcttgttttgtgtgtttttcacatgtattatagaatgcttttgcatggactatcctcttgtttttattaaaaacaaatgatttttttaaaagtcacaaaaacaattcactaaaaataaatatgtcattgtgctttaaaaaaataacctcttgtagttataaaataaaacgtttgacttctaaactctg

SEQ ID NO: 14100 - DNA, 2397 bp, Homo sapiens
  source 1..2397: mol_type = unassigned DNA
agacagtacctcctccctaggactacacaaggactgaaccagaaggaagaggacagagcaaagccatgaacatcatcctagaaatccttctgcttctgatcaccatcatctactcctacttggagtcgttggtgaagtttttcattcctcagaggagaaaatctgtggctggggagattgttctcattactggagctgggcatggaataggcaggcagactacttatgaatttgcaaaacgacagagcatattggttctgtgggatattaataagcgcggtgtggaggaaactgcagctgagtgccgaaaactaggcgtcactgcgcatgcgtatgtggtagactgcagcaacagagaagagatctatcgctctctaaatcaggtgaagaaagaagtgggtgatgtaacaatcgtggtgaataatgctgggacagtatatccagccgatcttctcagcaccaaggatgaagagattaccaagacatttgaggtcaacatcctaggacatttttggatcacaaaagcacttcttccatcgatgatggagagaaatcatggccacatcgtcacagtggcttcagtgtgcggccacgaagggattccttacctcatcccatattgttccagcaaatttgccgctgttggctttcacagaggtctgacatcagaacttcaggccttgggaaaaactggtatcaaaacctcatgtctctgcccagtttttgtgaatactgggttcaccaaaaatccaagcacaagattatggcctgtattggagacagatgaagtcgtaagaagtctgatagatggaatacttaccaataagaaaatgatttttgttccatcgtatatcaatatctttctgagactacagaagtttcttcctgaacgcgcctcagcgattttaaatcgtatgcagaatattcaatttgaagcagtggttggccacaaaatcaaaatgaaatgaataaataagctccagccagagatgtatgcatgataatgatatgaatagtttcgaatcaatgctgcaaagctttatttcacattttttcagtcctgataatattaaaaacattggtttggcactagcagcagtcaaacgaacaagattaattacctgtcttcctgtttctcaagaatatttacgtagtttttcataggtctgtttttcctttcatgcctcttaaaaacttctgtgcttacataaacatacttaaaaggttttctttaagatattttatttttccatttaaaggtggacaaaagctacctccctaaaagtaaatacaaagagaacttatttacacagggaaggtttaagactgttcaagtagcattccaatctgtagccatgccacagaatatcaacaagaacacagaatgagtgcacagctaagagatcaagtttcagcaggcagctttatctcaacctggacatattttaagattcagcatttgaaagatttccctagcctcttcctttttcattagcccaaaacggtgcaactctattctggactttattacttgattctgtcttctgtataactctgaagtccaccaaaagtggaccctctatatttcctccctttttatagtcttataagatacattatgaaaggtgaccgactctattttaaatctcagaattttaagttctagccccatgataacctttttctttgtaatttatgctttcatatatccttggtcccagagatgtttagacaattttaggctcaaaaattaaagctaacacaggaaaaggaactgtactggctattacataagaaacaatggacccaagagaagaaaaggaagaaagaaaggttttttggtttttgttttgttttgttttgttttttgtttttttgagatggagtctcactctttcgcccaggctggagtgcagtggtatgatctcagctcactgcaagctccacctcccgggttcacgccattctcctgcctcagcctcctgagtagctgggactacaggcgcccgccaccacacccggctaattttttgtattttttgtagagacggggtttcaccatgttagccaagatggtctcgatctcctgacctcgtgatccacctgcctcggcctcccaaagtgctgggattacgggtgtgagccaccgtgcccagcctttttttttttaatagaaaaaataatccgactcccactacatcaagactaatcttgttttgtgtgtttttcacatgtattatagaatgcttttgcatggactatcctcttgtttttattaaaaacaaatgatttttttaaaagtcacaaaaacaattcactaaaaataaatatgtcattgtgctttaaaaaaataacctcttgtagttataaaataaaacgtttgacttctaaactctg

SEQ ID NO: 14101 - DNA, 1232 bp, Homo sapiens
  source 1..1232: mol_type = unassigned DNA
ggaggagggactgaggcttctggattcctgggtctgtgggaggagggactggggctcctggattcctgggtctgtgggaagagaggagtgtctgagggaggaggggctggggacaaacttccaggtctctagccttcctggcaacgccccccgaggccggacttccaggatccagcctctattgaggatttgatgcgacggcctcacggggctttggaggtgaaagaggcccagagtagagagagagagagaccgacgtacacgggatggctacgggaacgcgctatgccgggaaggtggtggtcgtgaccgggggcgggcgcggcatcggagctgggatcgtgcgcgccttcgtgaacagcggggcccgagtggttatctgcgacaaggatgagtctgggggccgggccctggagcaggagctccctggagctgtctttatcctctgtgatgtgactcaggaagatgatgtgaagaccctggtttctgagaccatccgccgatttggccgcctggattgtgttgtcaacaacgctggccaccacccacccccacagaggcctgaggagacctctgcccagggattccgccagctgctggagctgaacctactggggacgtacaccttgaccaagctcgccctcccctacctgcggaagagtcaagggaatgtcatcaacatctccagcctggtgggggcaatcggccaggcccaggcagttccctatgtggccaccaagggggcagtaacagccatgaccaaagctttggccctggatgaaagtccatatggtgtccgagtcaactgtatctccccaggaaacatctggaccccgctgtgggaggagctggcagccttaatgccagaccctagggccacaatccgagagggcatgctggcccagccactgggccgcatgggccagcccgctgaggtcggggctgcggcagtgttcctggcctccgaagccaacttctgcacgggcattgaactgctcgtgacggggggtgcagagctggggtacgggtgcaaggccagtcggagcacccccgtggacgcccccgatatcccttcctgatttctctcatttctacttggggcccccttcctaggactctcccaccccaaactccaacctgtatcagatgcagcccccaagcccttagactctaagcccagttagcaaggtgccgggtcaccctgcaggttcccataaaaacgatttgcagcc

SEQ ID NO: 14102 - DNA, 1426 bp, Homo sapiens
  source 1..1426: mol_type = unassigned DNA
ggaatatgattatgcttaatctatgctcagttgaaaggggctggggctgctttctcccctcccttcttgactctctgttcacagaactcaggctgcctccagccagcctttgcccgctagactcactggccctgagcacttgaaggtgcagcaagtcactgagaatgagcactttcttctcggacacagcatggatctgcctggctgtccccacagtactatgtgggacagtattttgcaaatacaagaagagctcagggcagctgtggagctggatggtctgcctggcaggcctctgtgcagtctgcctgctcatcctgtcccctttttggggcttgatcctcttctcggtgtcatgcttcctcatgtatacttacttatctggccaagaattgttacctgtggatcagaaggcagtcctggtgacaggtggtgattgcgggcttggccatgctttgtgcaagtatctggatgagctgggcttcacggtatttgccggagttttgaatgaaaatggcccaggagctgaggaattgcgaagaacctgctctccgcgcctctcggtgctccaaatggacatcacgaagccagtgcagataaaagatgcttacagcaaggttgcagcaatgctgcaggacagaggactgtgggctgtgatcaacaatgctggggtgcttggctttccaactgatggggagcttcttcttatgactgactacaaacaatgcatggccgtgaacttctttggaactgtggaggtcacaaagacgtttttgcctcttcttagaaaatccaaagggaggctggtgaatgtcagcagcatgggaggaggggccccaatggaaaggctggcatcttatggctcatcaaaggcggctgtgaccatgttctcatcagttatgagactggagctttccaagtggggaattaaagttgcttccatccaacctggaggcttcctaacaaatatcgcaggcaccagtgacaagtgggaaaagctggagaaggacattctggaccacctccccgctgaggtacaggaagactacggccaggactacatcttagcacagcggaatttcctcctattgatcaactcgttagccagcaaggacttctctccggtgctgcgggacatccagcatgctatcttggcgaagagcccttttgcctattacacgccagggaaaggcgcttacttgtggatctgccttgctcactatttgcctattggcatatatgattactttgctaaaagacattttggccaagacaagcccatgcccagagctctaagaatgcctaactacaagaaaaaggccacctaggcaatggaagccctcaaagaagtcggaatgtcatagtcttgaaatgaaagggaaactgggaaactgggtttctcattaaagttgtttcccactctgta

SEQ ID NO: 14103 - DNA, 783 bp, Homo sapiens
  source 1..783: mol_type = unassigned DNA
atgggggacgtcctggaacagttcttcatcctcacagggctgctggtgtgcctggcctgcctggcgaagtgcgtgagattctccagatgtgttttactgaactactggaaagttttgccaaagtctttcttgcggtcaatgggacagtgggcagtgatcactggagcaggcgatggaattgggaaagcgtactcgttcgagctagcaaaacgtggactcaatgttgtccttattagccggacgctggaaaaactagaggccattgccacagagatcgagcggactacagggaggagtgtgaagattatacaagcagattttacaaaagatgacatctacgagcatattaaagaaaaacttgcaggcttagaaattggaattttagtcaacaatgtcggaatgcttccaaaccttctcccaagccatttcctgaacgcaccggatgaaatccagagcctcatccattgtaacatcacctccgtagtcaagatgacacagctaattctgaaacatatggaatcaaggcagaaaggtctcatcctgaacatttcttctgggatagccctgtttccttggcctctctactccatgtactcagcttccaaggcgtttgtgtgcgcattttccaaggccctgcaagaggaatataaagcaaaagaagtcatcatccaggcgggctttctgagcctgatcccggcctgggccttctacagcggtgccttccaaaggctgctcctgacacactatgtggcatacctgaagctcaacaccaaggtcaggtag

SEQ ID NO: 14104 - DNA, 1135 bp, Homo sapiens
  source 1..1135: mol_type = unassigned DNA
tacacagagagccacggccagggctgaaacagtctgttgagtgcagccatgggggacgtcctggaacagttcttcatcctcacagggctgctggtgtgcctggcctgcctggcgaagtgcgtgagattctccagatgtgttttactgaactactggaaagttttgccaaagtctttcttgcggtcaatgggacagtgggcagtgatcactggagcaggcgatggaattgggaaagcgtactcgttcgagctagcaaaacgtggactcaatgttgtccttattagccggacgctggaaaaactagaggccattgccacagagatcgagcggactacagggaggagtgtgaagattatacaagcagattttacaaaagatgacatctacgagcatattaaagaaaaacttgcaggcttagaaattggaattttagtcaacaatgtcggaatgcttccaaaccttctcccaagccatttcctgaacgcaccggatgaaatccagagcctcatccattgtaacatcacctccgtagtcaagatgacacagctaattctgaaacatatggaatcaaggcagaaaggtctcatcctgaacatttcttctgggatagccctgtttccttggcctctctactccatgtactcagcttccaaggcgtttgtgtgcgcattttccaaggccctgcaagaggaatataaagcaaaagaagtcatcatccaggtgctgaccccatatgctgtctcgactgcaatgacaaagtatctaaatacaaatgtgataaccaagactgctgatgagtttgtcaaagagtcattgaattatgtcacaattggaggtgaaacctgtggctgccttgcccatgaaatcttggcgggctttctgagcctgatcccggcctgggccttctacagcggtgccttccaaaggctgctcctgacacactatgtggcatacctgaagctcaacaccaaggtcaggtagccaggcggtgaggagtccagcacaaccttttcctcaccagtcccatgctggctgaagaggaccagaggagcagaccagcacttcaacctagtccgctgaagatggagggggctggggtcacagaggcatagaatacacattttttgccacttta

SEQ ID NO: 14105 - DNA, 2683 bp, Homo sapiens
  source 1..2683: mol_type = unassigned DNA
gctcatcttcctaccagaaatcggcaagtcactgaccctcgtcccgcccccgccattccccgcctcctcctgtcccgcagtcggcgtccagcggctctgcttgttcgtgtgtgtgtcgttgcaggccttattcatgggctcaccgctgaggttcgacgggcgggtggtactggtcaccggcgcgggggcaggattgggccgagcctatgccctggcttttgcagaaagaggagcgttagttgttgtgaatgatttgggaggggacttcaaaggagttggtaaaggctccttagctgctgataaggttgttgaagaaataagaaggagaggtggaaaagcagtggccaactatgattcagtggaagaaggagagaaggttgtgaagacagccctggatgcttttggaagaatagatgttgtggtcaacaatgctggaattctgagggatcgttcctttgctaggataagtgatgaagactgggatataatccacagagttcatttgcggggttcattccaagtgacacgggcagcatgggaacacatgaagaaacagaagtatggaaggattattatgacttcatcagcttcaggaatatatggcaactttggccaggccaattatagtgctgcaaagttgggtcttctgggccttgcaaattctcttgcaattgaaggcaggaaaagcaacattcattgtaacaccattgctcctaatgcgggatcacggatgactcagacagttatgcctgaagatcttgtggaagccctgaagccagagtatgtggcacctcttgtcctttggctttgtcacgagagttgtgaggagaatggtggcttgtttgaggttggagcaggatggattggaaaattacgctgggagcggactcttggagctattgtaagacaaaagaatcacccaatgactcctgaggcagtcaaggctaactggaagaagatctgtgactttgagaatgccagcaagcctcagagtatccaagaatcaactggcagtataattgaagttctgagtaaaatagattcagaaggaggagtttcagcaaatcatactagtcgtgcaacgtctacagcaacatcaggatttgctggagctattggccagaaactccctccattttcttatgcttatacggaactggaagctattatgtatgcccttggagtgggagcgtcaatcaaggatccaaaagatttgaaatttatttatgaaggaagttctgatttctcctgtttgcccaccttcggagttatcataggtcagaaatctatgatgggtggaggattagcagaaattcctggactttcaatcaactttgcaaaggttcttcatggagagcagtacttagagttatataaaccacttcccagagcaggaaaattaaaatgtgaagcagttgttgctgatgtcctagataaaggatccggtgtagtgattattatggatgtctattcttattctgagaaggaacttatatgccacaatcagttctctctctttcttgttggctctggaggctttggtggaaaacggacatcagacaaagtcaaggtagctgtagccatacctaatagacctcctgatgctgtacttacagataccacctctcttaatcaggctgctttgtaccgcctcagtggagactggaatcccttacacattgatcctaactttgctagtctagcaggttttgacaagcccatattacatggattatgtacatttggattttctgccaggcgtgtgttacagcagtttgcagataatgatgtgtcaagattcaaggcaattaaggctcgttttgcaaaaccagtatatccaggacaaactctacaaactgagatgtggaaggaaggaaacagaattcattttcaaaccaaggtccaagaaactggagacattgtcatttcaaatgcatatgtggatcttgcaccaacatctggtacttcagctaagacaccctctgagggcgggaagcttcagagtacctttgtatttgaggaaataggacgccgcctaaaggatattgggcctgaggtggtgaagaaagtaaatgctgtatttgagtggcatataaccaaaggcggaaatattggggctaagtggactattgacctgaaaagtggttctggaaaagtgtaccaaggccctgcaaaaggtgctgctgatacaacaatcatactttcagatgaagatttcatggaggtggtcctgggcaagcttgaccctcagaaggcattctttagtggcaggctgaaggccagagggaacatcatgctgagccagaaacttcagatgattcttaaagactacgccaagctctgaagggcacactacactattaataaaaatggaatcattaaatactctcttcacccaaatatgcttgattattctgcaaaagtgattagaactaagatgcaggggaaattgcttaacattttcagatatcagataactgcagattttcattttctactaatttttcatgtatcattatttttacaaggaactatatataagctagcacataattatccttctgttcttagatctgtatcttcataataaaaaattttgcccaagtcctgtttccttagaatttgtgatagcattgataagttgaaaggaaaattaaatcaataaaggcctttgatacctttg

SEQ ID NO: 14106 - DNA, 2740 bp, Homo sapiens
  source 1..2740: mol_type = unassigned DNA
ttattcatgggctcaccgctgaggttcgacgggcgggtggtactggtcaccggcgcgggggcaggtgagcatgcgaaggttggaggccgcgccccttgctgaggcgcagctggctgctcttttcgggccggcatacgcgcgcagccgcagctgaggtcaccccgctgaggtggtggggaggggaatggttattcttgaggcaccgcatctcttgaggaggaaagagccggaaacacctggtctctcaagcaggattgggccgagcctatgccctggcttttgcagaaagaggagcgttagttgttgctttcaaaatctatgcaataaccctatggagaagatcatttcacaatgcagattctttgtttcaatgaatgatttgggaggggacttcaaaggagttggtaaaggctccttagctgctgataaggttgttgaagaaataagaaggagaggtggaaaagcagtggccaactatgattcagtggaagaaggagagaaggttgtgaagacagccctggatgcttttggaagaatagatgttgtggtcaacaatgctggaattctgagggatcgttcctttgctaggataagtgatgaagactgggatataatccacagagttcatttgcggggttcattccaagtgacacgggcagcatgggaacacatgaagaaacagaagtatggaaggattattatgacttcatcagcttcaggaatatatggcaactttggccaggccaattatagtgctgcaaagttgggtcttctgggccttgcaaattctcttgcaattgaaggcaggaaaagcaacattcattgtaacaccattgctcctaatgcgggatcacggatgactcagacagttatgcctgaagatcttgtggaagccctgaagccagagtatgtggcacctcttgtcctttggctttgtcacgagagttgtgaggagaatggtggcttgtttgaggttggagcaggatggattggaaaattacgctgggagcggactcttggagctattgtaagacaaaagaatcacccaatgactcctgaggcagtcaaggctaactggaagaagatctgtgactttgagaatgccagcaagcctcagagtatccaagaatcaactggcagtataattgaagttctgagtaaaatagattcagaaggaggagtttcagcaaatcatactagtcgtgcaacgtctacagcaacatcaggatttgctggagctattggccagaaactccctccattttcttatgcttatacggaactggaagctattatgtatgcccttggagtgggagcgtcaatcaaggatccaaaagatttgaaatttatttatgaaggaagttctgatttctcctgtttgcccaccttcggagttatcataggtcagaaatctatgatgggtggaggattagcagaaattcctggactttcaatcaactttgcaaaggttcttcatggagagcagtacttagagttatataaaccacttcccagagcaggaaaattaaaatgtgaagcagttgttgctgatgtcctagataaaggatccggtgtagtgattattatggatgtctattcttattctgagaaggaacttatatgccacaatcagttctctctctttcttgttggctctggaggctttggtggaaaacggacatcagacaaagtcaaggtagctgtagccatacctaatagacctcctgatgctgtacttacagataccacctctcttaatcaggctgctttgtaccgcctcagtggagactggaatcccttacacattgatcctaactttgctagtctagcaggttttgacaagcccatattacatggattatgtacatttggattttctgccaggcgtgtgttacagcagtttgcagataatgatgtgtcaagattcaaggcaattaaggctcgttttgcaaaaccagtatatccaggacaaactctacaaactgagatgtggaaggaaggaaacagaattcattttcaaaccaaggtccaagaaactggagacattgtcatttcaaatgcatatgtggatcttgcaccaacatctggtacttcagctaagacaccctctgagggcgggaagcttcagagtacctttgtatttgaggaaataggacgccgcctaaaggatattgggcctgaggtggtgaagaaagtaaatgctgtatttgagtggcatataaccaaaggcggaaatattggggctaagtggactattgacctgaaaagtggttctggaaaagtgtaccaaggccctgcaaaaggtgctgctgatacaacaatcatactttcagatgaagatttcatggaggtggtcctgggcaagcttgaccctcagaaggcattctttagtggcaggctgaaggccagagggaacatcatgctgagccagaaacttcagatgattcttaaagactacgccaagctctgaagggcacactacactattaataaaaatggaatcattaaatactctcttcacccaaatatgcttgattattctgcaaaagtgattagaactaagatgcaggggaaattgcttaacattttcagatatcagataactgcagattttcattttctactaatttttcatgtatcattatttttacaaggaactatatataagctagcacataattatccttctgttcttagatctgtatcttcataataaaaaattttgcccaagtcctgtttc

SEQ ID NO: 14107 - DNA, 2589 bp, Homo sapiens
  source 1..2589: mol_type = unassigned DNA
tctgcttgttcgtgtgtgtgtcgttgcaggccttattcatgggctcaccgctgaggttcgacgggcgggtggtactggtcaccggcgcgggggcaggattgggccgagcctatgccctggcttttgcagaaagaggagcgttagttgttgctttcaaaatctatgcaataaccctatggagaagatcatttcacaatgcagattctttgtttcaatgaatgatttgggaggggacttcaaaggagttggtaaaggctccttagctgctgataaggttgttgaagaaataagaaggagaggtggaaaagcagtggccaactatgattcagtggaagaaggagagaaggttgtgaagacagccctggatgcttttggaagaatagatgttgtggtcaacaatgctggaattctgagggatcgttcctttgctaggataagtgatgaagactgggatataatccacagagttcatttgcggggttcattccaagtgacacgggcagcatgggaacacatgaagaaacagaagtatggaaggattattatgacttcatcagcttcaggaatatatggcaactttggccaggccaattatagtgctgcaaagttgggtcttctgggccttgcaaattctcttgcaattgaaggcaggaaaagcaacattcattgtaacaccattgctcctaatgcgggatcacggatgactcagacagttatgcctgaagatcttgtggaagccctgaagccagagtatgtggcacctcttgtcctttggctttgtcacgagagttgtgaggagaatggtggcttgtttgaggttggagcaggatggattggaaaattacgctgggagcggactcttggagctattgtaagacaaaagaatcacccaatgactcctgaggcagtcaaggctaactggaagaagatctgtgactttgagaatgccagcaagcctcagagtatccaagaatcaactggcagtataattgaagttctgagtaaaatagattcagaaggaggagtttcagcaaatcatactagtcgtgcaacgtctacagcaacatcaggatttgctggagctattggccagaaactccctccattttcttatgcttatacggaactggaagctattatgtatgcccttggagtgggagcgtcaatcaaggatccaaaagatttgaaatttatttatgaaggaagttctgatttctcctgtttgcccaccttcggagttatcataggtcagaaatctatgatgggtggaggattagcagaaattcctggactttcaatcaactttgcaaaggttcttcatggagagcagtacttagagttatataaaccacttcccagagcaggaaaattaaaatgtgaagcagttgttgctgatgtcctagataaaggatccggtgtagtgattattatggatgtctattcttattctgagaaggaacttatatgccacaatcagttctctctctttcttgttggctctggaggctttggtggaaaacggacatcagacaaagtcaaggtagctgtagccatacctaatagacctcctgatgctgtacttacagataccacctctcttaatcaggctgctttgtaccgcctcagtggagactggaatcccttacacattgatcctaactttgctagtctagcaggttttgacaagcccatattacatggattatgtacatttggattttctgccaggcgtgtgttacagcagtttgcagataatgatgtgtcaagattcaaggcaattaaggctcgttttgcaaaaccagtatatccaggacaaactctacaaactgagatgtggaaggaaggaaacagaattcattttcaaaccaaggtccaagaaactggagacattgtcatttcaaatgcatatgtggatcttgcaccaacatctggtacttcagctaagacaccctctgagggcgggaagcttcagagtacctttgtatttgaggaaataggacgccgcctaaaggatattgggcctgaggtggtgaagaaagtaaatgctgtatttgagtggcatataaccaaaggcggaaatattggggctaagtggactattgacctgaaaagtggttctggaaaagtgtaccaaggccctgcaaaaggtgctgctgatacaacaatcatactttcagatgaagatttcatggaggtggtcctgggcaagcttgaccctcagaaggcattctttagtggcaggctgaaggccagagggaacatcatgctgagccagaaacttcagatgattcttaaagactacgccaagctctgaagggcacactacactattaataaaaatggaatcattaaatactctcttcacccaaatatgcttgattattctgcaaaagtgattagaactaagatgcaggggaaattgcttaacattttcagatatcagataactgcagattttcattttctactaatttttcatgtatcattatttttacaaggaactatatataagctagcacataattatccttctgttcttagatctgtatcttcataataaaaaattttgcccaagtcctgtttccttag

SEQ ID NO: 14108 - DNA, 2225 bp, Homo sapiens
  source 1..2225: mol_type = unassigned DNA
aatagtgcctgactgtcttttggaagaagagttagtgtctttgatttagaattaagctaagaagagcttttagtttctgcttcccttgtaacaactggggtaaaaaagaagctgagaaagataggatttgctggcaaagggggcctatgttggtgcttttcttggtgctgcaacgggactgagatataatccacagagttcatttgcggggttcattccaagtgacacgggcagcatgggaacacatgaagaaacagaagtatggaaggattattatgacttcatcagcttcaggaatatatggcaactttggccaggccaattatagtgctgcaaagttgggtcttctgggccttgcaaattctcttgcaattgaaggcaggaaaagcaacattcattgtaacaccattgctcctaatgcgggatcacggatgactcagacagttatgcctgaagatcttgtggaagccctgaagccagagtatgtggcacctcttgtcctttggctttgtcacgagagttgtgaggagaatggtggcttgtttgaggttggagcaggatggattggaaaattacgctgggagcggactcttggagctattgtaagacaaaagaatcacccaatgactcctgaggcagtcaaggctaactggaagaagatctgtgactttgagaatgccagcaagcctcagagtatccaagaatcaactggcagtataattgaagttctgagtaaaatagattcagaaggaggagtttcagcaaatcatactagtcgtgcaacgtctacagcaacatcaggatttgctggagctattggccagaaactccctccattttcttatgcttatacggaactggaagctattatgtatgcccttggagtgggagcgtcaatcaaggatccaaaagatttgaaatttatttatgaaggaagttctgatttctcctgtttgcccaccttcggagttatcataggtcagaaatctatgatgggtggaggattagcagaaattcctggactttcaatcaactttgcaaaggttcttcatggagagcagtacttagagttatataaaccacttcccagagcaggaaaattaaaatgtgaagcagttgttgctgatgtcctagataaaggatccggtgtagtgattattatggatgtctattcttattctgagaaggaacttatatgccacaatcagttctctctctttcttgttggctctggaggctttggtggaaaacggacatcagacaaagtcaaggtagctgtagccatacctaatagacctcctgatgctgtacttacagataccacctctcttaatcaggctgctttgtaccgcctcagtggagactggaatcccttacacattgatcctaactttgctagtctagcaggttttgacaagcccatattacatggattatgtacatttggattttctgccaggcgtgtgttacagcagtttgcagataatgatgtgtcaagattcaaggcaattaaggctcgttttgcaaaaccagtatatccaggacaaactctacaaactgagatgtggaaggaaggaaacagaattcattttcaaaccaaggtccaagaaactggagacattgtcatttcaaatgcatatgtggatcttgcaccaacatctggtacttcagctaagacaccctctgagggcgggaagcttcagagtacctttgtatttgaggaaataggacgccgcctaaaggatattgggcctgaggtggtgaagaaagtaaatgctgtatttgagtggcatataaccaaaggcggaaatattggggctaagtggactattgacctgaaaagtggttctggaaaagtgtaccaaggccctgcaaaaggtgctgctgatacaacaatcatactttcagatgaagatttcatggaggtggtcctgggcaagcttgaccctcagaaggcattctttagtggcaggctgaaggccagagggaacatcatgctgagccagaaacttcagatgattcttaaagactacgccaagctctgaagggcacactacactattaataaaaatggaatcattaaatactctcttcacccaaatatgcttgattattctgcaaaagtgattagaactaagatgcaggggaaattgcttaacattttcagatatcagataactgcagattttcattttctactaatttttcatgtatcattattttta

SEQ ID NO: 14109 - DNA, 2494 bp, Homo sapiens
  source 1..2494: mol_type = unassigned DNA
attccccgcctcctcctgtcccgcagtcggcgtccagcggctctgcttgttcgtgtgtgtgtcgttgcaggccttattcatgggctcaccgctgaggttcgacgggcgggtggtactggtcaccggcgcgggggcagtgaatgatttgggaggggacttcaaaggagttggtaaaggctccttagctgctgataaggttgttgaagaaataagaaggagaggtggaaaagcagtggccaactatgattcagtggaagaaggagagaaggttgtgaagacagccctggatgcttttggaagaatagatgttgtggtcaacaatgctggaattctgagggatcgttcctttgctaggataagtgatgaagactgggatataatccacagagttcatttgcggggttcattccaagtgacacgggcagcatgggaacacatgaagaaacagaagtatggaaggattattatgacttcatcagcttcaggaatatatggcaactttggccaggccaattatagtgctgcaaagttgggtcttctgggccttgcaaattctcttgcaattgaaggcaggaaaagcaacattcattgtaacaccattgctcctaatgcgggatcacggatgactcagacagttatgcctgaagatcttgtggaagccctgaagccagagtatgtggcacctcttgtcctttggctttgtcacgagagttgtgaggagaatggtggcttgtttgaggttggagcaggatggattggaaaattacgctgggagcggactcttggagctattgtaagacaaaagaatcacccaatgactcctgaggcagtcaaggctaactggaagaagatctgtgactttgagaatgccagcaagcctcagagtatccaagaatcaactggcagtataattgaagttctgagtaaaatagattcagaaggaggagtttcagcaaatcatactagtcgtgcaacgtctacagcaacatcaggatttgctggagctattggccagaaactccctccattttcttatgcttatacggaactggaagctattatgtatgcccttggagtgggagcgtcaatcaaggatccaaaagatttgaaatttatttatgaaggaagttctgatttctcctgtttgcccaccttcggagttatcataggtcagaaatctatgatgggtggaggattagcagaaattcctggactttcaatcaactttgcaaaggttcttcatggagagcagtacttagagttatataaaccacttcccagagcaggaaaattaaaatgtgaagcagttgttgctgatgtcctagataaaggatccggtgtagtgattattatggatgtctattcttattctgagaaggaacttatatgccacaatcagttctctctctttcttgttggctctggaggctttggtggaaaacggacatcagacaaagtcaaggtagctgtagccatacctaatagacctcctgatgctgtacttacagataccacctctcttaatcaggctgctttgtaccgcctcagtggagactggaatcccttacacattgatcctaactttgctagtctagcaggttttgacaagcccatattacatggattatgtacatttggattttctgccaggcgtgtgttacagcagtttgcagataatgatgtgtcaagattcaaggcaattaaggctcgttttgcaaaaccagtatatccaggacaaactctacaaactgagatgtggaaggaaggaaacagaattcattttcaaaccaaggtccaagaaactggagacattgtcatttcaaatgcatatgtggatcttgcaccaacatctggtacttcagctaagacaccctctgagggcgggaagcttcagagtacctttgtatttgaggaaataggacgccgcctaaaggatattgggcctgaggtggtgaagaaagtaaatgctgtatttgagtggcatataaccaaaggcggaaatattggggctaagtggactattgacctgaaaagtggttctggaaaagtgtaccaaggccctgcaaaaggtgctgctgatacaacaatcatactttcagatgaagatttcatggaggtggtcctgggcaagcttgaccctcagaaggcattctttagtggcaggctgaaggccagagggaacatcatgctgagccagaaacttcagatgattcttaaagactacgccaagctctgaagggcacactacactattaataaaaatggaatcattaaatactctcttcacccaaatatgcttgattattctgcaaaagtgattagaactaagatgcaggggaaattgcttaacattttcagatatcagataactgcagattttcattttctactaatttttcatgtatcattatttttacaaggaactatatataagctagcacataattatccttctgttcttagatctgtatcttcataataaaaaattttgccc

SEQ ID NO: 14110 - DNA, 1190 bp, Homo sapiens
  source 1..1190: mol_type = unassigned DNA
ttccgaaagcagcggcggtgtttgcttcactgcttggaagtgtgagtgcgcgaagatgcgaaaggtggttttgatcaccggggctagcagtggcattggcctggccctctgcaagcggctgctggcggaagatgatgagcttcatctgtgtttggcgtgcaggaacatgagcaaggcagaagctgtctgtgctgctctgctggcctctcaccccactgctgaggtcaccattgtccaggtggatgtcagcaacctgcagtcggtcttccgggcctccaaggaacttaagcaaaggtttcagagattagactgtatatatctaaatgctgggatcatgcctaatccacaactaaatatcaaagcacttttctttggcctcttttcaagaaaagtgattcatatgttctccacagctgaaggcctgctgacccagggtgataagatcactgctgatggacttcaggaggtgtttgagaccaatgtctttggccattttatcctgattcgggaactggagcctctcctctgtcacagtgacaatccatctcagctcatctggacatcatctcgcagtgcaaggaaatctaatttcagcctcgaggacttccagcacagcaaaggcaaggaaccctacagctcttccaaatatgccactgaccttttgagtgtggctttgaacaggaacttcaaccagcagggtctctattccaatgtggcctgtccaggtacagcattgaccaatttgacatatggaattctgcctccgtttatatggacgctgttgatgccggcaatattgctacttcgcttttttgcaaatgcattcactttgacaccatataatggaacagaagctctggtatggcttttccaccaaaagcctgaatctctcaatcctctgatcaaatatctgagtgccaccactggctttggaagaaattacattatgacccagaagatggacctagatgaagacactgctgaaaaattttatcaaaagttactggaactggaaaagcacattagggtcactattcaaaaaacagataatcaggccaggctcagtggctcatgcctataattccagcactttgggaggccaaggcagaaggatcacttgagaccaggagttcaagaccagcctgagaaacatagtgagcccttgtctctacaaaaagaaataaaaataa

SEQ ID NO: 14111 - DNA, 666 bp, Homo sapiens
  source 1..666: mol_type = unassigned DNA
gagtgcgcgaagatgcgaaaggtggttttgatcaccggggctagcagtggcattggcctggccctctgcaagcggctgctggcggaagatgatgagcttcatctgtgtttggcgtgcaggaacatgagcaaggcagaagctgtctgtgctgctctgctggcctctcaccccactgctgaggtcaccattgtccaggtggatgtcagcaacctgcagtcggtcttccgggcctccaaggaacttaagcaaaggtttcagagattagactgtatatatctaaatgctgggatcatgcctaatccacaactaaatatcaaagcacttttctttggcctcttttcaagctgaaggcctgctgacccagggtgataagatcactgctgatggacttcaggaggtgtttgagaccaatgtctttggccattttatcctggtaaagaagctgtgggcttaataagctaatatttcgtgtgatagtttctgtaaagctctgggcacagggcattattatagttgagcagccagttaactgatttaatctcatgtttgagttttcttgattgcatttgccttgtttattgtgagcatggaatacttctggaagctttcctagtagatttttctttaataaatgtactaatagtttttgatttacagaattactgc

SEQ ID NO: 14112 - DNA, 507 bp, Homo sapiens
  source 1..507: mol_type = unassigned DNA
gaggcggcccgaaatcgtaggacttccgaaagcagcggcggtgtttgcttcactgcttggaagtgtgagtgcgcgaagatgcgaaaggtggttttgatcaccggggctagcagtggcattggcctggccctctgcaagcggctgctggcggaagatgatgagcttcatctgtgtttggcgtgcaggaacatgagcaaggcagaagctgtctgtgctgctctgctggcctctcaccccactgctgaggtcaccattgtccaggtggatgtcagcaacctgcagtcggtcttccgggcctccaaggaacttaagcaaaggtatatctcttgctgatggattttttttctcatgtgattgtgcagcataacacttaataaaataagagaggaaagaaaaacctgaaaagaaacaggtgcggtgtaagcagttatgttgaggaagtctgtatagggtgacccattgtgtctcagtaccacgttttctttctttttttttttttttttaaag

SEQ ID NO: 14113 - DNA, 1386 bp, Homo sapiens
  source 1..1386: mol_type = unassigned DNA
gaaatcgtaggacttccgaaagcagcggcggtgtttgcttcactgcttggaagtgtgagtgcgcgaagatgcgaaaggtggttttgatcaccggggctagcagtggcattggcctggccctctgcaagcggctgctggcggaagatgatgagcttcatctgtgtttggcgtgcaggaacatgagcaaggcagaagctgtctgtgctgctctgctggcctctcaccccactgctgaggtcaccattgtccaggtggatgtcagcaacctgcagtcggtcttccgggcctccaaggaacttaagcaaaggtttcagagattagactgtatatatctaaatgctgggatcatgcctaatccacaactaaatatcaaagcacttttctttggcctcttttcaagaaaagtgattcatatgttctccacagctgaaggcctgctgacccagggtgataagatcactgctgatggacttcaggaggtgtttgagaccaatgtctttggccattttatcctgattcgggaactggagcctctcctctgtcacagtgacaatccatctcagctcatctggacatcatctcgcagtgcaaggaaatctaatttcagcctcgaggacttccagcacagcaaaggcaaggaaccctacagctcttccaaatatgccactgaccttttgagtgtggctttgaacaggaacttcaaccagcagcttcgcttttttgcaaatgcattcactttgacaccatataatggaacagaagctctggtatggcttttccaccaaaagcctgaatctctcaatcctctgatcaaatatctgagtgccaccactggctttggaagaaattacattatgacccagaagatggacctagatgaagacactgctgaaaaattttatcaaaagttactggaactggaaaagcacattagggtcactattcaaaaaacagataatcaggccaggctcagtggctcatgcctataattccagcactttgggaggccaaggcagaaggatcacttgagaccaggagttcaagaccagcctgagaaacatagtgagcccttgtctctacaaaaagaaataaaaataatagctgggtgtggtggcatgcgcatgtagtcccagctactcagaaggatgaggtgggaggatctcttgaggctgggaggcagaggttgcagtgagctgagattgtgccactgcactccagcctgggtgacagcgagaccctgtctcaaaatatgtatatatttaatatatatataaaaccagagctgacaatgacactctggaacattgcataccttctgtacattctggggtacatggatttctactgagttggataatatgcatttgtaataaactatgaactatg

SEQ ID NO: 14114 - DNA, 357 bp, Homo sapiens
  source 1..357: mol_type = unassigned DNA
gttgtgattcgggaactggagcctctcctctgtcacagtgacaatccatctcagctcatctggacatcatctcgcagtgcaaggaaatctaatttcagcctcgaggacttccagcacagcaaaggcaaggaaccctacagctcttccaaatatgccactgaccttttgagtgtggctttgaacaggaacttcaaccagcagcttcgcttttttgcaaatgcattcactttgacaccatataatggaacagaagctctggtatggcttttccaccaaaagcctgaatctctcaatcctctgatcaaatatctgagtgccaccactggctttggaagaaattacattatgacccagaag

SEQ ID NO: 14115 - DNA, 990 bp, Homo sapiens
  source 1..990: mol_type = unassigned DNA
gggattcccacccacccacagcccgccatggcgtctcagctccagaaccgactccgctccgcactggccttggtcacaggtgcggggagcggcatcggccgagcggtcagtgtacgcctggccggagagggggccaccgtagctgcctgcgacctggaccgggcagcggcacaggagacggtgcggctgctgggcgggccagggagcaaggaggggccgccccgagggaaccatgctgccttccaggctgacgtgtctgaggccagggccgccaggtgcctgctggaacaagtgcaggcctgcttttctcgcccaccatctgtcgttgtgtcctgtgcgggcatcacccaggatgagtttctgctgcacatgtctgaggatgactgggacaaagtcatagctgtcaacctcaagggcaccttcctagtcactcaggctgcagcacaagccctggtgtccaatggttgtcgtggttccatcatcaacatcagtagcatcgtaggaaaggtggggaacgtggggcagacaaactatgcagcatccaaggctggagtgattgggctgacccagaccgcagcccgggagcttggacgacatgggatccgctgtaactctgtcctcccagggttcattgcaacacccatgacacagaaagtgccacagaaagtggtggacaagattactgaaatgatcccgatgggacacttgggggaccctgaggatgtggcagatgtggtcgcattcttggcatctgaagatagtggatacatcacagggacctcagtggaagtcactggaggtcttttcatgtaactgcctcaaggaccctggactctgctcacccccccaccactctgcctggcctcctgctgatgaggactctaagttcccaggatacaaaaggggtggcagtgtatggttcaggaatgctgaatatgggaagcaggggtgcttgtgaccctaataaattccaagtcctcttccctgcca

SEQ ID NO: 14116 - DNA, 990 bp, Homo sapiens; identical to SEQ ID NO: 14115
  source 1..990: mol_type = unassigned DNA

SEQ ID NO: 14117 - DNA, 990 bp, Homo sapiens; identical to SEQ ID NO: 14115
  source 1..990: mol_type = unassigned DNA

SEQ ID NO: 14118 - DNA, 990 bp, Homo sapiens; identical to SEQ ID NO: 14115
  source 1..990: mol_type = unassigned DNA

SEQ ID NO: 14119 - DNA, 990 bp, Homo sapiens; identical to SEQ ID NO: 14115
  source 1..990: mol_type = unassigned DNA

SEQ ID NO: 14120 - DNA, 990 bp, Homo sapiens; identical to SEQ ID NO: 14115
  source 1..990: mol_type = unassigned DNA
